United States Patent Application Publication US 2009/0311680 A1 - sequence listing, part 7

SEQ ID NO: 78455 - DNA, 4014 bp, Saccharomyces pastorianus
atgagcttatcaccacacgtagaaaatgcttccattcccaaggggagtaccccgataccaaaaaacagaaacgttagttctataggcaagggcgagtttcttggatcttcgtcaagcaacaattcttcttttcgaatgaatcattactcaaatagtggacaaccttccgtgttagattctatacggcgacctaatctaactccaactttttcttacagtaatggggtttatatgcctgaaagtcacagaactagttcattcaacgatagttatttgccatatgataagaatccttacgcaaaaacaaccggaagcatgagcaataaatcgaacatgaaaatcaaaacaaagaaaaatgcaatcaacacaaatacaagaaagtcgtctggactcatttacaccaccaaagtggataaagaattatctagtatagacaaagtgaatgatccaaacattaacggtcttgtttgtgcaggtaaaactcatttggggctctataaattctcgccctcagatagatctatcaaatgcgttcatgatttcataacacctaatagcaacacctcaacaaggggaacgacatcccttttgcccaagctgagcaaaagaacaagacagaacaaatttagtaccattgcggatgttaagactggatttaataattacaagaactgtattgcagtgtgcaacaattctacggcgatatcgatatatgatctcaataaaagttcctcgatagacaatcccttgataacatccttatgcgaacacactagatctatcaatagttttgacttcaacatggtcgaatcaaacctaataataagtggtggacaagatagttgtgtaaaaatatgggatttacgttccaataaatctaaaagctcaaatagatctgacattagtataaataccgcatctgactcaatcagagatgtaaaatggatgcccggttacaattttgcatctaagaacgatcaaggttcatcaacgtatggtaatttaaaaagcggttacaaatttgcttctattcacgattcgggatacttgctaaagtttgatcttcgacaacctgcccaatacgaaaaaaaattaaatgctcacacaggacccggtctttgtttaaattggcatcccaatcaagaatacattgctacaggtggtagagacggtaaatgctgcctctggtttgttggcgacaatgccaatgccgccgaaaatacagtcctcaattacgggaactctccctcgttacatgcccccaatacgtccttgaacaatagcggctcgctggcatttcccaaactaacaattaatacgggctatccagtcactaaattgaagttcaagcctgcttatagtagtaatatatataattcattactaggaatatcgtcaatgggtgacgaagctgaagttcgcacctattccttggcaagaaagtacattccaaaacatgttctcctatcagaaacgccttctttaggattagtatggtgggacgaaaacttgatctttaatatcgataaggggacccgtataaatggctgggacattaacaaagaaccaacagtgctcgaaaatttgagcaaaaatacaacaacttggagagatttggatggtaacggtttactttcagttgatcaagagataggctcatatgaggtggtagaaccggagcttcaacctacctcaagtaccacatgcaagaagcatccaggtacaataaaaaacccgaagaatggcaatccagagaaccagggaataattggagggataaaaaaaggatttagccatactggattaacaagttttacgccagagagaccgcctactttaaaagcaggcccaacgtttagcacaaaaagcttaacattagcatctggagcatcttcttttaacagctcttccgcatcattgacatccctgacgccacaaactgaaaatagagaagaaatcgccattgaaccgccttgtatcatcactttggatataccgcagatcttcaataacataagattaaccaaaatcgcacattcaagaaaaaagaacgtcatttccgaaagttcttctatgaaaaattctccagtagaaaagttcaaatatttggcgagacagctcaagttttcgtatattcgagagcataatgtttcagacagtgcagacactgcatataaaaatgatatagagaacattgacgtcgttaaaaacgcaaccgaaacacatggtgataatactactactaccaataataatgatgatgatgatgatgatgatgatgacaaaataatcgaaagtcaccttttgaaaaaatacaattttccagaaaataatacatgggctaccttaatgaatgaaaaagtaaataacaaaaaatccaaaagaaattccagtagttcgagggagtttgacgagaaggatgtcagatcaagtatatcttccatttctgcaagtaggcaaagtcatgacagatctaggaagatcgacaagaacgtggaagcagaactgcaagaaaaaatacaaacactggtagatttgatatctattgcaacgcataacgcatctgtttatctatccatagatgatctaaccaatttcaaaatctggatcttgataagagattcattgttatgggacttgaagtggatgacctcctcccaaatttcatcagataacgcatctaatatggatgccaatgaaagctccgatttcgaagctggagaaaatctgaaaacaggaaaagagttcccagaggaggatggtgcagggacaagtggggctgagtcgttagttgaagaaaggccgcaggcatttcgtgctaactctgatgaaccaagtgatgccgaaaagaaacctgtttctaagctcaaagagcagctcaaaaacacggaaataatcccctatgcacagccaaatgaggattcagatgaagttttaactaagctaaaagagctacagaaccaacgcttggagtcaaggactaaaatgggagaaacagtgagtgacgatgtgattatagaggaagacgaacatgaacatcaagaagaagaacagcctcatgactcaccgactaagtcagcacaatttcacgcgtctcctatcgcgaaaagtataccaatattgcagaaacgtgagcaccgcaagtcattcatagatactttcatgttgcattctcccaacggttacaatggagatacggacataggtaacgaagatgacaatatatctcccaggtttacttacaacagcgtaagcccacgcagtaaggtttcgtcgttacaaagctatgccacaacaacttcgcaactagaaacttttaaaaagctttcttcccatacagcaccaataatcggatcgcccagacatgcgccatcacggccagatagcattggtagggaacaactgtcttcttcattgacgaaaaagcttgccaaatgtaagaaaattatcgctgacccaccctgggacacgaaaaaactcatcaaacaactctacaatcaagctactgagactgggaacgtcgtattgacggtgaatattttatttcttttccaaacgatataccaaataacggaaatcgacattgcaaaagacgcaatcgctcacttcttgttattattacatcgatacgaactcttcggcatcgctgcagacgtcttaaaatactgcccattcgaagatatcatgggttctgagggtgaccaatcttccattcggttgttttgcgaacgctgtggtgagttaatcactaacgaaagttctaaagaaaagctcagagcggaagctcagcagacgggcaataagaagatcatggacaagtttggatactggtattgtgactcttgtaagaagaagaatacatcttgtgttctatgtgaaagaccattaaagaaactgaccatggtcatcctcccctgtggacacgaaggtcacttccagtgcatacaagaatggtttctcgatgagaatgaacaagaatgtcccggcggttgccccggtgttgcattcatctag

SEQ ID NO: 78456 - DNA, 1494 bp, Saccharomyces pastorianus
atggatgcttcctcggttccaccaaaggtagatgattatggaatgtatacaactgaaatttcacatcataacccaatagagttgaaaaatctgctgtcatcatcagactccagaagaaattctcaagatgaagatagtctacctaacaatacaaacttaatcaaagaaattgactggcaaggcgagaaagttaaaacgtatccactaaactatcaaactgtaccactagtaaagctgcaggtgatagcatgcttgattatgttcgtagtctttggtatgaacgatcaaacagtaggtgcactacttcctacgctaattgaatactatcatatatcgcgggtagatgtctcaaacgtatttatagtccaattatgtggttatgtgatggcgtctttatcaaatgagagattgaataagcactttggtatgagaggtggtatgcttctagcagctggtttgtgtatagtatttcttatcattttagcaactgcaccttctagtttctatgtttgtatgttttgtggccttcctcttggtttagggatcggcatcttagattctaccggtaatgttttaatgggcagtcttttagtccataagaatgaactcatgggtatcatgcatggtctttacggggcagcagctatggttactcctcccttagtttcatattttgttgaatggggtcattggtctctttttttccttattcctctgttcttttctataataggcatgattgtaatcttcccggcttttaaatttgaaactgcaagtaaatacgactacctctgctctgtagaaaacaaagaaagcaacaatgatgtggaagaagcgggtgataactcgctgatggaatctaccaaggcgagcccaggattttttgaacttttaagaaatcctgctattttcttgtactcattgtatttgtttctttacttaggtgctgaaattacaactggttcatggttctttagttatttattggaaaccaaatcaagtaataaggttgctatgtcatacatagcggcatcgttttggacaggtttgactgtaggcaggttgtgtctaggatttgttactgaaagattcttcgaaaacgagtataaagcaagcaaagcgtacgcttttttaactctatcttcatacaccttatttgtgcttgttgggttgatcaattcaagctcagttttgtatttcgtcgtgttattttttgttgttttttgttgtggtacgtttatcggaccattattcccaaacgcaagtatagttgcattacaagtattacccaaaagactacatgtgagcggggttggggttgccgtcgccgttggtggttgtggtggtgcagccattccatatttggctggagttattgcacacacagtgggaatccagtatatcccactattgtgttggattatggttgcgttatttacattggaatggacattgtatcctaaattcattaaagggcatgaagaatatttttag

SEQ ID NO: 78457 - DNA, 1194 bp, Saccharomyces pastorianus
atgggtggttcttccgattcagactctcacgatggatatttgacttcccaatataattcctcgaattctcttttttcacttcacaccggtaacagctattcaagcgcatctctcgacagagccactttagattgtcaagattctgtttttttcgataatcacaaaagttcactgctgtctacagaggtcccaaggtttatttctaacgacccgttacacttacccattacactgaattacaaaagagacaatgcagaccctacgtatacaaatggaaaagttaacaagtttatgattgttttgattgggctaccagctactgggaagtctaccatttcttctcatttaattcaatgtttgaagaacaatccgctaactaattcattacgctgtaaagtttttaatgctggtaagataagaaggcaaatcagttgcgctaccatttcaaagcctttgcttttgtcgaatacatcttcggaagacttatttaatccgaaaaataacgataaaaaggaaacgtatgccaggatcactttgcaaaagttgtttcacgaaatcaacaacgatgaatgtgacgtgggaatcttcgacgccacaaattcgaccatcgaaagaagaagatttatatttgaggaggtttgttcgttcaatacagatgagctttctagtttcaatttggtgcccataatcttacaggtgtcatgttttaacagaagctttatcaaatacaatatccacaataaatcgtttaatgaagactacttagacaaaccttatgaacttgccatcaaagattttgcaaagagattaaaacattactattcgcagtttacacctttctcccttgatgagttcaatcaaatccatcgatatatcagccaacatgaagaaatcgatacgagcttatttttcttcaatgttatcaatgcgggcgtcgttgagccacattctttaaatcaaagtcattacccttcgacctgtggcaagcaaattagggacaccattatggttattgaaaatttcatcaatcactattctcagatgtttggttttgaatacatcgaagctgttaaattgttttttgaaagttttggaaatagctcagaggaaactttaactacactagactctgttgttaatgataaattttttgatgatttgcagagcctaattgaaagcaacggatttgcttga

SEQ ID NO: 78458 - DNA, 669 bp, Saccharomyces pastorianus
atgtccaatgatcctggtaatgaggttagctccttgtacccacctccacccccatacgtgaagtttttcacacagtccaatctggaaaaattaccaaaatacaaggaaaagaaggccgcaagtacgaagcagacggctccaaataacagtgacggcggcagtgaagaggagattacatgtgcgctagattacctaatcccaccccccatgcccaaaaatcagcagtaccgagcgtttgggagtatatggcaggtgaaggaccaactgcccgatttagagagcatgggactcacccaactttataagaaatccacagaaaacgaaagcacaaattatcaatacaaaatccaagagctacgcaaactattgaaatccctcctgctaaattacttggaactcatcggcgtattgagcataaatccggatatgtatgagcgcaaagtggagaacataaggaccattcttgtcaatattcaccacctacttaatgagtacagaccccatcagtcccgagagtcccttattatgctattggaagaacaattagaatacaagcgcggcgaaattcgcgagatcgagcaagtatgcaaacaggtacacgacaaactcaccagcatacaggacaccttaagaaccggatcacaatctcctccatcgtcgtcccaatga

SEQ ID NO: 78459 - DNA, 366 bp, Saccharomyces pastorianus
atgagcaacgaagttgacaggatggatgttgatgaagatgaatcgcaaaatattgcgcaaagctcaaatcaaagtgcgccagtggaaaccaaaaagaagagatttgaaattaagaaatggaccgcagtggcgttttggtcatgggatatagctgttgacaactgtgctatttgcaggaaccatataatggaaccatgcattgaatgccagccaaaggccatgacggacactgataatgaatgtgtagcagcctggggtgtctgtaatcacgctttccatttgcactgtattaataaatggatcaagacaagagacgcatgcccattagataaccaaccttggcagttagcaagatgcggtaggtga

SEQ ID NO: 78460 - DNA, 1416 bp, Saccharomyces pastorianus
atgatggttttttcgagcacctttatttttctaattttggagttagttgtactgtgtgaagcttcagtccacaccattcaaattaaggacaagcatttcgttgacacagtgactggaaaaccattcttcatcaaaggtgtggattatcagccaggaggctcttccgacgttagtgaaaagcaggatccgttatccaatccagatgcatgcgctcgtgatattttattatttcaagaattgggaataaacacagtaagaatttattctataaacccggatctgaaccatgatgcgtgcatgactatgctcgcaatggcaggtatttatcttatattggatgtcaattccccattgcaaaaccagcacttaaacagatatgaaccttggactacctataatgaagtttatttagaacacgttttcaaagttgtcgaacaattttctcattacaataatactttaggattttttgctgggaatgaaattgtaaacgacaaaagatcagcacaatattctcctgcttatgtcaaggagttgattggaactatgaagaattacataagcgcacactcgcccagaacaattccggtaggttactctgctgcagatgacctgaactatagggtatcactgtccgaatatttggagtgtaaagatgatgataagccagagaatagcgttgatttttacggagttaactcctaccaatggtgtggccaacaaactatgcaaacttcagggtacgatacattggtggatgcttacaggagctattccaagccagtttttttttcagaatttggatgcaataaagtattgccaaggcaattccaggaaataggttatttgttttctgaggagatgtattcagtattctgtggaggtctggtttacgaattttcacaggaggataataattatgggttagttgaatatcaagaagatgattcagtacagctcttagcagattttgagaagcttaaatcgcactaccaaaacattgagtttccttctatgaagactttaaaggaaactgttcagatggaggagacgccatcatgtgcggaagattatgaaaatttgaagattgaatctaaaatcgctaaaaatttaggaagttctttgataaaaaaaggcgtgaaagttgaaaaaggcaaatacatagatattcacgaggatcagctgtccaccaatgtcacgattttagacaagcatggtgacagatggaatgggcccaaaaagattgaaattaggcaaagcctgacattggcagacctggaaggagaagaacaagaagacgcagatgaagacaaagatgatttaaaacgaaaacaccggaattctgcctctatttccggcccattgttacctcttgggttgtgtttgcttttttttacttttagtttatttttttag

SEQ ID NO: 78461 - DNA, 327 bp, Saccharomyces pastorianus
atgaatactgataagatagcacaagacgaagtccaagataaggttttgcaaagagcagaactagcacattctgtatggaacttaaggttcaacctcagtaaagttgccaaacggattcgcatggaaacaaaggtatttccagagataaagataaatgacgcgcaatcacagttagagcgatctaggtgtagaatatttagccctgacctggaggaagaacatgtgcccttgattcaaggctttaaatgtttggattcaccccctcccgttccaccaagctcatcgcagggggaggacgaagagaacacggtagattcgcaatactag

SEQ ID NO: 78462 - DNA, 2580 bp, Saccharomyces pastorianus
atgtcatcatcctcaagttcatcagagtcatcgcctaatttatcgcggtcaaactcactggctaacacgatggtttccatgaaaacagaagaccatacgggattgtacgaccataggcagcaccctgactcactgccggtccgtcaccaacctccaacattgaagaacaaggaaattgctaagtccactaaaccttctattcctaaggagcagaagagtgcaacgagatacaacagccatgtggatgtgggaagcgtacccagtaggggccgcatggattttgaagatgaagggcagggtatggatgaaacggttgctcatcatcaattgagggcatctgccattttaacttctaacgcgaggccttccagactagcccactccatgccacatcaaaggcagctttatgtggaaagtaatatacacacaccaccaaaggatgtaggtgtaaagagagactatactatgtcatcttctactgcatcatcaggtaacaaatccaagctgagcgcatcttcctcggcaagtcctattacgaaggttagaaaatcttcgctggtcagtcctgttcttgagatcccacacgaatcgaaatctgatacacactccaagctggctaaacccaggaagaggacatattctaccacatctgcgcattcatctatcaatcccgcagttttactgacgaaaagcacatcccaaaaatcggatgcagatgaagatacattggaaagaacaccagtacgtatgaatactagagcttcttttgatagtgacgtatcacaggcgtcgagagattctcaagagacggaagaagatgtttgtttccctatgccaccacaattgcataccagagttaacggtatagatttcgatgaactggaagagtacgctcagtttgcaaacgcggagaagagtcaatttttggcaagtctgcaagtgcccaacgaacagaagtacagtaacgtttctcaggatatcgggtttaccagctctacttccacttcgggatcatcagctgccctaaaatatacaccaagagtttcgcagactggtgaaaagagcgagagtaccaatgaaacagaaatccatgaaaagaaggaagacgagcatgagaaaatcaagcctagtttacaccctggtatatctttcggtaaaaataaagttgaaggggaagagaatgaaaacattccatccaatgacccggcgtattgctcttaccagggtacagactttcaaattcctaatagattttcttttttctgttccgaatctgatgaaaccgttcatgctagtgatatcccttccttagtgtctgagggacaaacattctatgaattattcaggggaggtgagccaacatggtggttagattgtagttgtccaactgatgatgaaatgcgttgcatagcaaaggcgtttggtatccatccattgactgcagaagatatcagaatgcaagaaacacgtgaaaaggtggaacttttcaaatcgtattacttcgtttgtttccatacctttgaaaatgataaagaatcagaagatttcctggagcctattaacgtttatattgttgtctgtaggtcaggtgttttaacatttcattttggcccaatatctcattgtgctaatgtcagaaggcgtgtaagacagttacgtgactatgtcaatgtcaattcagattggttatgttatgctttaatcgatgacattacagatagtttcgctcctgtaattcagtctattgaatatgaagcagatgcaatcgaagattctgtgttcatggctcgtgacatggattttgcagccatgttacaaagaattggtgaaagtaggcgtaagacaatgacgttgatgagacttcttagtggtaaggctgatgttatcaaaatgtttgccaaaagatgccaagatgaagctaatggtattagaccggcactaacatctcaaataaatattgctaacttacaggcaagacaagataacgccagccatatcaaaaataatagttcgacaactgtaccaaataattatgcgcccaccacatcacaaccgaggggggatatcgccctatacttgggtgatattcaagatcatttgttgacaatgtttcaaaatttgctggcgtacgaaaaaattttttctaggtcccatacaaactacttagctcaactgcaagtggaatcatttaattctaataataaagtgacagaaatgttgggtaaagtcaccatgataggtacaatgctagttccattaaatgttatcactggtcttttcggtatgaatgttaaagttccgggggagaattccagtatcgcgtggtggtttgggatattgggtgtgctgcttttgctggccgtccttggttggttcttggccagctattggattaaaagaatagaccctcctgcaacacttaacgaggccgctgaaagtggagccaaatcggttatttcgagcttcttgccaaaaagaaacaagagattcaatgatcgttccaaaaatataaatgtaagagccggtccttcaaacaaatcagttgcaagtcttcctagtagatatagccgctacgactga

SEQ ID NO: 78463 - DNA, 555 bp, Saccharomyces pastorianus
atggaggcagatgatcatgttagcttatttcgcttccccttcaagattcccacctttcgtggtataagaaaaggtggggtctatctttcaggtgctctctatgctctaggcttttggatatttctagacgcagtgctctattctagatattccaatgcatcagatgttcatgttacgttcattgactggattccttttctttgcagcacactgggaacattgattgtgaattctattgaaaagaatagattattgcagggagctttatcgtcagatggtggtgccttcggtagtggtgtaggcgatttagattcaagcatggcatggcaagctcgaaccgttttattttttggctttgctttattggctggtgggctatcaggctccattgtcgtgttgatcatcaaatttttagtcaaggattacaatacctatccaactttggggatgggagtaaacaatgtgttggggaatgtatgcatattattgagttgcgttgttttatggatagcccaaaatgttgaagatgaatattcatattctttgacgctctaa

SEQ ID NO: 78464 - DNA, 1431 bp, Saccharomyces pastorianus
atgttacaagataataatgggcccgctgttaagagggcgaaaccctcagaaaggttgcaatgtgaatatttcatggaaaaaaagaaacgaagatgtgggatgaccaggagttctcagaacttgtattgttcagagcatctgaatttgatgaaaaaggcggctaattctcaagtgcataataagaatggcagtgaagcagagaaagaaagagaaagagtaccttgtccgctggatcctaaccatacggtttgggcagatcaattaaaaaagcatttgaaaaaatgcaacaagaccaaactaagccatttaaacgatgataagccatactatgaaccgggctataacggagagaatggactgttatcgtcgtctgttaaaatagatattactgcggaacatttggtacaatctattgaattgctgtataaggtgtttgagggagaatccatggacgagctgcctttgagacaactgaacaataagcttatgtctctaaaacgattccctcaattgccttcgaatactaaacatgctgtacaacagtcttcactgatcgaaaacttagtggacgctggcgcatttgagaggccagaaagtttaaacttcattgagtttggatgtggcagggccgaattctcgcgctatgtcagtctgtaccttttaacacaattgacaagccttccagcggagcactcgggttcaaactcgaacgagttcgtgttgattgacagagcaactaataggatgaagttcgataaaaagataaaagacgatttttcagaaataaagtcaaactcaccttccaaacctattagctgccccagcatcaaaaggataaagatcgacattagggacttgaagatggatccgattttaaaatcgacacctggggacgatatacaatacgtgtgcatctcaaaacacctttgtggtgtagctacagatctaactttgaggtgtataggcaacagctcaattttacatggcgacgataacaacggatgcaaccccaaactgaaggcaatttgtattgccatgtgctgcaggcatgtctgtgactacggcgactatgtcaatcgcagttacgttacatcacttgttgaaaagtatagggcccatggctccatcttgacatacgaaacctttttccgcgttttaactaaactttgttcatgggctacctgcggaaggaaaccaggtacggatattacagatatagtaaacgttgtcgaatcgtttgaaggggctgagccatatacaataaccattaaagagagagaaaatattggattaatggctaggcgtgtaatcgacgagggcaggttggcatatgtgaaagaaaagtttacagagtttaatgcggagctgataaggtacgtagaatctgatgtttctttagagaacgttgctatgttagtttataagaaatag

SEQ ID NO: 78465 - DNA, 1302 bp, Saccharomyces pastorianus
atgaagaaatatctgctgtatatggtacaagttcatttgaactttagaagagcagaactggaatcgttagcagacctatataatctttccatagacttttcgcagtacgatgccaatagccctttctttattgtagagctggaaaatgatcagcaagcaaaggattggattaagaggtctattttaaccagaggtatttatgagtattgggggcagggtacaacgctcgatgagctgcataaagatattcagcgtcagtctaactttgaacaggatctgcaattgaaattcaaacattccacttttaagttcgaattcgaatgctataaaggcaacagtaaagctaagagggtagagcagattgaaactttccgttaccttggctttgaaggaaagattgatatgaaacatcctcaagaggttttcactgttatagaagagtacacaccaatatcggaaaacgttggtggtaagacccccaccaggatttattttggtaggcaggttcagatgagcaataggagtgccatggagaaatatgatttgaagaaaagaccttataaaggtacaactagcttcgaagcagaattatcgttggtcagcgccaatatagctcaagtgaaaccgggaactataatgtacgacccgtttgcaggtacaggatcctttttggtagctggtgggcattttggttctttagtgattggttcggatatagatggcagaatgattcgtggtaagggtgctcaagtgaacatttcggccaacttcaaaaaatatggcgagagttctcaattcctcgacgtgttgaccatggactttacaaataacgcattaagaaacaatcttgtcattgatactattttgtgtgatcctccatatggtatcagagaaagcataaaagtcctaggtgctaaggatccagaaagatttctaggcaaggaagatatggaaattgacggtgaaaaggcatatttgcgtcgcgattatattccaaccaaaaaaccgtatgctctagattcattactggatgatcttttacaatactcttccgaaagattaccgattggcggaagattagccttctggatgcccactgcaaacgacgccaatattgaaactattgtcccaatgcacgaaaatctagagctaaaatacaactgcgttcaagaattcaataaatggtcaaggagactactggtttatattaataggggtagcactttcaatggaccaagtaatcatggcataaaacgttcaaaagataatttcagggagcggtacttcaataattttaactga

SEQ ID NO: 78466 - DNA, 309 bp, Saccharomyces pastorianus
atgtcttttagaaagaaaaaactcaaacctccagcgggtagtcaatttactataaacgacttcgtaatgagctatattgaccgcacgaaaacactaataaggatgattggatgcaagaaccagtacataaaagcacgtatgaaagataagaccttcttctatacgaagcaattccgtacagccaaaaacaaatttttctttcatctgtaccattgggaggccactcatattaacgttgaccactatatatgtacatgtcatcccattttttggggctctatatgtcagaaactcaggagatccgcctga

SEQ ID NO: 78467 - DNA, 1938 bp, Saccharomyces pastorianus
atgtctgatgaagataacaattatgacgacttcatgttatcggatgacgaaggcatggagtcaattgaaatggaggaagaaaccgaggatgaagacaaacaaaacattgaaataaatgaagacaatagtcaggatgatcaagatcgaggagcggcacgacataagcaacatgaacaaggcaccttcgagaaacatgacagagtagaagatatttgtgaaagaatctttgagcaaggccaagctctcaaagaagacgaacgatataaagaggctcgcgatttatttttaaagatatattacaaggaagaattttcatctgacgaaagtatagaaaggctcatgacatggaaatttaaatcgcttattgagatattacgtttaagagccctacaactctattttcagaaaaacggtgcacaggatttagttctacaaattttagaggacacggcaactatgtcggtttttttacaaagaatagactttcaaattgatggaaatatatttgaattactttctgatacttttgaggtattggcacccaagtgggaaagagtattcttgttcgacatcgagaaagttgatagggaaaatatgatctgcaaaattgagttccaaaaaaacttcatggatcagtttcaatggattttaagaaagcctggcaaggattgtaaactccaaaatctccagcgtataattagaaaaaagatatttattgccgttgtttggtatcaaaggttaaccatggggaatgtattcaccccggaaatttcttcccaaatagagattcttgtgaaagataatgaatgctcttcttttgaggaaaataatgatttggaaagtgtatctatgttactgcagtattacatattggagtatatgaacactgcacgaataaacaatagaaggttgtttaagaagtgcattgacttttttgaaatgttgatatctaagtcgcttactttctcacaagaatctggactgatggtaataatatatacctctaagattgtattcattttagactctgattcagagaatgatttatcctttgcgctgatgagatattatgatcgaaaagaagagctaaaaaatatgttcctctatatcttgaaacacttggaagagatgggaaaacttcgggagagggatattacctctttgtttcacaaattcattcttagcggcttcattttcacgagcatgattctagaagcaattcgcacagataagattaatccttttggtttcgaacaagtgaagattgcgctaggcagccctattgttaacgtattagaagatgtctacaggtgcttcgcacaactggaactaagacagctgaatgcaagtatatctcttattcctgaattgtccgtagtactaagtggaattattcaagatatttactatctggcgcagacattaaagttatggagaaaaattgcacgattatactcctgtatctccataagtgacattataagtatgctgcaaataagtgatgacaatgaaatgacaagagatgatttgctaacaattttaatgaggtcaataatgaaaaatagatcggttgtgtattttaagttagatttgacaagtgatttagtctatttcggagacgagaataaagtcatgctaccgagatgttctaaagaagaatttcgtcttatgatctctcccaaggatgaagaaaccactgaaaaggccaggctaatagattttgagtacgttaacgatgtcgcgatttataataacccaacaagaataagaaccaaatcctctaaagaatttttcaatacattaagaaaatctagggaaactgtaaaattaccgagggtaaacaaccagtcgaatgaagatacttttctaccatcgtacatgaagttttccaacaagtacctcgagctgtgcaaactggcctctaacaatctggaatag

SEQ ID NO: 78468 - DNA, 1149 bp, Saccharomyces pastorianus
atggcaagtaaccagcacataggagcttcaaacctgaatgagaatgaggctatattaaccaaccgcgttgctgagctggaaaggcgtatgtcgatgtttgagggcatatttcacgcgttaagtaaccgtctcgatcttcactttaaaaaatatgatgtagtggtaaactcccaacagcaacaaatcaacgaactaaccgcgtttttatcaacattgctgaatgaccaacaacgccacgctgaaattctcagtgaaaaattaagcggaacgttgcatggggtgtcagctacgtcaatatccttaaaccaaactcttgacccacaaggcttcactgatggaactacggcaccaggagctcctagaaattatacttcagtgcctatgagtaatgatcaaactgctcatccgcaaaatgaaggggctgttagtaatgaaacactttttgaggacattttgaatggaaactcacaagaaaatgataagagtcaacaacaaactaacagctcaaatcctataagccaagaaaataatagcaccaacccttcagtggacactcggttcaacaagccgcaaaattataattccaatttagtcccatccttggaagagtattcagcaaatccacctaacaatgatggtggccaaagtcaaggactgtacataagcagcaactcttctcaatcacggcagtctcctaatctccagaaagtttctcctaaccatgaaaatgcggttgaatcaaatgcacaagagagcgtgccgacatttgaggaggaacagtatgagactaaaacaggattgaaacggaaacgaatagtctgcacaagacccttcgaatttatcaagtcaccacactctgtgatggaggtttggaaggagtatacagaaggtgttaacgggcagccttccataaggaaaatggaagctctttatcaaacggcatggaggcgagatccagcagtaaataaaagatattcgagaagaaaggttctttggaaagccattcaaactggccttaatcgtgggtattcattaaactatgttgttgaaatattagaaaactcaagatatgttaatgataaacagaaggttaaacaacctattggttggttatgccacagttctcatattccagagactttgaagtga

SEQ ID NO: 78469 - DNA, 1755 bp, Saccharomyces pastorianus
atgggggcaaagagtgtaacagtctcttcttcaaagaagattaaaaaccggcataatgggaaagtgaaaaagagcaagaaaatcaagaaagtacggaaaccaaagaagtctatatccttgaacgacgaaaacgaagtagagattttacctagtcgtaatgagcaagagacaaataaattacctaaagatcacgtcacggcggatggaattcttgtattagaacataaatctgatgatgatgaaggattcgatgtctacgatggacatttcgataaccctactgatattccctcgactactgaagaaagtaaaacgccttcattagcagtgcacggggatgagaaggatcttgctaacaatgatgattttatctctctttctgctagttctgaggatgagcaagccgaacaggaagaggagagggagaaacaagaattagaaattaaaaaagaaaagcaaaaggaaatccttaatactgattatccatggattttaaatcatgatcactccaaacagaaagaaatctcggactggctaacctttgaaatcaaggattttgttgcctatatctcaccaagtcgtgaagaaattgaaattcgtaataaaaccataagtacaataagagaggctgttaaacagttatggccagatgctgatttgcacgtgtttgggtcatattctaccgatttgtatttgcctggttccgatattgattgcgtggtaacgagcaaacttggtggtaaggaaagtaggaataacttgtattcgttagcaagccatttaaaaaaaaaaaatttggcaacagaggttgaagttgtcgccaaagctcgcgttccaatcatcaagtttgttgagccacattcagggatccacatagatgtttcatttgagagaacaaatggtattgaagcagcaaagcttattagagagtggttggacgatacccccggcctgagagaattagtccttatcgtaaaacaattcctacacgcaagaagactaaataatgtgcataccggtggtctcggtgggtttagtattatatgtcttgtcttttcctttttgcatatgcacccacgtataataactaacgaaatagatccaaaggacaacttgggtgtgctcctgatagagttttttgaactttatgggaaaaattttggttatgatgatgttgcactgggatcatcggatggttatccagtatactttccaaaatcgacatggaatgctattcagcctattaaaaatccattttcattggccattcaagatccaggtgatggatcaaataacatcagtcgagggtcctttaacattcgagatattaaaaaggcatttgctggtgcttttgatctgttgaagaatagatgttttgaattacattcagcaacttttaaggatcgattggggaaaagtatattgggaaacgtgatcaaatatcgtggaaaggcaagagatttcaaggatgaaagaggtctagtactgaataaggctattattgaaaatgaaaattatcacaagaaacgtagcagaataattcatgatgaagattttgccgaagatacagttacctccacagccaccgctaccacaacagatgatgattatgaaataacgaacccacctgctaagaaggctaaaatagaagaaaaacctgaaagtgaaccggccaagagaaatagtggagagacatatatcactgtctctagcgaagatgatgatgaagatggatataatccttataccctttaa

SEQ ID NO: 78470 - DNA, 609 bp, Saccharomyces pastorianus
atgacaacattgatgggaaagtttaaacttactgggcgctcccctctgtttgtacttcaaccaatgttgcactgcaagaaacaacagttcgttgaagaggcagtcagattgattagtaataaaaagatcggaaagaaatctgacttcgtccaggcaagaaactgggtaggagcacttaacgtaacgggcttgcccttagatcaatttattttacgttacgatagagccagcgggccaggaggccaaaacgttaataaggtaaatagtaaatgtactttgacactttctggtttatcaaactgtgcttggattcctcaggaagtgagaaacatcttaagtagcggcaggtttcgatactacgctaagggcagcgattctatagtaattcaatctgatgaaaccagatcaagggaaaccaacaaattaaaatgcttcgagaagttggttcaagaaattcggcaaacgtgccaatttcctaatgacaccactgctgagacctcaaagaaatggaataaaataaaagagaaagccaacaaagagcgacttcttgacaaaaaagttcacagcgataaaaagaaaaacagaagtaaaattaaattcaattattaa

SEQ ID NO: 78471 - DNA, 1968 bp, Saccharomyces pastorianus
atgaagggcgtaaaaaaggaaggatggatatcttataaagttgatggattgttttcgttcttatggcaaaagagatacttagtactgaatgattcgtatttagcattttacaaaagtgataagtgcaatgaggaaccagtcttatctgtgcctttgactagtataacaaatgttagcagaatacaattgaaacaaaattgttttgagattcttcgggcaacagatcaaaaagagaacatatcccccataaactcctacttttatgaatcaaattccaaaagatcgatattcatttccacaaggaccgaacgggatttgcatggctggcttgatgccatttttgccaaatgtcctctccttagtggtgtttcatcaccaacaaattttacacacaaagtacacgttgggttcgacccaaaagtgggaaactttgttggagtacctgatagttgggctaaactactacaaacctcagaaattacctacgatgattggaacaggaactcaaaagctgttattaaagcactgcagttttatgaagattacaatggactggacacaatgcaattcaatgatcacctcaacacaagcttagacttgaaacctttaaaaagtccgacaaggtatattataaacaagaggactaattccatcaagagatcagtaagtaggacgctccggaaaggcaaaacagattccattttacccgtctatcaatcagaacttaaaccattcccaaggcctagtgatgatgattataagtttaccaacatagaggacaataaagtacgcggagaaggcagggtgcatgttagtaaagaaagcatggcagattcccagacaaagcagttaggaaagaaggaacagaaagtcattcaaagccatctgcgaaggcatgataataattcaacatttagacctcatcgactagcaccatctgcacctgctacaaaaaatcatgatagtaaaactaaatggcataaggaggatctccttgaacttaagaataatgatgattcgaatgaaataataatgaagatgaaaactgttgcaattgatgtaaacccaagaccgtatttccaactggtagaaaaggcaggtcaaggagcaagtggtgcagtatacctgtcaaagcgaataaaattacctcaagaaaatgacccgagattcttgaaatcacattgccaccgagtcgtaggcgaaagagtggccattaagcagatacgtttgtctgaacaaccaaagaaacaattgattatgaatgaactcctagtgatgaatgattcgcgccaagaaaatatcgttaatttccttgaagcctatattattgatgacgaagagttatgggtgataatggagtacatggaaggtggctgcttaacagatatattggatgctgtagtaaggagcaataccggtgagcactcattgccgttaaacgaaaaccaaatggcatatatagtaaaagagacgtgccaaggtttgaagtttttgcataacaagaaaattatccatcgagatatcaaatctgataatatccttctgaattcccaagggttagtgaaaattacagacttcggtttttgtgtggaattaacagaaaaaagaagcaagcgtgccacaatggtaggtactccatattggatggcacctgaaatagtgaatcaaaagggatatgatgaaaaagtcgacgtttggtctctagggataatgcttattgagatgatagaaggtgaaccgccttacctaaatgaggatcctttgaaggcgctgtatctgatagctaacaacggttcaccaaaattgcgtcatccagagtcagtgtgcaaggaaaccaaacaattcttagatgcctgtttgcaagtgaatgtcgaatcaagagcatccgtgagaaaactactaacgtttgaatttttgtcaatggcatgcagccctgaggagctcaaagtatccttaaagtggcattga

SEQ ID NO: 78472 - DNA, 342 bp, Saccharomyces pastorianus
atgtctgaaattcaaaacaaagctgaaactgccgcccaagatgtccaacaaaagttggaagaaaccaaagaatctttgcaaaacaagggccaagaagtaaaggaacaagctgaagcttctatcgacaacctaaaaaatgaagctcctccagaaggtgaacaggtgaagaaggaagaacaaaacattgctgatggtgtcgaacaaaagaagaccgaagctgccaacaaagttgaagaaactaagaagcaagcttccgccgccgtcagtgagaagaaggaaaccaagaaggaaggcggtttcttgaagaaattgaaccgtaaaattgcttccattttcaactaa

SEQ ID NO: 78473 - DNA, 456 bp, Saccharomyces pastorianus
atgacgaacgatattaaggagatacaaacaatacaaccgggattgtccgagattaaggagataaagggtgaactggctaatgtgaagaaaaggaaacgcaggtctaagaagattaataaattgaccgatggtcaaatacgtataaatcatgtttcatctgaaaaaaaaaggagagaattggaaagagctatatttgacgaactggtagcagtagtacctgacctgcaaccccaggaaagtcggtcagaactaatcatatacctgaaaagcttgagttacttaagttggttgtatgaaaggaatgaaaagctgagaaaacaaatcatagctaagcatgaggcaaaaaccggcagcagcagcagcagcgatcccgtacaagaacaaaatggaaacattcgggatttagtaccgaaggagttaatttgggagctgggtgatggacagagtggtcagtga

SEQ ID NO: 78474 - DNA, 1029 bp, Saccharomyces pastorianus
atgcaatatagttcgaggttcctagaattgaatatcccggattcatttttaaatatcaataagattcctgatgctactaaatttattacagtcacttatatatgcttaactgcaacccttttctgtataaggagatccttgtacaacaagctagttcttgaagaccctaacttggactacaacttgattacttcgccgcttttgcaaatggtaccttcgcagatttggaggtaccccacctcattagttctatccaacttcatcgacactaaagcttggaaggtggtagtgaacttattgaatttgatcattggtggatccttcattgaacgcaattggaactcttccaaagaaatgttcaaatttatcatagttttaggttctcttacaaacgttctgatcatcatgctgactttgttagtatcttttttctctaataaggtaaggctggatattcccttagacgggaattacacaattttaatcggtttccctatcatttatagacagttattgcctgaaacaactataatccatctgaagacacctcaatttttggccaaaaactttaggttcaaattactacccatttttgtaatgtttacaatgacggtaacccaaataatatggtttcatcattttgctcaattgttctccatttgggttaccttttttgccagttggtcgtacttgaggtttttccagaaacttgcacccttgaattgtccctctttgccaacaactaattctcaaggtggtcaggaaatattggtcggcgatgcatctgatacttttcaattgatttacttctttcctgatctaattaagccgattttgaggccgattttcaatttcatttataatgtagttgttgtaaaatttaaagtcattaaaccttttcatgatattgatatagatattgggaacaccatcgcagaaaatagaggcgccaaaaaaattatgactgtagaagaaagacgaagacagttagctttacaagttttggaagagcgtatggtaaacccttga

SEQ ID NO: 78475 - DNA, 1671 bp, Saccharomyces pastorianus
atggaaagagtatggtttgcaaaattaacaaataaaggaactattaaaatcgggtatatctcatttatacttctaagtttgctatgtcaatctctgattgggctggttaatgctgattttaattatgaaggctgttacagtgccgcggatatccagtctgctggactgtctctgaaaaactcatacatatatcaatcagtgtcatactgtcaaaaccagtgccctgagtcagcagtagtagcattatttaacgggtcagattgttactgcggtaattcggtaagttttctgacttctttgacgaaatcaacagattcaaactgtggaactaaatgctctggctggccttaccaaatgtgtggggggtcatcgtacatgaacgtgtatgtaaatgctgaaacttttgtttcatcggttgaatcttcctcttccaaagaagggtctagcacttcctatatgccctcaacaacttattcattgtcctccgcccaaatttcttcaactactaggagaacgtcaacagatatgaaaagttctgaaatgatagccacgacaatttctaccacttcaacaacctcttcctcgacttcctctactacctcttctaccacctcttctaccacctcttctaccacctcttctactacctcttccactacctcttctactacctcctctactacctcttccactacctcttccactacctcttccactacctcttctactacctcctctactacctcctctactacctcctctactacctctatcttttctgttacgtctagctcctcatccattacattgtcctcatctgagcataccacagtcgatagccgtacttcttcaccctcttccaccttggtgccagtgtcctcgagtagcagcacactatcaactccaaaagtgacctcaatgacccctagtacgtcatcaacgataccaatagttacctcagtggaactagtgactagtgtggttacaaaagcgattgtgagtacttctgatcaacatcaggaaacaatatttgttacgaggacatccgtggttgaacgatcttctgaggtagctactgctactgctgccgcctcaaataatagatctaattcgacttcgaagcagcgtctgagtggtggagccattgccggtattgttattggtgttgtgtttggcgtaatttttattattttgattctattgttcctgatatggaggagacggaaatcgcacgaccaattagacttggaggaaacgaaacattatcagccctattcgttcggtgatgatgatgcaaatccaataggaccgcctccctcctctggtacgacaaattggatgagacattcaaggggtaatacagcgggttctatcggtacaagtaatatgtatggtttttctatgagtaatggtgcaaattatagtagtcctagttcaaacaccagtggaagcatcataaacaacttggctggcttacaagatgctacggttcagaaacagaaccttccatcgacagtttttgaagaggcaaatactttgaatagtgcaaatgaaaggttcagtgccaattctttacccgacatgatgatgagcggaccattgcaagtggtaaaccctgataatcctgataatcctgaattatctagtaccgtatctcataatcgagcctga

SEQ ID NO: 78476 - DNA, 1839 bp, Saccharomyces pastorianus
atggctgaaatgaagaattcgacagctgctagttccagatggacgaagagtcgtctctcccatttctttccctcgtacactaatagcagtggtatgggggccgcctcaactgatcaatcttctacgcagggagaagaactgcaccataggaagcactgtgaagaagacaatgatggtcaaaaaccgaaaaagtctcccgtatccacctctacaatgcaaataaaatctagacaggatgaggacgaggatgacggtcgaattgtcattaaaccagttaacgatgaagatgatacatcagtgattataactttcaatcagtcaatatccccttttattattacattgacattcgttgcgtccatttctgggttcatgtttggttatgatactggttacatatcgagtgcgctaatttctatcaatagagatttagacaacaaagttttaacttatggagaaaaagaattaattacggccgccacatcattgggcgctttgattacaagtgtgggcgctggtactgctgctgatgtgtttggaagaagaccatgtttaatgttctccaatctgatgtttttgatcggagcaattttacaaattaccgcgcacaagttttggcaaatggcggccggtagactgattatgggtttcggtgtcggtattggttctttgatttctcctctttttattagtgaaattgctcctaagatgatcaggggtaggttaaccgttataaattccctatggctgacaggtggtcaattgattgcttacggttgtggtgcgggcctgaaccacgtcaaaaacggttggagaatcttagttggtttgtccttgatacctactgttttgcagttttcttttttctgttttttgccggatacaccaagatactacgtaatgaaaggcgatttaaagagagcaaaaatggttctcaaacgaagttacgtaaacactgaagatgaaataattgatcaaaaagttgaagaattatctagcttaaatcaatcgataccaggaaaaaatccaataacaaaattctggaatatggtcaaggaattgcacactgtaccttcaaatttcagagctttgattattggttgtggtctacaagccattcaacaattcacaggttggaattccttaatgtatttctccggtacaatatttgaaactgttggattcaaaaattcttctgccgtttctattattgtctcaggtactaattttgtgttcacattaatagcatttttctgtattgataaaatcggccgtaggtacattttactgattgggctacctggtatgactgtggcgctggttatatgtgctatagcgttccatttcctaggtattaagtttaacggtgctgatgcagtagtggcatctgatggattttcatcttggggcattgtcattatcgtatttattattgtgtatgcagccttttatgccctcggtatcggcactgttccatggcaacaatcggaattatttccacaaaacgtcagaggtgtagggacatcctacgctactgccaccaattgggcaggttctttagtcattgcgtctacgtttctgactatgttacaaaatattacaccaacaggtacattttcattctttgccggtgtagcatgtttatcaacaattttttgttacttttgttatccagaactatcaggattggagttagaggaagttcaaacaattttaaaggacggattcaatatcaaagcctctaaagctctagctaaaaagaggaaacaacaggtggccgaaggtgctgcccatcataaactcaaattcgaacctacacaggaaattgtagaaagttag

SEQ ID NO: 78477 - DNA, 3246 bp, Saccharomyces pastorianus
atgtattttgataaggataattccatgagccctagaccgttattgccaagtgatgagcagaagctaaacattaatcttctaacgaaaaaggagaaattctcgcatttagatccccattatgacgcaaaagccactccacaaagaagcacttcgaatagaaacgttggcgatttacttttggaaaaaagaaccgctaagcctataattcaaaaggccttgacgaatacggataatttcattgaaatgtaccataatcagcagagaaaaaatcttgatgatgacactattaaagaagtaatgattaatgatgaaaacgggaaaactgtcgctagtaccaacgacggcagatatgacaacgattacgataataacgatattaatgaccaaaaaactttggataatatagcgggaagtccccacatggaaaaaaatcgaaacaaagtaaagattgaacatgactcttcatctcaaaaaccaatagctaaagagtcatccaaagcccaaaaaaatataatcaaaaagggaatcaaggactttaaatttggtagtgtaataggtgatggcgcgtattctactgtaatgttagcgacgtcgattgataccaaaaagaggtacgccgcaaaagtactaaacaaagaatatttaatacgccagaagaaagtcaaatacatcagcatagaaaaaaccgcccttcaaaagctcaataattctcctagtgttgtgcgattattttccacttttcaggatgaatcaagcctatactttctcttagagtatgcccccaatggggactttctttctttaatgaaaaagtacggttcattagacgaaacctgcgcacgctattatgctgcgcaaataatagatgcaatagactacttacattccaacggtattatccatagagatataaaaccagaaaatattcttttagatggagaaatgaagatcaaactgactgattttggtactgcgaagttactgaatcctacaaataatagcgtttcgaaaccagaatacgatttatcaacaaggtcgaaatcttttgttggcactgcagaatacgtatctccagaacttttaaatgacagttttacagattatcgttgcgatatttgggccttcggatgtatacttttccagatgattgccggaaaaccaccattcaaagctaccaatgaatacttgactttccaaaaggtaatgaaagttcagtacgcctttacaccaggtttcccacttattatcagagatttggttaagaaaatcttagtaaaaaacttagaccgaagattgacgataagccaaattaaggaacatcattttttcaaagatttgaattttaaagacggctctgtttggtcaaaaacgcctccagagatcaaaccatataaaatcaacgccaaatccatgcaggcaatgccaagcggaagcgatagaaaactggtgaagaaatcagtcaacacacttggcaaatcgcatctagtgactcaaaggtcagcttcaagtccctctgttgaggaaactactcattcaaccctatacaataacaatactcacgcttctactgaaagtgaaatatcaataaagaagagacccactgatgaaagaacagcgcagatacttgaaaatgcaagaaagggtataaacaataggaaaaatcaaccaggcaagagaacaccaagtggtgcagcttctgctgccctagcagcttctgctgctttaaccaagaaaaccatgcaaagctatccaacttctagttcgaaaagtagcaggtcaagctctcctgcgacaacatcaagaccaggaacttataagcgtacttcttctacagaaagtaaaccatttgccaaatctccacctttgtcagcatcagttttatcgtcaaaagtcccaatgcctccatacacacctccaatgtcgccccctatgacaccatatgatacatatcaaatgactcctccctatacgacaaaacagcaggattattctgataccgcaattgccgcaccgaagccttgtattagtaagcaaaatgttaaaaatagcacagattctcccttgatgaacaagcaagatattcaatggtctttttacctgaaaaacatcaacgaacatgtactaaggacggaaaaactggattttgttaccacaaattacgatatcttagagaagaaaatgcttaaactaaatggttcattgttagatcctcaactgtttggtaagcctagacagacttttttatcccaagtagctaggagtgggggagaggttacaggttttcgaaatgatccaactatgactgcttattccaaaacagaagatacgtactattcgaaaaatattatcgatttgcagctcttggaagatgattatcgaattgaaggaggtgacttatcggagttgcttactaacagaagcggaaaagggtacaaatgcaatcaaaacagcacaccagtgaaagacgatgataaatccgaatctaacaataaaggaagctctgttttttccggcaagattaaaaaattatttcaccctacctcagcagctgaaacgctctcttcctctgatgaaaaaaccaagtactataaacgaaccattgtaatgacatcatttggaagatttctagtatttgccaagaggaggcagccaaatccagttacaaatttaaagtatgaactagaatatgacataaatttgcgtcaacagggtaccaaaataaaagaactaatcattcccttagaaatgggaacaaatcatataattgtgattcagacaccttacaagtcatttcttttgagcactgataaaaaaaccacgagcaaattgtttactgttctcaaaaaaatactcaattcgaatacaaataaaatagagaaagaactgttgcaaagaaaccaaaaggtaattgaaaggagaacatcatcatccggaagagccatttctaaagatcttccaacttccaagtctccttcgccaaaacctaggacgcatagccaatctccatcaatttcaaagcacaattcgttttctgaatcgattaatagcgctaagagcaacagatcaagcagaatttttgaaacctttatcaatgccaaggaacaaaattcaaaaaaacacgctgctccagtaccgttaaccagtaaattagttaacggattgccaaaaagacaagttaccgtaggattaggtctaaacacaggaacaaatttcaaaaactcatctgcaaaatcgaagaggtcgtaa

SEQ ID NO: 78478 - DNA, 492 bp, Saccharomyces pastorianus
atgaaaatattagataaaattactaattacgacctcttcgattttgcagatgagtttttgaaatttgttcctgtgtttagacctaatcctacggtaacttgtctttttggcaatccgttaactaatttactggttaacggtactggagcagcgtgtttttttgaattttgttccttggcattgataaaggtttcaaaaattctgcttgatctgttgctcttagcgctattaatcgattcagaaaacgaattgtgctttgaaattgatggagattggctatgcgtcctaggttttggcgaaggagacttggaagttggaagatctttagaaatggctcttccggatgatgatgttctcctttcaattaccttttggtttctttgcaacagttctttctctattttatttgtattcgaattgagtatttttttgagaacagtaaacaatttgctcgtggtttttttatcagtgctcaaaagaaatgacttgtaa

SEQ ID NO: 78479 - DNA, 3114 bp, Saccharomyces pastorianus
atggggttcaagaagctcgtatcattccaaccggattatgtcccacaataccatataactaaatatatttcggaacgaactaaactgcaactggtacatataaaccacaaaacctccccattggttcacggttactttgctgttcctacagaatgtcttaatgattcaggtgctccgcataccttggagcatttgatcttcatgggttctaaatcttacccatacaaaggtttattagacacagctggtaatctgtctttgtctaacaccaatgcttggactgataccgaccaaactgtttatacattaagcagtgctggctggaagggattctcaaagttgctacctgcttatctagatcacatcctacatccaactttaacagacgaggcttgtttaactgaggtttatcacatcgacccggaaaatttgggtgataaaggtgtggtatttagtgaaatggaagccattgaaactcagggctggtacatttcagggttagaaaagcagcgattaatgtttcctgaaggaagtggctatcggtcagaaactggtgggctaaccaaaaatttaagaaccttaaccaacgacgaaatcagacaatttcacaaatctctgtattcttctgataatctttgtgtcattgtttgtggtaacgtaccaacagatgaactgttaaccgtcatggaagaatgggataacaaattgccggagattccatcgaatataccaaagaaaagaccatttttggacaacaagctttcgcacataccgcaatctagagataaagttacggaatctactgtagaatttcctgaacttgatgaaagtcagggtgaattactcttttcttggattggtgttccctactcagattttcgtaatgacctagcggttgatgtgctattagattactttactgactctgcattggcagtgtttacaagagaactggttgaaattgacgatcccatggcaaattccactgattgttgcactgattatttcatgagaaccataattgatcttcgtatccaaggtgtcccaacagaaaaaatagcagcaacaaagaccaaggtactggagattttgaaaacccataccattgatttatcaagagttagacaggtagttgaaaatactaaatgggaatatttgctgaactatgaaaaaaatggcgagagtcgtttttctagtgctgtgattaccgactatatttatggtaatgaagatggttcttcattagtgtcttctctcaaggatttaagtgattttgatgctttattacaatggtcccaaaaggactggcaatctttgctgaacagaatattcgtagacaacaaacctatcatagttaccgctaaaccaagcgctttgatgtatgaacaactagagaaagaaaaatcggatttgatcaaacaaagagaagctgaatttgatgatgaaaagaaactggttttattgaaaagattgaacaatgcaaaaaatattaatgataggccaattccgaaatctctactacagaaatttgagattgataatccttcaaagagtgttgaatttgtcaacacgaaaaacattgcaactgtcgattcgtataaatacaataatgttagtgatccgctgaccaaaaaaattttagaaacgaggccagacaattttcctcttttcattcacttaaatcatttcccgtctcaatttatagagctgcattttttggtcaactccgcatctattaaggatacctcgcttttaccatattttaatatgtttgatgagctattttccatgccaatgaaaattcttgatgaggagagtaatgtagaaactatgctctcgtttgaggaagttgtcgccaagttaaaatcagaaactattgacgcacagatcaaccaaggtttgaagggttcttgtcctgaccttattaattttaaaattcaatgtagagctgggggttactctaactctgttcaatggatcaagcactgcctatttgacatggtttttgatgaaaatcgtgttcgtattctgctggagaattatttgaattctattgtagaatggaaaagaaatggtaatgttatgttaagttctttaactaacagaaatctctattcggcaagatcgctgaaaaaatccaccgatccattatttgttgaagcaaaattacaagagatttttgcagaaattgagaatggcaactttgagaaagaaattttgccaagaatagaaacaatgagaaagcaactgagagcaaatttcaacaagtttcatattttggttcttggtgacatctcaaagatcgatgacgtttatgaaccatggaatcccttaattaagtgcttgaacattgcacatccagttgataagttaaaaattccaccagttccaagagccctagataccatttcatcgatttgcagaacacctggtgaaaaggcctttataataactactcccgcctcagaatctgcttatatgaatctaataacgtctatcccatttaacttggactaccatgatcctgaatacgctattgtctcattggcttccgaatatctagaatgtgttgaaggtccattttggaagggaatccgtggtgccggattggcctatggtgccagcatgttaaaattatgtgagataaattcttggggattcaatatttaccgcggcgctgatattattaaatgttatgaagttggaaaacagattgttcaagattatgcatcaggtgccttggaatttgatgagcagttaatccaaggtgccatcagtagtattattaacaggctggctactatcgaatgcggatactttgaaacagccctgtccaaatatgttgatgaattctgtttgcaaagggggaacaacttcaatgaactgtatttggaaaggttgcagaatgttaccaaaacagatctgaaaaatgccatgcagaaatattttgtcaacatgtttgattccaataaaagcgttgcctttgtgagctgtcatccagctaaattggaatcagttcaagaattctttgaaactcaaggtttcactgtcgaaatagaagagctagaagatgacgatgacgaaattgatagtgaagaagacgaaaatgcgtga

SEQ ID NO: 78480 - DNA, 1299 bp, Saccharomyces pastorianus
atgagcaacgacgaaactgtagagaaagtcacccaacaagtgtcggaactaaaaagcacagatgttaaagagcaagtagttacaccttgggatgtggaaggtggggttgatgaacaaggtagagcccaaaatattgattacgataaattgatcaaacaattcggtactaagccggtcaacgaagaaaccctgaagagattcaagcaagtgacgggtcgtgaaccacatcattttttgcgtaagggattgtttttcagtgagcgtgacttcactaaaatattagacctttacgaacaaggcaaaccatttttcctatacactggtagaggtccttcgagcgattctatgcacttgggtcatatgatcccttttgtcttcaccaaatggttacaggaagtgtttgacgtaccattagtcatagagttgacagatgacgaaaaatttttattcaaacacaagttgaccatcaatgacgttaagaattttgcccgtgaaaatgccaaggatatcattgctgttggatttgatccaaagaacacctttatcttttctgatttgcaatacatgggtggtgcattttacgaaactgtagtaagagtttccagacaaattacaggatccactgcaaaggctgttttcgggtttaatgactccgactgtattggtaagttccattttgcctccattcaaattgctaccgcattcccaagttcatttcctaatgtgttaggcttgcctgataagacaccatgtttgattccatgtgctattgacctagatccatatttcagagtttgtagggatgtcgcggataaattgaagtactccaaacctgctttgcttcattccagattctttccagctttgcaaggttccacgaccaaaatgtcagcctctgatgataccactgccattttcatgaccgatacaccaaagcaaattcaaaagaaaattaacaagtacgcattcagcggtggtcaagtgtccgccgacctacatagagaattaggtggtaatcccgatgtcgatgttgcataccaatacttgtcatttttcaaggatgacgatgttttcttgaaggaatgctatgacaaatataagtccggtgaattactatcaggtgaaatgaagaaactgtgtatcgagactctgcaagaattcgttaaggcgttccaggaacgcagagctcaggtggacgaagagaccttggacaaattcatggtcccacataagttggtttggggcgaaaaggaaagacttgtcgcacctaagccaaaaactaagcaagaaaagaagtaa

SEQ ID NO: 78481 - DNA, 951 bp, Saccharomyces pastorianus
atgggattcataatgttgttaagatctagatttttgaaggttgtccatgtgaggaagcaattgagcgcctgttcaagatttgcaattcaaacacaaacgagatgtaagagcacagatgcttctgaagatgaagtgaagcatttccaggagctagcccctacttggtgggatacagacggatcacaaagaattctacacaaaatgaatctagctaggttggattttgtgcagaggactgtgaggaaccaggttaaaattcagaatcctgaaatatttgtccctggatttaattacaaggagtttttaccagagtacgtttgcgacaatattcagcgggaaatgcaggaaagcatagagactaatctagataagaggccagaagtgagcgtcttggatgttggatgcggtggtggcattttgagtgaatcgctcgcgagactaaaatgggtgaagaatgttcaagggatcgatctgactcgcgattgtatcatggtagcaaaagagcatgccaagaaagaccccatgctggagggaaagataaattatgagtgcaaggctctggaggatgttactggacaatttgatattatcacctgtatggaaatgctagagcacgtggatatgcctagtgaaattttaaggcattgttggtcgaggttaaatcccggaaaaggtatactctttttaagtactataaacagagatctcatctcatggtttactacaatttttatgggtgaaaacgtcttgaagattgtcccaaagggtactcatcatttgagcaaatacataaactcaaaggaaatccttgcctggttcaatgacaactacagtggccaatttcgcttgttggatctcaaggggaccatgtacctcccatatcaagggtgggttgagcacgattgttccgatgtcggtaattattttatggctattcagagactgaattga

SEQ ID NO: 78482 - DNA, 2121 bp, Saccharomyces pastorianus
atggacaagctaactccatctcaatggaaggtaatacataagtcatatgaaccagcgtctacgataaaagtcattgcgggcccaggctcaggaaaaacgctaacgctactatataaagtactacatttaattactgtggaaaatattaagcctgaagaaatacttatattttcgttaacaaacaaagcagttgatagtattatagaaaatttactgtccatcttcgaaaactcgcatacaaataaggaaattgtccatcagattgggtgttacacagttcatgggttggctaatagaatcgttgtagagaatgaggggatgataaacattatagaagagattggatggagaggattaatgaagttgttaccgccgtcaaagagaaccccccatcatttcagatcatataaggaactcgagaaagttgttaaggattacaagctaaacaacgcaaaaaataataaccccgtcattgagaaactagttgaactgatggataactgtaaagtgatgaccaatgatgatttgatcattcgcgcaaaaaaatacttagagcttgattcttctgattcagatgcatcgtctttcactcaagatctccacaataaatacaaggttgttcttatcgatgaatttcaggacctctatccaagtttagcacccttaattaccatgatttgcaaaggcaagcagctcattatgtttggtgatacaaatcaaagcatatatggatttttggggagtaacaacgagattatgtcacaattagacaatcttcacccaaaaaatttcacgactgtcctgaaattatttgataattttaggtctacccccgaaataatctctctagcatcaaaaattatcaatcgtccactagcagagaaacagattatcgatgatactgatgaaacaccatcagagctagttcgcaagctaccgagtggtgtttcacctcaaataatgacatttgatgatctagccgcagaatctgaatttattattgataaaattacccaattgatttgttcttctgcaaagttttccgatatagcaattctatcaagaacaaattcacatctaacggctatagccagtattttgaagaaatatggtattccttatcaaaagctaaagagtcaacctgattggatggacgatttacgaattcaattccttttagatattctaaaagtgtgttctttagcctccgacgaaaagcataatcgtgagttcaatacgggtgataaatggcaaagtaacttcagcattttggtcacaatgagcgctctcaaagggattggcgatgcttcaatacaagccttgtataaagcatgcggcctgaaaaatctgtcaatttggaaatacctaactatggttcccaattttgaatggccattgggcctctccataaagaaaaaaatggaaaattacacttcaaacttatatgaaatgatcgaaaatgatcaagttcatcaattagatgatccgatggaacttttagaaaaagttgctagcatcacaaataacttaaacctaaatcctacctacttccaatccttaagtgatgctcaatcatctttagagtttaaaacacatctacaagagatggcacaagtaatgaaggtctcaaaatctaataagcccccgggtatttcatttgttaaatggtttctagagacatattttgatcaaacgatggtctttcaccagtctcagcaggcattacaaactaccggtccggggacagtaaaactatctaccatccattctgcaaagggtttagaatttcccatagtatttctaacaaacgggagcatgtccaatttcccaatggatacaaacgccctttatgtggggataactagggcaagaaacttgttgtacatgtgcaacatgaagcacgagagactggtcagtaaatcatcaccatactcaagaagcataatgtctaataatttattctggacttactacaataaggatttgaaccgatctgtatgtgacgttaaggtgacacatggttataatgtgcagcgatacaatcagttacgtaaaaattttggattttatagagcatattcttcactaagatgttgtaagagcgttttcagacgtatatag

SEQ ID NO: 78483 - DNA, 972 bp, Saccharomyces pastorianus
atgtccaaaactttatctttgcaacttccatgggttgagaaataccgtccccaagttttatctgatatagtcggtaataaagagaccattgatagacttcagcaaatcgctaaagatggtaacatgccccatatgatcatatcaggtatgccaggtataggtaagaccacttcgatacattgccttgctcacgagctccttggccgctcttatgctgacggtgttttagagttgaacgcttcagatgacagaggtattgatgtcgtcagaaaccaaataaaacattttgcccagaagaaactacatttgcctccagggaaacataaaatcgttattcttgatgaggcggattccatgactgctggtgctcagcaagcgttgagaaggaccatggagctatattcgaactctacaaggtttgcatttgcttgtaatcaatcaaacaagatcattgagccgctgcaaagtagatgtgcgattttgaggtattctaaactatccgatgaagacgttctaaaacgtcttttacaaatcataaagctagaggatgttaaatatacaaatgatgggttagaagcaatcatttttacagcggagggtgacatgagacaggccataaacaatctacaaagtacagtagcaggacacggtttagtgaacacagacaatgtcttcaaaattgttgattctcctcaccctctaatagtgaagaaaatgttactagcctccaacctagaagattcaattcaaatcttaagaacagatctttggaaaaagggttattcctcgattgatatcgtcacaacatctttccgcgttaccaagaacttagcacaagtgaaagaatcagtaagattggaaatgatgaaagaaatcggtttgacccatatgagaattctggagggtgttggaacgtacttgcaattggctagtatgttagcgaaaattcataaactaaataataaagcctga

SEQ ID NO: 78484 - DNA, 882 bp, Saccharomyces pastorianus
atgtccaatgatgagataaagcagaacgaggaaaaggtgaaaagaacaccacctttaccgcctgtgccagaaggcatgtctaaaaagcaatggaaaaaaatgtgtaaaagacagagatgggaggagaataaagccaaatacaatgcggaacgccgtgtaaagaagaagagacttcgccatgaaagaagtgcgaagattcaagaatacgttgacaggggagaagaggtcccgcaggaattgattagagagcctcgtattaatgtgaatcagactgattctgggatagagatcatacttgactgttcttttgatgagttaatgaacgacaaggaaatagtaagcttgtctaaccaggtcaccagggcatactccgcgaatagaagggcgaaccattttgcagaaataaaggtggcctcattcgacaaaagactaaagcaaaggtttgaaactactctgaaaaataccaattatgaaaactggaaccattttaaattcctaccagacgacaaaatcatgtttggagatgagcatataagtaaggacaaaatagtgtatttaacggccgatacagaggaaaagctggagaggctagaacccgggatgcgatacattgttggcggcattgtagacaagaatcgttataaagaattgtgtctgaagaaggcccaaaagatgggcattcctacgcgaagattgcccattgacgagtacatcaatctcgaaggcagaagagtgttgacgacaacgcacgtcgtgcaactcatgctgaaatactttgatgatcataactggaaaaatgcctttgaaagcgttttaccacccagaaagctggatgcggaagcaaaatccgcaagctcttcgccagctccaaaggacacataa

SEQ ID NO: 78485 - DNA, 2895 bp, Saccharomyces pastorianus
atgtcctccactaggccagagctaaaattctctgatgtatcagaggagagaaacttctataagaagtatacagggttgccgaagaaaccattaaaaaccattagattagtggataaaggcgactattacacagttataggttcagatgcgatatttgttgcagattcagtctatcatactcaatctgttttaaagaactgtcaattggaccctgtaacggcaaagaacttccatgaaccaactaaatatgttactgtttcgctacaagttcttgccactctgctgaagttatgtttgttggatctgggatataaagtcgagatatacgataagggttggaaattaataaaaagcgcatctccagggaacattgagcaagttaatgagctaatgaatatgaatattgattcgagtatcatcattgcaagtttgaaagttcaatggaattcccaagatggaaactgcattattggagttgctttcattgataccactgcatacaaggtgggaatgcttgatattgtcgataatgaagtgtattccaacctagagagtttcttgattcaattgggtgtaaaggaatgtttggtgcaggacttgacatcaaattcaaactccaatgctgaaatgcagaaagtaataaatgtaattgatcgctgtgggtgcgtcgttacattattgaaaaactcagaattttctgaaaaagatgtcgaactggatttaaccaagttactgggcgatgatttggcattatcgttaccacaaaaatactctaaactatctatgggtgcatgcaatgcattgattggatatttacaattgctctcagagcaagatcaagtaggcaagtatgaattagttgaacataaattaaaggagtttatgaagttggatgcctccgctattaaagcccttaatttattcccacaaggaccacaaaatccatttggtagcaacaatttagctgtatctggatttacgagtgctggtaattctggtaaagtaacttctcttttccagttactgaatcattgcaaaacaaatgctggtgttcggcttttaaatgaatggttgaagcaaccactgaccaatattgacgaaattaataaaagacatgatttagtcgactatctaattgaccaaatcgagttaagacagatgttgacttctgaatatttacccatgattccagatattcgtagattgactaagaaattaaataaaagaggaaacttagaggatgtcttgaaaatttaccaattcagtaaaagaataccagaaattgttcaagttttcacttcgttcttggaggatgacagccccactgaaccagtaaaggaactggtccgttctgtttggctagctcctttaagccaccacgttgaacctttgtccaaattcgaagaaatggttgaaacaacggttgatttggatgcttatgaagaaaataacgaatttatgattaaagttgagtttaatgaggaattaggaaagataagaagtaaactggatgcgttgtgtgatgaaattcactcaatccatctagattctgctgaagatctaggattcgatccggacaaaaaattgaagttggagaaccatcatctgcatggttggtgtatgaggttgacacgtaatgacgccaaggagttacgtaaacataaaaagtacattgagttgtcgacagtaaaagctggtatattttttagtaccaaacaattaaagtcaatcgccaatgaaaccaatattcttcaaaaggagtacgacaagcaacaatcggctctggttagagaaattataaatattacattaacgtacacaccagtttttgagaaactatccttagtcttagcgcatttagatgtcattgcctcttttgctcatacttcctcgtatgctcctataccatacattagacccaagttgcatcccatggattcggaaagaagaactcacctaataagctcccgtcatccagtactggaaatgcaagacgatataagctttatatccaatgatgtcacattagagagtggaaagggcgactttttaatcataactggaccaaacatgggaggtaaatctacttacatcagacaggttggtgtgatttctttaatggcccaaattggttgtttcgtaccttgtgaagaagctgaaatagccatagtagatgcaattctttgcagggtcggggcaggagattcccaattgaaaggtgtttccacatttatggttgaaatattggaaactgcttctatactaaagaatgcgagtaagaattctttgattattgtagatgaactagggcgtggtactagtacttatgatggttttggtctagcttgggcaattgctgaacatatcgcaagtaagattggatgtttcgctttgtttgcaactcactttcatgaattgacagaattgtctgaaaaattgcccaatgtcaagaatatgcatgttgttgcacatatcgagaaaaatttaaaagaacaaaaacatgacgatgaggacatcacgttgttatacaaagttgagcctggtatttcagatcagtcttttggtattcatgttgcagaagttgttcaatttccagaaaaaattgttaaaatggctaaacgtaaagccaatgaattggacgatctaaaaactaataatgaagatttgaaaaaagctaagctatcattacaggaagttaacgaaggtaatattcgtttgaaggctttactaaaagagtggattagaaaagtgaaggaggagggtttacatgacccaagcaaaattactgaagaagcttcccagcataaaatacaagagctattgcgtgctatagcaaatgaaccagaaaaggaaaacgataattacctgaaatatataaaagccttgttgttataa

SEQ ID NO: 78486 - DNA, 3093 bp, Saccharomyces pastorianus
atggaaaatcaaggtggagattacagcccaaatgggttttcaaactcagcaagcaatatgaatgcggtttttaacaatgaaatcaccggtagaagtgacatttcaaatgtaaaccatcaaactggtactccacgtctggttcctgaaactcaaatatggtcgatgcctgtgccggatcaactgatgacgatgcctaacagagaaaacacccatatgacaggtagtacagtaggtccaaatatccccataaatgtggcttatcccaatacaatatactcgccaacagagcatcagtcgcaatttcagacaccacagaaccgtgacatcagcacgatgatggaacacactaacagtaatgatatgagcggctctggcaaaaatctcaagaaacgtgtatcaaaggcctgtgaccattgccgaaaaagaaaaatcagatgtgatgaagtggaccagcagaccaaaaaatgttcaaactgtattaagtttcagttgccttgcactttcaaacatcgtgatgagattcttaagaagaaaagaaaattagaaatcaaacatcatgcaacaccaggggaatcacttcaaacctcaaatagtattaacaatcctgtagcgtcttcttcagtaccgaacagtggaaggtttgaacttttaaacggtaattcccccttagaaagcaatatcatcgataaagtctccaatattcaaaataatcttaacaaaaaaatgaattcaaagattgaaaaattggatagaaaaatgtcttacattattgacagtgtggctagacttgagtggttattggacaaggctgttaaaaagcaggaaggcaaatacaaggaaaagaacaatttgcccaaaccagcgagaaaaatatactctacggcacttttaactgctcaaaaactctattggttcaaacaaagtttaggagtgaaagcgtccaatgaggagtttctttctccaatcagcgaaatattaagcatatctttaaaatggtatgcaactcaaatgaaaaaatttatggatttgtcatctccggctttcttctccagcgaaataatattatactcattacctccgaaacagcaagcaaagagacttcttgagaattttcatgctaccttattatcctctgtaactggtataatatcgttaaaagaatgtctagacttagcagaaaagtactacagcgaaagcggcgaaaaactcacatatcctgaacatttattattaaacgtgtgtctctgctcgggtgcatctgccactcaatcaattataagaggtgattcaaagtttctaaggaaagatagatatgatccaacctcccaagagttaaaaaaaattgaaaatgttgccttactaaatgccatgtattattatcataagctgtccaccatctgttcaggtacaagaacactacaagctttattactactgaaccgatattttcaacttacctacgatactgaactagcaaattgtattttaggaactgcgattagattggcggttgacatggaattaaatagaaaatcctcttacaagtcactagactttgaagaagccataaggagaagaagtatgtggtggcattgtttttgtacagataaactatattctttaatgttatccagaccccctattgtgggggaacgcgatatggatatgctaacagatcaaaattattatgaagtgataaaaactaatattctacctgatcttattgataaaaaggaagatctcgataaaattactgatgtcaactctgcattgaatgtagtagtaaatttttgtcagcacatatcccttttcatatcatattatgtttcaaaattggttagtattgagagtaaaatatactctacttgttttgctgtcagaagtactctagatctttcattcgatgccatgcttgataaaatcaaagatctcaatgattctttgaacaattggagagacaacttgcacgtaagtatgaaactaaaaagttataaacagtatttatcggtactttacgctcaaaaatcccaagaaaatccggctttaagttttgagattgcatgctctcgtgttttgaattgtcattttagggcgctatattctaaagtgattttgagcatggtgactacatccttattgattgataacgaacgcctatacaaaggttctcgccatgatattcctcaactattcattcttttttcaagtcaatacttaaacgccagtaaagaaatgttacagctgtttcaaggcatcaattaccaggcgcatatgtataacgaggttatgtatcagttctctactgctgtgtttgttctcttcttttacgttgtggataatattaacgatctaaaaaagaaaggtgaggtaaaagagatcatcgatatcctaaaaaaatcttatgatcgattagtgggagaaaatgatgagcagttactgtttgacaatgtcaaatggaacactttgattgtgttttacagccactttttgaaatacgttttgcaacgttatcatgctttgaacgattccacgtcaatatttgattctaaaccttatgatgaaacgataacgaaagttattatgcattcaagaaagataaaagatgaaacagtcgatcaactaattatgagtctaaaatcatatggttctctccattctttacaaaagggcaacgaagccgatctcgccgatgatggactgaatacgaatgatatttcttcagaagactttgcggtggaagcaccaataaacttatttggagagttatcagtcgaaattttaaaactattaaaatctcactcccccatctcaaattttggagacctatcgccatcttcgaataggaaaggaatatctgatgactcatctttgtacccaattcgttcggacctaacatctcttgtttatcccatccatagttctgataccggagatactctttccagtgatctagagacccctgaaaattctaattttaatagtgacagtgcaataaaggaagatttcgaagcttttagagccttattgcctttaggaaaattgatctatgacagagattattctttcgtgaacacttttagggattatgaataa

SEQ ID NO: 78487 - DNA, 834 bp, Saccharomyces pastorianus
atgaaattgcacggctttttattttccgtattatcaacatgcgtcgtcattttaccagcgttggcctacagtgaagctgtcacgatggtcaagtcgattgagcagtacttcgatatctgcaataggaatgattcttacacaatgataaaatactacacttcttggtgccaacattgtaaaactctggccccagtatacgaagagcttggtgagctatacgccaaaaaagctaataaagatgataccccaattaacttccttgaagttaactgtgaattcttcgggccaactttatgtaccgacttgcctggatttccaataattgaactggtcaaacctcgtactaagcccttagttcttccgaagctcgattggtcgtctatgaaatttcatgaaagactatggcaaagaatcaagacgtggttcaacaatcctaagtaccaactggatacgtctagggttgttcgttttgaagggagtaggaacctaaagagtttaagcaactttatcgatactgtaagaagtaaagatacagaagaaagattcatagaacatattttcgatgattctaggaattgcagtgaagaattacgttctcaacagcttctgtgtaaagctggtaaagaatactactctgatactttatctaaattatacggtgacgtgaatgggctggaaaaggaaaggcgaagactagaagctttaattaagcaaaatggagatgacttgagtaaagaagttaaagaaaaactgaaaatcattcgtctacaattgagcctattatcacacatagaagaccagttagaagataccagtagtcatgacgagctttga

SEQ ID NO: 78488 - DNA, 273 bp, Saccharomyces pastorianus
atgaatgacgatgaagatagagcccaactgaaggctaggctgtggatccgtgtggaagaacgattacaacaggtgttgtcctctgaggacataaaatacacaccgagattcatcaactcattgctggagttagcatatctacaattgggtgaaatggggagcgatttgcaggcatttgctcggcatgccggtagagatgtggtcaataagagcgacctcatgctatacctgagaaagcaacctgacctacaggaaagagttactcaagaataa

SEQ ID NO: 78489 - DNA, 1047 bp, Saccharomyces pastorianus
atgtctatcccagaaactcaaaaaggtgttatcttctacgaatcccacggtaagttggaatacaaagatattccagttccaaagccaaaggccaacgaattgttgatcaacgttaaatactccggtgtctgtcacactgacttgcacgcttggcacggtgactggccattgccaactaagttaccattagttggtgggcacgaaggtgccggtgtcgttgtcggcatgggtgaaaacgttaagggctggaagatcggtgactacgccggtatcaaatggttgaacggttcttgtatggcctgtgaatactgtgaattgggtaacgaatccaactgtcctcacgctgacttgtctggttacacccacgacggttctttccaagaatacgctaccgctgacgctgttcaagccgctcacattcctcaaggtactgacttggctgaagtcgccccagttttgtgtgctggtatcaccgtctacaaggctttgaagtctgctaacttgatggccggtcactgggttgctatctccggtgctgctggtggtctaggttctttggctgttcaatacgccaaggctatgggttacagagtcttgggtattgacggtggtgaaggtaaggaagaattattcagatccatcggtggtgaagtcttcattgacttcactaaggaaaaggacattgtcggtgctgttctaaaggccactgatggtggtgctcacggtgtcatcaacgtttccgtttccgaagccgctattgaagcttccaccagatacgttagagctaacggtaccaccgttttggtcggtatgccagctggtgccaagtgttgttctgatgtcttcaaccaagtcgtcaagtccatctctattgttggttcttacgtcggtaacagagctgacaccagagaagctttggacttcttcgccagaggtttggtcaagtctccaatcaaggttgtcggcttgtctaccttgccagaaatttacgaaaagatggaaaagggtcaaatcgttggtagatacgttgttgacacttctaaataa

SEQ ID NO: 78490 - DNA, 213 bp, Saccharomyces pastorianus
atgcgcgtctcaccttcaaggtcatggtcgctctattgttcgcactaccggcaaactcgcgtctcgcaagtcttggctcattcttctagtatactcatgttgcaaatgcactcaggttctttcggcaacttaaataatgacaccagttgtcgtggtcgtcatcatcgcaaccccaaccggcattcttatggcttctccaatctcgccccttag

SEQ ID NO: 78491 - DNA, 342 bp, Saccharomyces pastorianus
atgaaggcaaaagacaaatataagggtcaaacgaaaaatgaagtgaaaagtgttgatatgatgtatttggctttgcggcgccgaaaaaacgagtttacgcaattgcacaatcatgctgactctgtggcggacccgcgctcttgccggcccggcgataacgccgggcgtgaggctgtgcccggcggagttttttgcgcctgcattttccaaggtttaccctgcgctaaggggcgagattggagaagccataagaatgccggttggggttgcgatgatgacgaccacgacaactggtgtcattatttaagttgccgaaagaacctgagtgcatttgcaacatga

SEQ ID NO: 78492 - DNA, 1239 bp, Saccharomyces pastorianus
atgaaaattgccgtagaaacgacactattcgacttctttgtcatcgatcagtttaaaaaatcgactttttcagcgccaaacaccaaagttgacactattaagggttgtattaataagtttattgaacaatttaatgtatatgatgagcaacacatattttggcaacctcctggaaaatcaaacgtcagattgctgtcaaacaccaatgattttggccaattgggaaactttttgcataaaaaaatcaaatgtaacatttttattggagaagaagcattaaggaagtacgatttggctatctgtggaccttatgacaaatttgtagaaaattctgaccctagcgttaaaaaggttgtgaacagggatgatgtcatattgtcgcgcaaatgtttaaacatcatatcggaacaactctctatacttgagaagtccataagtaaggctcaaaatcaagtgttacagtcaagtgaggttgaaggaaaaaaatgtattatcttgccggaagataaaccagaactcatcaagtttttttctaaatttgaaacgagtgttcagttacaggaggtttacgagggctataaggtatatgaaaagctattacaaaaatttgatgggcaaaaaaaaagaatggagtctttcttgaatgaaaacacgccaatgtcaggtgccgaagctatcaagcaaataaatatatctgaggagctcaaggaaaaaggggaacgtttaacaacaccaaacgatccgttattacacgttgaggtgagtaataaggataactcgctgcactttatattgtacaataaaacgaatatcataattccaggaaattgtacatttgaattttctagccaaatctccgaggtattcagtatcaaaatgggaccgcatgagataggcataaagggtcagaaagagctatggttttttccatcattacctactcctctctccaattacacaatgaaagtcgtaaaccaggatggagatactattctggttggtaaatgtgctgactccaatgaaataactctaaaatctccactagcctcattttcgacaggcagtttccagacaggcagtttccacactttgcaagatcctactaatgttttccgggcagacgcgctttcttcccctgatgaatcaagcatcatgagcactccctttctaggcgagacagatgaagtttataattctggctctacattaagtaggccatttacttgggaagaaatataa

SEQ ID NO: 78493 - DNA, 141 bp, Saccharomyces pastorianus
atgcggtcccattttgatactgaatacctcggagatttggctagaaaattcaaatgtacaatttcctggaattatgatattcgttttattgtacaatataaagtgcagcgagttatccttattactcacctcaacgtgtaa

SEQ ID NO: 78494 - DNA, 1248 bp, Saccharomyces pastorianus
atgaacaactcaaagaccaaccaacagatgaacacctcaatggggtaccccttaaccgtctacgatgaatgtaacaaattccaactaattgtgccaactttagatgcaaatatcatgctttggtgtattggacaactttcactgctgaatgattctaatggttgtaagcatttgttttggcaaccgaatgacaagtcaaatgtccgaatcttactaaataattatgactatggtcacttgttcaaatacttgcaatgtcaaagaaaatgctcagtttatatcggagaaggaacgcttaagaaatataatttgactatttctacatcctttgacaactttttggacctgacgccctccgaggagaaggaaagcttatgtaaagaagacgcacacgaagatcccgtatctccaaaggctggttccgaggaagagataagccctaattccacctctaatgtggttgtgtcaagagaatgcttggataacttcatgaaacaactccttaagttggaagaatcgttaaacaagttggaattggagcaaaaggtcacaaataaagaacctaaccacagaataagcggtgcgattgacataccagaagataggcccgaactagtgaactttttcacagaattgaaaacagtcaaacaacttgaggacgtttttcaacgttaccatgactatgagaggttatcacaagaatgtgacagtaagacggaaatcgcctctgaccatttgaaaaaggaaactaaaatagaagtggaacccccaaatgagcgctcattgcaaatcacaatgaaccaaagggacaattcattgtatttccagttgtttaacaacacaaattctgttttggcaggcaactgcaaactgaagtttactgacgctggcgataagccaaccacgcaaattattgacatgggtcctcatgaaataggaataaaggagtacaaggaataccgatactttccatacgcgcttgatttagaggccggctccactatcgagattgaaaatcagtatggagaagtgatcttcttgggcaagtatggctcttctccaatgattaacttaaggccaccttcaagattatctgcagaaagtttacaggcatcccaagagccattttactcctttcaaattgatacgttaccagaactggatgactctagtatcatcagtacatccatttcactctcttatgacggtgacgacaatgaaaaagccctgacttgggaagaactctag

SEQ ID NO: 78495 - DNA, 870 bp, Saccharomyces pastorianus
atggctctctcttcaaactggcaggcactattagcctccgaaagcaatcctacctccaatggaaagaataagcaatcaaataggaaaatcagaaacgttaacaaagttagcaaaacagtaaatgtcagtagtacaactcaatatgcccctcgaaagcgcaaaaacggcagtaaaattatggacatggtatataacatgaacaaggagattagtaagcatgagaaagacaagctcgagggaaaagtgtttgaattcaacccaaataaagcaaatactagtactactattaaagagccagtaaaagtgggtatttcggaagatactcgtattaatagtaataagagtaaagaaattgggaaatacattgccatggattgtgaatttgtaggcgttggtcccgagggtaaagagtctgcgttagctagaatatcaatcgtaaattattttggacatgtcgtcttcgatgaatttgttaagccaagagagaaagttgtagaatggagaacttgggttagtggtattaaaccagagcatatgaaaaatgccattacattcaaagaagctcaaaaaaagactgcggatattctggaaggtagaattcttgtagggcacgctttaaagcatgatctcgaagcattgatgttatcccacccaaagtcactactcagggacacttcaagacacctcccattcaggaagttgtatgctaagggtaaaacacccagcttaaagaaattaaccaaggaggttttaaaaatttccattcaagaaggtgagcattcttcagtcgaagatgctcgtgccaccatgctattatataaaaaggaaaaaacggaatttgaaaaaattcacagaaacactttcaactaa

SEQ ID NO: 78496 - DNA, 207 bp, Saccharomyces pastorianus
atgggtgctgcttatcatttcatggggaaagctattcctccacaccaactagccattgggacattaggactgctaggtttattggttgttccaaatccttttaaaagcgcaaagccaaaaacagtcgacatcaaaacagacaacaaagacgaggaaaaattcattgaaaactacttaaagaaacattcggaaaagcaagatgcgtaa

SEQ ID NO: 78497 - DNA, 876 bp, Saccharomyces pastorianus
atgtcttctatctacaaagccctcgcaggaaagagcaaagataataaatctgaaaagaagcaaggcaatgtcaagcaatttatgaacaagcaaagaactcttctgatttcgagtagaggtgttaactatagacatcgtcatttaattcaagacttaagcggattattgcctcattccagaaaggagccaaaattggatactaaaaaggatcttcaacagttgaacgaaatcgctgagttgtacaattgtaataatgttctattctttgaggccagaaaacaccaagatttgtatctatggttatccaagccgccaaatgggccaactataaaattttacattcaaaacttgcatactatggatgagttgaattttacaggtaactgtttaaagggttctcgtccggtattgtcgtttgatcaacgtttcgaatcctccccacactaccaattaattaaggagttgctagtgcataattttggtgtaccaccaaatgctagaaaatctaagccatttattgatcacgtcatgtccttcagtattgtagatgataaaatatgggtgaggacatatgagatctcacacagtactaagaacaaagaagaatatgaagatggcgaagaagacatatcattagtggaaattggccctaggtttgttatgactgtcattttgatcctagaaggttcatttggtggtccaaagatctatgaaaataaacaatatgtttcgccaaacgtcgtaagagctcaaattaaacaacaagctgctgcggaggcaaagtctagagctgaagctgctgtggaaagaaaaattaagagaagagagaatgttcttgccgccgatcctttatcaaacgatgccttgtttaaataa

SEQ ID NO: 78498 - DNA, 969 bp, Saccharomyces pastorianus
atgtctatggagcctcctgttgggcttacggctatgcccgtcaccaagctagccatgatcacgacgcttgtggttcccttagttgcctcgattgcaagttacaaacatatatttctattgcaatatgatccttttctgcagacctaccatcaatactaccgtctgctcatattccagttctgcgccatcaatgaatccgatacagtaatactggcgttgatatggtatctgtttaggcatttagaacggctactaggatcccacaagtacttgaccttgattgttttgtcatgggcctacaccaccttaggaatttggggattgaatctgatctggaacgcatttattggacagtacaagtggcttcaatggaacaattttagtacaggttcactgcccattgttttaagcttagtacatttttacaaagaatacacccctcagatttacgaatggaatataagattactaggacctcgaggaggagcatcaagtcacaatgataacaagcgagaagacaagagcgccgtagagtggaaaatcaacgatcagtttcttttaaatgggttaattctcctgcttatattaaatcaggggtttgcgggaatactatgcggattcataagctggatgtgtggtattttcatcgataagggcctgttaccgggattagaccattggagaataccgtttgtatcctatttcatctctcaaggcccacccacgagggctaacgttgctatagcggccaatgcggccacgaatacagcagcagcaagagccactgtagaagcagctactgctgctacaggaaatggaaatacaggcaactctgggcctacaagcctaccgcttcgtggttcaagcaccacccctacaaatacctctaacgctggtgatgacgagcctggtgccgatgaacctgcaagaccactgggagtccaatttttggatacctttaggagatga

SEQ ID NO: 78499 - DNA, 489 bp, Saccharomyces pastorianus
atgcacaatatgtttccagcactcacaaagacactgtcgttgcaaggctacaagattatcaactctcaaacagggtccgctgcatggtcgtgcggtcgtaggtggtttagtagtgataaagatgaccacgacgatgtggtgacgaggattaaaattgcccccataaagagaactaacgagccattggacaagaaaagagctcggttgatacatcaatcacgcaaaagagggatcttggagacggacttgctgctatctgggttcgctgccaaatatttgaagaagatgaacgaagaagaactggaagaatacgattcgctattgaatgagttggactgggacatatactattgggccacaaaaaatttcaaaaccagccccttgcctgacaagtgggccaattctaaattgctgaagcagctacaagaattcagtgaaaataaagagaaggaaattttaagtatgccggacttgtccaagtatcaatga

SEQ ID NO: 78500 - DNA, 1506 bp, Saccharomyces pastorianus
atgtcagaagagagggaagaaaacgagatatctagtgctacgctgaatacgcagcgactttcagcaatgatcgattcactgaacaatgagaaagatgacaggctctttccatctcccacaactaccaggacaatgatcccagaggaaaaggcggatcaaagtgatgtctttaaaccaccatcgagattgttgagatcacctgttggtgacgtttcgctgccacctggtgataacagatcaagtatgatttccaactactctggaattattcaagaaggcgttgaagtatcatatgtggtcaaaaaccggcaacagacccaagaacggcgcacaagtaaggattccaatagtttgtactccttgaaagagcccgtgagcaagaacgagttaccgtcgttgcccatgttgccttcagaagcgacattgacaaaacatctaagtgataaccaaagcacaaaatcgaataccaatgcagacgaaattgtcattaaaccagttactaatgccaaaccggtgggaaggtttaactctaacacttcaaaaaaagtagagggtcgtggctcactgaaactgttatctagtcctctacgtcaggaaaaagttatgcgttcctctattggttcaggtaatttagccagcgagagcggatcttccacttataataccaaattccatcaatctattcaagagcagctcgaagaagaagaggaaggaaatgttagtgataagctttcaattgtttccagtgtcatacccgagttgtatacaacgaccaacgaagcgcccaaagcgataaacccaatacgttctgaaaccaatgactacaatccaactattccgcccagaagtaaggaccgtcctaggtcaaggttgttcatcgaagaaggtgatggcgagggggatcttttaaccgaagaaatattaccaacgccggtccaacctggtggccactataagaactcatctcagatttccacagttagtgaacaaaaatcggaatcttactattctgcggcaacgagtatgcctccagaggaagagacttacttgacaagaccattgcccagcacacccaatgaggatagcagagttacatcgaatttgaaacgtgacgacacattgaaggctattcatgatagggcaaatcatacctctacttcgacaaacaaacaagatgatgacatgtacgaggacatcattgaggaaacgcccaagaaaactaaactcaagaaggatacgaaaaaaaagctcaataaaaaaaaatctgtgaaggaattgcgatcctttgatatcgacacactaaatcaactgttgagtgtgacaaagggaaccttaatcgggtctgaatttgcgcaactggggatgaaaattgaggagaaacgtgccctggagagactagtagactctttgtccaggttaacagcagacatggttcttgatccggaccgctatgaagaaggactgaaaagattagacaaagctacaaaggctcttgaagggttttga

SEQ ID NO: 78501 - DNA, 1512 bp, Saccharomyces pastorianus
atgaacatattgctaatgcaacggatagttagttttattttggtggttagtcaagggcgatactttcatgttggagagctgaccatgacaatgttgaaaagacctcaagaagaagagtcagataataatgctacgaagaagctgaaaacgagattaacgtacccttgtatcctcgggaaggataaggtgacgggcaaattcatctttcctgcaatcactaaagatgatgttatgaatgcaagactgtttttgaaggacaacgatttgaaaacttttttagaatattttttgccagtggaagtcaactcgatctacatttatttcatgataaaattgctgggattcgacgtcaaagataaagaactatttatggcgttaaactctaatatcacttctaataaagaacgttctagtgcggaactatcgtctatacatgcaaaagctgaagatgaggacgagttgaccgatcccttagagaaaaagcatgcagtaaaattaatcaaagatttacaaaaagccataaataaagtccttagtacaaggcttcgattacccaacttcaatacgattgatcatttcaccgccactttgcgtaacgccaaaaaaattttggttctgacgggcgctggagtttccacttctttaggtattcccgattttagatcatctgaggggttttattctaagatccgacaccttggattggaagaccctcaggatgttttcaacttggatatattcttacaggacccttctgttttttacaatattgcccatatggttttaccaccagagaacatgtattctccgttgcacagcttcattaaaatgctacaagacaagggcaaactattaagaaactacacacagaatatagataacttagaatcgtatgcagggatagatcctgataaattagtgcaatgtcacggttcattcgccactgcatcttgtgtgacttgccattggcaaatacctggtgagaaaatattcgaaaatattagaaaccttgaactaccattatgtccctactgttatcaaaaaagaaaacaatattttcctatgagtaatggcaataatacggtgcaaacaaacataaatttcaactcacccattttaaagtcgtatggtgttttgaaaccagacatgacattttttggcgaggccctgccatcgcgatttcataagaccatccgcaaagatatactggaatgcgatctattgatttgtataggaacaagtttgaaagtggctcctgtgtctgaaattgtcaatatggtaccttcacatgttccgcagattttgatcaatagggatatggttacacatgcagagtttgacttaaacctgttgggattctgtgatgacgtggccagtctcgtagctaaaaaatgccattgggatataccgcataaaaaatggcaagatctaaagaagatagattacaactgtacggaaatagataaaggtacgtataagattaagaaacagccacgaaagaaacaacagtaa

SEQ ID NO: 78502 - DNA, 534 bp, Saccharomyces pastorianus
atgagcagcattccagctggcactgatcctgggtcctgcggtgctaatttcaagaatgaccgcaagcgcagagataagatcaacgaccgtattcaagaactattgagtatcattcccaaagacttctttagagattattacggcaattctggtagcaatgacacgttaagtgaatccactcccggtgcgcttgggttgtccagcaaggccaaaggtacagggaccaaggacggaaagcccaacaagggccaaattctcacacaggcggtagagtacatatcacatctacaaaatcaagtggacacacagaacagagaggaggtggaactgatggtgaaggccactcagttggccaagcagacaggcaccattgtcaacgatataaacttagagaacaccagcgctgaagtcgccctgtccaggattggcgtaggaccgctggccgcaacaaatgatgactcagtaagaccgccagcaaagaggttgagctccttcgagtacggaggatatggtgagtacggtaatggtagctaa

SEQ ID NO: 78503 - DNA, 1155 bp, Saccharomyces pastorianus
atgaacaaaacgaattggaaggtatctgtaactacattcaattgtggtaaggaatttcccgttgaaaattcgaaagcaatcgttaaacaattgcttttcccctacgatgacggcatctcccaattggaattgcaagatctatatgtattggggttccaagaactagtccccatatggcaaggctccttccctgctgttaatcgtgatttaatcgatagaattacaaccactgcggttaattgtctgaatgaaaaagtgtcagctacacaaggggatgagcagtattcatgtttaggggtgaatagtcttggagcgattaccataatagtattatacaataataaagcgctaaaggtaaaagatgatattttgaaacggaatgggaaatgtggttggtttggtacacacttaaaaggtggaactttgataagttttcagatgacacgcaatggcgaggagaactgggaaagatttagctatatttgtgctcatttaaatgcaaatgaaggtgtcaacaatagaaatcaaagaatagatgattacaaacgaataatgagtgaagtgtgtgattctgaggttgcaaaaagcgaccactttttctttctaggcgatttgaattttagggttactagtacttatgatccaacttccgattattcgtccaccacaacgttaaggcgtctattagaaaatcatgaagaactaaatctgctacgtaaaggagaggatgaaccgttatgcaaaggttttcaggagctggagataacatttccaccgacttacaaattcatgttgtttgaaaaggaaacatataatacaaaaagaatcccgtcgtggtgcgataggattctctacaaaagctatgcagtgccaactttcgcacaagaaggtacttaccattccgtccctaggtccaatgctctattatttagcgatcatcaacccgttaatcttaccgtaagattaccaaggtctacagggatgccagtgccgttatccttacatatcgaaaagtatcctttatcatggagctctggcctgattggacaaattggtgacgcagtcatcgggtactgcggttggctagttactaagaatgtacattattggatattaggttctttactattatatttactattaaaaatcctgtaa

SEQ ID NO: 78504 - DNA, 2136 bp, Saccharomyces pastorianus
atgagccactttttcgccgatcatgatgctcctctgagcatgctttctgttaaaacagaatactttcctcaattgactgataaggaacaaaaatatgcgcatttcatgtcaaaagcctcccatgcgggttcaagggttgtaatgagacaagtttctcatgagagtgagccaatttttgacctaatccttgccattcattcaaagctagacggcaagtacccagaggacgatattacgcagaagcagcaaacgggtttgtatttggaatacgtttctcaattcttatctaatttgggtaatttcaaatcctttggtgacactaagtttattcctcgttgtgaggtagaattcttcaaacagcttttggagctggccaagattaatccgtgttcttctccgctcactttatctcctgttgacgttaaccatgaattcacatctcatcatcttttttccaccatcaatgagctaattgatattggtatttaccatgtggaagagaaggcggctctcttagggtttccctctcaaggttatacttcagcctattatctgggtttacctgtgacacctgaagatatggctcttttgaaagagcagttgtttgctgaacttgccatcttgcctgaaaacacaagaatcaacaaagttggtgaaaacagtttccaaatctgggttgcctctgagaatgtgaaaaatcagataacagaaacctaccccagtggacagatcacattatccaatgctgtaaccaaagtagaattcatttttggtgatcattcacgtgaaatgcgtttagtagcatcgtatttaaaggaagctcaaaaattcgcggctaatgatactcaaaaagcaatgcttcaggaatacatcaaccactttgtcactggctcttctcaagcacataaagaagcacaaaaactttgggtcaaagatatatctcccgtcattgaaacaaatatcggttttatcgaaacatatagagaaccctcgggcataattggagaatttgaatcgttggttgcaattcaaaacaaagaacgtactgctaaattttccagcttggttaacaacgcagaagaattcatttccttactaccatggtctaaagattacgaaaaaccgattttcaatccaccagatttcacctctctagaagtattaacgtttactggatcgggtataccagcgggcatcaatattccaaactatgatgatgttcggcttaaaattgggttcaagaatgtttctttgggaaatatcttaagcgcggctgccaaaagctcatccaagcatccgccaagttttatatcgcaagaagatcgcccaatttttgaaaaatatcaaagtgattcttttgaagttcaagtaggcatccatgaattattaggacatggttcaggaaagttgttgacagaatttacagacggctttaattttgataaggaaaaccctcctttaggtttggatgggaaaccggtgagcacatactacaaagttggtgaaacttggggttccaaatttggacagttagctggcccatttgaagaatgtcgtgcggaagtaattgccatgtttttgcttactaataagaagattcttgatattttcggtttccatgatgtcgaatctcaagataaagtgatctacgctggatatctacaaatggcccgtgcgggtctcctagctttagagtactggaatccaaaaactggtaagtggggacaaccacacatgcaagcaagattttctatcatgaaaacatttatgaagcactctacagataagaatttcttaaagttggagatgaacagcacgaatgatgattttgccatcaagttggataaatctctcattaaaacagcgggacatgaatgtgtgaaagactatttaaagcatttgcatgtttacaaatgttcaggcgatgtggaacagggaagtaagtactttattgatagatcaacggtgacaccggatttggcgtctttaagagacatcgtcttatctaagagattgccaagaagacaattcatacaatcgaattcttatattgacgacaataacaaggtaaccctgaaagaatatgatgaaactccacagggtatgctccaatctttccttgatagagaattatga

SEQ ID NO: 78505 - DNA, 912 bp, Saccharomyces pastorianus
atgactgttactgacacttttaaactgtttattttaaggcatggtcaaagtgaattaaactcagaaaacatattctgcggatggattgatgctcaattaacggaaaaagggaagtctcaggcccgccactctgcaaaattgatcaagcagttttgcgattctaacaatatttctttgcctcagattggctatacttcaaggttgattcgaactcagcagaccatggacgttattctcgaagagttgggactaaaacacaccaattatgtaattactacgaatacaaacattaaggagaagctgcaggacacaagatttgaaggaagtatgcctgtgttgcaaacctggaggttaaatgagcgtcattacggcgcatggcaaggacaaagaaagccggatatcttgaaagaatacggtaaggaaaaatacatgtatatcagaagagattacaacggaaaaccccctaaagtcaacctaaacctggaaatggtccaagaggaaaatgatcaggggtcctccacaggctatgattttaaggagcccaatagacacttaaaatacggccccgaagagaaggctaatgagcgtctgccagagagtgagtctctttgtgaagtggtcgtcagattgaaaccatttttaaataatgttgttctgtctaccgccaacaaaatcagtcaagaatcgtgtgttatagttgggcatggcagctctgtaagatctctgctgaaagtattggaaggtatctcagatgaagacatcaaagatgttgatattcccaacggcattccgctagttatagagttggatagagacaattactcttttgtgaggaaattttacttggatccagaatcagctaaagttaatgctcaaatggttcgtgatgagggtttcgaaaagaatccatga

SEQ ID NO: 78506 - DNA, 1656 bp, Saccharomyces pastorianus
atgacctattctacagttagcatcaacacgcctccaccatatcttactttagcctgcaacgaaaagttgccaacagttttatccattgctggaacagatccaagtggtggagccggtatcgaagctgatgtcaaaactatcacagcacacagatgttatgccatgacatgtatcactgctttaaatgctcaaactccagttaaagtctacagcataaataacacaccaaaagaagtggttttccaaactttggaatccaatttaaaggatatgaaatgtaatgttatcaaaaccggtatgcttaccgcagctgctatcgaagtcttgcacgaaaaactgctgcaactcggcgaaaatagacctaagttggttgttgatccagttcttgtcgctacttctggttcttctttagctggaaaggatatagttagtttgattacggagaaggttgcaccttttgctgatattttgactcctaacatcccagagtgttacaaattgttaggtgaggaaagaaaggttgacggattacaggatattttccaaatcgcaaaagaccttgctaaaataaccaagtgttcgaatatactagtgaagggtggccatattccatggaatgatgaaaaggaaaagtacattaccgacgttcttttcttgggtgctgaacaaaaattcattatctttaaaggcaatttcgttaacaccacgcatacacatggtactgggtgcacactagcttctgccattgcatcaaacttggctcgtggttattctcttcctcagtctgtttatgggggtattgaatacgtccaaaatgccgtggcaattggttgtgatgtcacaaaagaaactgtcaaggataatggaccaattaatcatgtttacgccgtggaaattccattggagaaaatgctcagtgatgaatgttttactgcatcagatgttatacctaaaaagccgctcaaaagtgctgctgacaaaatcccaggcggtaatttctatgaatacctgatcaatcaccctaaagttaagccacactgggattcctatattaaccatgagtttgttaaaaaggttgcggacggtacattagaacgtaagaagtttcagttctttattgaacaagattatgcatacttggttgattatgctagagttcattgtatcgcgggtagtaaagctccatgcctagaagatatggaaaaggagctagtcattgttggaggtgttcgtactgaaatgggtcaacatgaaaagagattaaaagaagtatttggtgttaaagatcctgattactttcaaaagattaagagaggacctgcattaagagcttactctcgttactttaacgatgtttccagaagaggtaactggcaagaattggttgcatcccttactccttgtttgatgggttatggtgaagctttaactaaaatgaagggtaaagtcaccgcacctgaagggtccgtttaccacgaatggtgtgaaacttacgcatcttcatggtatcgtgaagccatggatgaaggtgaaaaacttttgaaccacatcttagaaacataccctccagagcaacttgacactttagtaacaatctacgctgaagtttgtgaattagaaacaaatttttggaccgctgcgctagaatacgagtag

SEQ ID NO: 78507 - DNA, 1221 bp, Saccharomyces pastorianus
atgggcgacgaattacacaaccgtttacttcaccaaaacgatggcaccaaggacgccatactttataagataatagaatcgttagtttgctccatctgccacgattatatgtttgtaccgatgatgacaccttgtggtcataattattgctatggttgtctgaacacctggtttgccagcaataatcaaaaagaattggcttgtccgcagtgcagatctgatattaccaccattcccgcattgaatacaacgttgcaacagtatctatcattcattttagagaaattaagggaccagaatgatgaatcttttaaaaaacttttaacaactaaaaccaaggaggaaaatgattacaagaatgacaaggaaaaggacacattgtttgacaaagtatttaagaatagcgcattggcagtggccgacgactcggatgatggtatcacacgttgtagtaattgtcattgggaattagaccaagacgaagtagaggacggaaatgtttgtccccactgcaatgccagaatacggaattacgcaggtggtcgcgacgaatttgatgaagaagaatacagtgaaggagagttggatgaaatccgggaaagcatgcgtaggcgtagagaggatcgatttgcgtctaccaatccgtttgctaatagagatgatgtaagttctgaagaagatgatagcagtgaagaggagcccatgcgagaacatatcccactaggccgttgggccaggtcacataatcgtagtattgctgtggatgctgtggatgatgaagacgacgaagaagaggatgaggaagaagaagaggagatggattccgatttgaaagattttatagaggacgatgaagatgacgaagatgaagatggaagtaggaggaatttggtattgtctgcactcaagaacagacatgtaattattactgatgatgaggaagaggagcaacggcgacatgctacagaagaggaagatcgcgatagtgacttttacgagcataatgatgatggttttgtaagtggtgatagccttgatgaggatcagaaggaggttacacagatacaatcgagttctgattccgaagatcgttcactttcgtattccggctccagcgatgtcaaggataacaatgacgataacacggaagaattagatgacccacaaccgaaaaggcagaaacgcttccgtgtagttctaggagacagtgacgatgaataa

SEQ ID NO: 78508 - DNA, 1191 bp, Saccharomyces pastorianus
atgactgtcaccataaaagaattgactaaccacaactacattgaccacgaactatcagccactttagactcaacggatgcgttcgagggtcccgagaagttgctggaaatctggttcttccctcacaagaagtccatcacgaccgaaaagacattaagaaatattggcatggatagatggatcgagattttgaaattagtgaaatgcgaagtcctttccatgaagaagactaaagaactggatgcctttttgttgagtgagtcttcactcttcgtcttcgatcacaaattgacgatgaagacgtgcggtactacaaccacattgttctgtctcgaaaagcttttccagatcgttgagcaagagttatcgtgggctttccgcacaacacaagggggcaagtacaaaccatttaaagtgttttattctagacgatgtttccttttcccctgtaagcaagccgctatccatcaaaactgggctgacgaagtcgactatttgaacaaatttttcgacaatggtaaaagttattccgtgggaagaaatgacaagagcaaccactggaacctgtacgtcaccgagacggaccgctccacacctaagggaaaggagtacatcgaggatgacgacgaaactttcgaagtactgatgacggagctggacccagaatgcgctagtaagtttgtttgcgggcctgaggcatccacaaccgctctcgtggagccaaacgaagataagggccacaacctcggctaccaaatgactaaaaatacaaggcttgacgaaatatatgtcaactcggcccaagactccgatttatcatttcaccacgatgcatttgcattcacgccatgtggatactcatccaatatgattctcgctgaaaaatactattacaccctgcacgtgactccggaaaagggttggtcctacgcctctttcgaaagtaacatacccgtatttgacatttcccaagggaagcaagacaacttggacgttcttctacatattctgaacgtttttcaaccaagggagttctcgatgaccttttttaccaaaaattatcagaaccaatccttccaaaaactactaagcatcaacgagtcactgcccgactacatcaagttagacaaaattgtttatgatctggacgactaccaccttttctatatgaaattgcagaagaaaatatga

SEQ ID NO: 78509 - DNA, 321 bp, Saccharomyces pastorianus
atggaaacttcaaatgttcaagtagcacttgtccaattattccaatcccatacattgaattgttctgaactagtcccagaagttaaaaatggagcttcatttgttacttcttgtttttcactagttgtggctcctgattttgtcatgaatgggtcatcaggagaatctactttaatttttttagaatcactcattatatttgaatctggtgatagcaccgaggctatcgaatcttgcgggcttatttctaatacgctggcttttctttttcttgggttgccgacatccatattagaagatgtggacggcgatgatgaatga

SEQ ID NO: 78510 - DNA, 1476 bp, Saccharomyces pastorianus
atggcacactatccaccttccaaggatcaattgaatgaattgatccaggaagttaaccaatgggctatcactaatggattatccatgtatcctcctaaattcgaggagaacccatcaaatgcatcggtgtcaccggtaactatctatccaaccccaattcctaggaaatgttttgatgaggccgttcaaatacaaccggtattcaatgaattatacgcccatattacccaagatatggcccaacctgattcttatttacataaaacaactgaagcgttagctctatcagattccgagtttactggcaaactgtggtctctataccttgctaccttaaaatctgcacagtacaaaaagcagaattttaggctaggtatatttagatcagattatttgattgataagaaaaagggtactgaacagattaagcaagtcgagtttaatacagtgtcagtgtcatttgcaggccttagcgagaaagttgatagattgcactcttatttaaatagggcaaacaagtacgatcctaaaggaccaatttataatgatcaaaatatggtcatttctgattcaggataccttttgtctaaggcattggccaaagctgtggaatcgtataagtcacaacaaagttcttctacaactattgatcctattgtcgcattcattgtgcaaagaaacgagagaaatgtgtttgatcaaaaggtcttggaattgaatctgttggaaaaatttggtaccaaatctgttaggttgacgtttgatgatgttaacgataaattgttcattgatgataaaacgggaaagcttttcattagggacacagagcaggaaatagcggtggtttattacagaacggggtacacaaccactgattacacgtccgaaaaggactgggaggcaagactattcctcgaaaaaagtttcgcaataaaggccccagatttactcactcaattatctggctccaagaaaattcagcaattgttgacagatgagggcgtattaggtaaatacatctccgatgctgagaaaaagagtagtttgttaaaaacttttgtcaaaatatatcccttggatgatacgaagcttggcagggaaggcaagaggctggcattaagtgagccctctaaatacgtgttaaaaccacagcgggaaggtggcggaaacaatgtttataaagaaaatattcctaattttttgaaaggtatcgaagaacgtcactgggatgcatatattctcatggagttgattgaaccagagttgaatgaaaataatattatattacgtgataacaaatcttacaacgaaccaatcatcagtgaactaggaatttatggttgcgttctatttaacgacgagcaagttttatcgaacgaatttagtggctcattactaagatccaaatttaatacttcaaatgaaggtggagtggcggcaggattcggatgtttggacagtattattcttcactaa

SEQ ID NO: 78511 - DNA, 321 bp, Saccharomyces pastorianus
atgttttttaaagtctccaattttacttcactaacattactgtcgctaattcctattgtaggaccaatcttggcaaatcaactaatggccccaaaaagaacctttacctatttgcagaggtactttttactaaagggattcagtaagaaacaggccaaagattttcagtacgagcattacgcaagtttcatatgtttcggtatgtccgccggtctactagagttaatacccttcttcacaatagtcaccatatctagcaacactgttggtgcagctaaatggtgttcttcgctactaaagggtgaaagaaagaaggaatga

SEQ ID NO: 78512 - DNA, 675 bp, Saccharomyces pastorianus
atgtctgaatcaaagtttattttcttgatattcaataacgatagcatgtgtaaatcggaagctctttcgaaggaattattttccaatgctaaatttagcaagaataacaagttttctaactcggacttggctggattcagtttactggcagtatcattatcaggcaacaccattaaggacgttgctctctgtatcacgggtctactagcaggagatggcatattggatactaatggtgaaattagagacccatttaacggatctcgcgatgctgataacgtggcagtctctgttaagtttcttgtgtgtctaagtgagggggggtatgctattacgggtgcttttttcttcaactcatgtaagatgtcaggactgtttaccattatttccaaagaccttcttaagatggtcaaccttactcccagtgagtttggtgatatgggattatacgaaaatgcatgcggcgactcattaggtacagcaacaaggtccgaacgatcatcatcactgaatgttgacgaaaacgaatcgacggacgaggaagcgtgttggtacaagcatggaggtttagagagccctaccaacggggtatttttagaatatgaaatgtcggcaggagcggctgcactaaccgggtatgtcattgtgttctttgtttatgattctttactttaa

SEQ ID NO: 78513 - DNA, 3306 bp, Saccharomyces pastorianus
atgacatacccggttagtgcagccgctcctgccgacatttcatattctaaaaataccccgttggtagggctctctaaacctccatgcttgtaccaacacgcttcctcgtccgtcgattcgttttcgtcaacattcagtgatgatgatcgttcggaccttgttgctgtacctaatgagtcgccgcatgcattttcgtataatcccatatcaccaaactcactgggagtaaggttgaccatcttaagaaggtctttggaaataatggtaaacagtcctgacatcttacatgagttgaagaaaaaagcacccgtaatagcataccccccctcacttagacacacaagaaacttaacagagactgccacgttatcagcatcgcgagatccgttaaatgggtctctaatttcaccattagtatccaatatgccatctcctgctagtagacccgtgatacagagagcaacgtccttaatggtgttgcctgataatgatactgccagtaaactgaatccagccaagtccgagttagaaaacttgttattcttgctaaatttagcattggaaaataattccttcgaaagagcttccgatttacacatgctatcgttattgaatatcaagaaaataaactttgattcagacattcaaaaatcagaaactttgaaaaaggttttattagatagtttagcagaaccattttttgaaaactacaagaagttccctcacaaagatttaggttcgaaatcgcaatataatgaatatgaggagaaacacgatgatatagtctccttagcagacatcaaaccacaacaggactatagccgaattcttcatcctttcacatctgcaaaaaattctggtccagaggccatttttacatgttctcaacaatacccttggaacttcaaagctgccaatgatttggcgtgtctaacgttcggtatatcaaagaatgttatcaaggcacttactttactagaccttattcatacggatagcagaaattttgttctagagaaaatcatgaatgcagaagatgataaccaagaaattgtgtttaccggagaaactatacctatcgtccagccaaattcgacaagcaataataatgtaccaaatctgatttgggcttcactatgggccaagcggaagaatggcctactggtctgcgtatttgaaaaaacgccttgcgattacattgacgtcatgttaaacttgagagatttttcagtggacagcattattgatacaacacactttctggaaaactttgacaagaaaaagcagcaagaatcaacttcgccaatgacagaaaagaaaacggtaaaatttgcaaatgaaattcacgatattgggtcagtaagtcactcactgagtaaactaattgatgatgtacgttttggaaaagtgttttctgcagatgatgatttattacccttgtctatcagggtggcaaatcatgtcaacgaagagagatattttacgttgaattgtctatctgaaaatataccatgtgctgttacaacttccgtattggaaaacgaaataaaattaaaaattcatagtttgccctatcaggctgggctatttattgttgacagtcacactttaagtcttttaagtttcaacaaatcagtcgccaaaaacatgtttggcttgcgacttcacgagttggccggtagttcggttactaagttggttccttctttggcggacatgttatcttatatcaataaaacttatcctatgttaaatatcacattaccagaaaataaaggattggttttaacagaacattttttcagaaaaattgaggctgaaatgcatcatgataaggactcgttttacacttctattggtctagacggctgtcacaaagatggtaatttgataaaggtggatgttcaattacgggtcttgaatacgaatgctgtattattatggattacacactcaagagacgtggtcattgaaaattataccaccgttccttcgcagctaccgatgttaaaggagaacgaaattgatgtcgttggcagtagaggtagttccagtgcatcttccaagaaatcttcggaaaaaattcctgtgaatactttgaaggcaatggctgatctgtcgattagctccgctgaaacgatttctaattcagacgatgaagtagacttaaatcaagtgaatgaaaaactacgagaaacttcttgcggtaaagtgagaggtatcgaatctaatgacaacaataactatgacgatgacatgacaatggttgatgatcctgagttaaaacataaaattgaattaacgaaaatgtacacgcaggacaaatcaaaatttgtaaaggacgacaactttaaagtggatgaaaaatttataatgagcataattgaaccgattaacggagaagaaatcaaaaaggaaacaaatgagctagaccaaagaaattctactttaaaagctacatacttgactactccagaggctaatataggctcacaaaagcgcataaagaaattttctgattttaccattctgcaagtgatgggtgagggtgcgtacggtaaagtcaatttgtgcattcataacaaagaacactatatcgtggtcatcaaaatgattttcaaagagaggattttagtagacacatgggtgagagatagaaaattaggtactataccttctgagatccaaattatggcgaccttgaataaaaattcccaagaaaatatcttgaagttattagatttttttgaagatgacgattattattacattgaaacaccggtccatggagaaactggtagtattgatctatttgatgttatcgaattcaaaaaagatatggttgaacatgaagctaaactggtgtttaaacaggtagtcgctagtataaagcatttacatgaccaaggaattgttcatagagacataaaggacgaaaatgttattgttgattctcatggctttgtaaaattaatcgatttcggttcggctgcctatatcaagagtggaccattcgatgtttttgtgggaacaatggactatgctgcacctgaagtccttggtggttcctcttacaaaggtaaaccacaagatatttgggctcttggtgtgctactttataccataatttataaagagaatccttattacaacattgatgaaatcttggaaggtgaattaagattcgataaatcggaacatgtcagtgaagaatgcatcagtttgataaaaagaattttgacaagagaagttgataaaagacctactattgatgaaatatatgaagataaatggcttaaaatctag

SEQ ID NO: 78514 - DNA, 1143 bp, Saccharomyces pastorianus
atgagagaggaaagtaggcctaggaagagaaagcatattcctgttgatattgaagaagtagaagttcgatctaagtatttcaaaaagaatgagagaactgttgagttagtaaaagaaagtaaaatcaataaagatttgcaaaattacggcggagtaaatattgactggatcaaggcactgaagccaatagagtattttgaatggatcgaatcaaggacttgtgatgatccgagaacttggggacggccaataactaaagaagaaatgattaacgattctggggcgaaaattcctgagagtttcttacccatatataatcgggtgagattaatgaggtccaaggttaaaaccccggtagatgctatgggatgtagcatgattcctgttttagtttctaataaatgtgggatacctagtgaaaaagtcgatccaaagaatttcaggcttcaatttcttattggcactatgctttctgctcaaacgagggacgaaaggatggcgcaagcggctttgaatatcaccgaatactgcttaaacacattgaaaatagcagaaggtattacgctagatggactgcttaaaattgatgaacctgtattagcaaatctaattcgatgcgttagcttctataccagaaaagccaatttcatcaaaagaaccgcacaattattggtagacaatttcgattcagatataccgtatgatatagagggaattctctcgttacctggagttggacctaaaatgggatatttaacactgcaaaaaggttgggggctgattgccggcatatgcgtcgatgttcatgtccataggctgtgtaaaatgtggaattgggtagaccctattaagtgtaagactgccgagcatactagaaaggagttacaggtttggctacctcactcactgtggtacgaaataaacaccgttttggttggatttggtcaattgatctgcatggccaggggtaagaggtgtgatttatgtctagcaaacgatgtctgcaatgctcgcaatgagaagctaatcgaatcttccaaatttcatcaattggaggacaaagaagacatcgagaaagtatattcgcattggttggacacggttacaaatggaattacaacagaaagacacaagaaaaaatag

SEQ ID NO: 78515 - DNA, 1092 bp, Saccharomyces pastorianus
atgttcactcgaaggtttattccagttgttcagtcaactaagcaaaacatcggtaaatatgtgcgaaaagatgctaggttcactttattaacatacaacatgctctcaccgtcatatatgtggccacaggtatacacatacgttgcagagccatataaaaactggagttataggcacagactgctggagaaagaacttttgaatactttcaaggctgatattatgtgtctccaagaaatgaccgcaagagattatgaagattattggcacgattccataggggtagatgtcaattatgggtccaaattcatttccaagacacccccaaagtattggaaaaaaccggttaaagatatggacggtgtatctattttctataatcttgcaaaatttgactttatatcgtcatcagggatctacttaaaccagctactgaatgttttcaatcaaagggaactgaaatacttatacaataagaaggtaacattaaccgatggtgcttccaatgttattggtgaagacagcttattggatgttttaaaaggcaagaatcaggtatgcttattcgtatctctaagacataaggagacgggtactatttttgtcgttttaaatactcatttgtattggaaatatgacgaagttaagctaacacaatgcatgattataatgagagagttatcaaagatcattaagcagctcttaccgggagatgtaaaaggccaagaaagggtgaagattttattcactggtgatctaaattctacaagagattcgctagttgttaattttctgcaaggtcagatagttagccatggagaccttaatcttattaacccaatgaggccgtatttggatcgttgtgtctatgacgatataccaaaggattattttgtacatacgtgctattcaggaaaattgaagggcatctttgattacgtatggtaccatgattcagattttttactaactaagatcctaaccggtaatgaagtatcagacgaattgctagcgtctaatcagttgggtttacccaatgaaaaccatcctagtgatcatatacctctactaacagaattcaaaatactgtga

SEQ ID NO: 78516 - DNA, 1380 bp, Saccharomyces pastorianus
atgtcctctgcaattgacaatctctttggtaacattgatgagaaaaaaatagaatcttcagtagataagctatttagttcatcctgtggacctattaataaattggaagtcaaaagcaaaacacgtactgtccttcctgattcgaagaaaagggaaagagccgccgaagctgatcaagaagaaaaagaagcaagcaaacctgatgtttcagatgagcaaactgaagaagttgcccttccaaaagtaaagaaggccaaaaaaagtaaaaggaatgacgaggatgaagacttagaagcccgctattatgcgaaactactaaatgaagaagctgaggctgaggatgataaaccaacagtaacgaaaactgatgaaacttcagtaccactgacatcagcagctaagaaagttgatttcaaagaagacgagttagaaaaggcagaaagaactgttttcattggtaacatcttaagtactgtcatcacatctaaaaaggtttataaagaattcaaaaaactttttggtacaaatccgatagcagaaactgaggaatctggtaatgaaaaagaagaggaaagttctaagaaaagtgacaataacgaatttgccattgaaagcataagattcagatctatttcctttgatgaagctcttcctagaaaagttgcgtttgtccaacaaaaatttcataagtcaagggatacaataaacgcttacatcgtctataagaataagtctgctgtaagaaaaatctgctcgaatttgaatgctgtcgttttccaagatcatcacttaagagttgattcagttgctcatccagctccgcatgataagaagcgttcaatctttgtaggtaacttggattttgaagaaatagaagaaagtctttggaaacattttgaaccatgtggcgatattgaatatgtccgtattatcagagattcaaagacaaatatgggtaagggatttgcttatgttcaatttaaagatttacaaagtgtaaacaaagcacttttattgaacgaaaagcctatgaagtcacaaaaacaagaagacgaaaatacaaagaaaccaactaaaaaggcaagaaaattgcgtgtttccagatgtgagaacatgaagaagggtactactattgggaccggcttggatagaaatgggttgacagattcacaaagaaccagagcaggtagagctaaaaagattttaggtaaggctgatagagccactttgggccaagagataactatcgaaggtttaagagcaaagaaaggcgagggttccacccatctaaaaaagaagaaacaaagatccgctacaggtagggttaccaaaagatcgatagcattcaagaaagctcaagctgaaaagagcaagaaatag

SEQ ID NO: 78517 - DNA, 429 bp, Saccharomyces pastorianus
atgtctcaagctgttaatgccaagaagagagtttttaagacccactcttacagaggtgtcgatttggaaaaattgttggaaatgtccactgaagatttcgtcaagttggccccagctagagttagaagaagatttgcccgtggtatgacttccaagccagccggtttcatgaagaagttgagagctgccaagttggctgccccagaaaatgaaaagccagctccagtcagaacccacatgagaaacatgatcattgttccagaaatgatcggttccgtcgtcggtatctacaacggtaaggctttcaaccaagttgaaatcagaccagaaatgttgggtcactatttgggtgaattctccattacttacaccccagtcagacatggtagagccggtgctactacttcccgtttcatcccattgaaataa

SEQ ID NO: 78518 - DNA, 321 bp, Saccharomyces pastorianus
atgaagtacttagctgcttacctattattgaacgctgctggtaacaccccagatgccaccaagattaaggctattttggaatccgtcggtatcgaaatcgaagacgaaaatgtttcctccgttttgtccgctttggaaggtaagtctgttgacgaattaattactgaaggtaacgaaaagttggctgctgttccagctgctggtccagcttctgctggcggtgctgctgctgcctctggtgatgctgctgctgaagaagaaaaggaagaagaagccgctgaagaatctgacgacgacatgggtttcggtttattcgactaa

SEQ ID NO: 78519 - DNA, 765 bp, Saccharomyces pastorianus
atgagtggttacgatagagctttgtccattttctccccagatggacacattttccaagtggagtacgccctggaggcggtaaagaggggtacctgtgctgtaggtgtcaagggtaagaattgtgtagtattgggctgcgaaagaaggtctactttgaagctgcaagacactagaattacgccttccaaagtttccaaaattgactcgcatgtggtgttgtcattttctggtttaaatgcagattccagaatccttatcgagaaggctagagtggaggcccaaagtcacagactaacgttggaggatcccgtgacggtggagtatctcacacgttatgtcgctggtgtgcaacaaaggtacacgcagtcaggaggtgttagaccatttggtgtgtcgacgctgattgccggcttcgacccgagagatgatgaacccaagctttaccagaccgagccaagtggtatatactcttcgtggtccgctcagaccattgggagaaactccaagacggtacgtgagtttttggagaagaattacgatcgcaaagaaccaccagccacagtggaagaatgtgtcaaacttactgtaagatctctgttggaggtagttcaaacaggtgcaaaaaatattgaaatcactgttgttaagccggactcagatattgttgcgttgagcagtgaggaaattaaccagtacgtcacccaaatcgaacaagaaaagcaagagcagcaagagcaggacaaaaagaaaaaatctaaccattaa

SEQ ID NO: 78520 - DNA, 354 bp, Saccharomyces pastorianus
atgtccaagttatcgcgcaaatcaatattggatgaagatgaggacgtagaggagatcctccccaaaacacgaggagatgaacgatccacttgggtgagttcgtcatcgtttgtttcctcctccttaatattttgcaaatgcgtagtaactgttgttgagctcgatgttggtgtggcgctcttgggcatcgtaggcagggtagtaccgttatacacagtgactctattagagccagagttcctgaatctaggtggcgaactatcttggtgttccatgacaaacttttgtgaactttttttttatttcttttcttttttcttctcaaagaaaagaccaaatatcgattctaaatag

SEQ ID NO: 78521 - DNA, 2286 bp, Saccharomyces pastorianus
atggaacaccaagatagttcgccacctagattcaggaactctggctctaatagagtcactgtgtataacggtactaccctgcctacgatgcccaagagcgccacaccaacatcgagctcaacaacagttactacgcatttgcaaaatattaaggaggaggaaacaaacgatgacgaactcacccaagtggatcgttcatctcctcgtgttttggggaggatctcctctacgtcctcatcttcatccaatattgatttgcgcgataacttggacatgttacacgaaatagaaaaatcaaatactaatatttctttatcagctcctaatttgcatgaggaactgggcgttctcagcgataaaggtaacagtaaagaagaattggctttgttaccacctttacctcacacaggagaaatggaaatcactccacaatttgatatcaacgaggctatttttgaacgagatgacatcagccactcttcaaggctagaaccagatgacgtgttagcaaagttagcgaactctactcgagatgctacgggtgaagatcaggggtttgttgtcatgactcatggccacgatgcgtcgacaaacgacgattcgcaattaagcgctactattcttgacaatcagacgtcatttgatctttctaaagctctagagatgactagccattcaaatatttctaatattattaatagttccggttctgagggaagacgttcaaggacaccggtaagcaattccactctgaaaccaaatttatcatctcctgaaagcgcagaacgtgaagcaaacacgactttgtcttcctctacgtcggatcacggggcaacaatgcaatatgatcccaagaaaataataactccagttcctgttttaccttcctctgtccgtgaacagcaacagaacaatgcacctttgagagaaagaagcagatctaattctagtgcactggcatctacactgagagatacgatcatttcaggactgcctcaaaatattaattctgtagaaagaaagttatcaaggaagagtaacaggagtaggaagaatacggtgacttttgaagatcgtcttcagaaattgccacccttaagcacccaaatttcgaaccagtacgccaaggtagcaccagctgagaacaatatcgccttacactttcataacttacctacaccagtatcaaacactcaaacgcctgttacgtttcagtctgaatccggactgacagggggagaaaagaaaatgccttttttgagaagagcatctagtgccctattaagaaagacatctgctaaaaattgctccaatttaaccagaacaaatacacctactttatcgacatcctcaacatttgagtcagatctaaatgctcggcagcccatgctaattcgacgatcttccactattgataataaactacctaggaggcagctttcgtgctcgaagctttattcgcgcctcaattcggacagcaagtttgcgaatagcagtcgagcttcggaggaggtcttagtgtccactccaaatgacacagaacacgtctacagaaagacatctctaggttctaagataaagagaggttttactagaatattgagcgacagtaataatagtaaggaaattctcactttatcacccaaatctatggtgactacggggcctacagaattgtcgttttcctctttatcaaccgtgggaggacatccgacaacgccagtctcaaaagaaaatgatcgagtttcaatagatggcgtgagtacatttaatcgagcatcaacatctcttccacaatcatcaacagacgacatctctccactacgcgaagaaggtaagattaatgttcctaaaagaacgtcaagtagaaagatactgtctaaaaattcaagcaaaaaaaatgtactgcctgaacagcaaacaaagccaagtgaaatatatctggataaagaagccttacaaaattttgttcccgtactctctgtcacagaaggtactcatcgcatcaatcgctcgtcgttacaaacgcaatctaccatcggactatgcattaccaatttaagaaacaaagaaggcatgaagctcaatgccaaggaatacgtggaaatcctggctcagcagcaacgcaaggaagatgaaaggtatgctgttttggaaagaaaatttgcgtcttgtagatggtgcagtgataaggacctgcagtatttgaaaaagaaacgaatttccatgaataagatatggtctgattatgtccgattttaccgtggaaagttgaacaacccatga

SEQ ID NO: 78522 - DNA, 303 bp, Saccharomyces pastorianus
atgcgtgtttaccaccatatatacgtgtatacttatattttgtctgccgttatatatagccaagacctttttccttcatgggttgttcaactttccacggtaaaatcggacataatcagaccatatcttattcatggaaattcgtttctttttcaaatactgcaggtccttatcactgcaccatctacaagacgcaaattttctttccaaaacagcatacctttcatcttccttgcgttgctgctgagccaggatttccacgtattccttggcattgagcttcatgccttctttgtttcttaa

SEQ ID NO: 78523 - DNA, 1611 bp, Saccharomyces pastorianus
atgatcatgttgagaataccgacacggtcttattgttcaccttcgaagctaataaagggcgtaggtctctcaccattgaagaaatctctattatccaagaaaataaaggaagatatccatccttctttacctgttagaactaggtttgcgccttctccaactgggtttttacacttggggtcactgagaacagccctttacaattacctattagcaagaaacaccaatgggcagtttttgcttcgtttagaagatacagaccagaagaggctaatagagggagcagaagaaaacatctacgagattctgaaatggtgtaacataaactacgatgaaacccctataaagcaaagtgaaaggaaactaatatatgacaaatatgtaaaaatattactatcttctgggatggcgtatagatgtttttgttcaaaggagcgattgaacgatttgagacactctgcaatggaattgaaacctccttcgatggcaagctatgatcgatgttgtgcacacttaggggaggaagaaataaaatctaagctagcgcaaggtatacctttcactgtgcggtttaaatcgccagaacgatatccaacgtttactgatcttttacatggacaaataaatcttcaaccgcaagtaaactttaacgataaacggtacgatgaccttatccttgttaagtcggataagttgccaacctatcatctggcaaatgttgtggatgaccatttgatgggaataacccatgttataagaggtgaggaatggctgccctctactcctaaacatatcgccctatataatgcatttgggtgggcttgcccaaagttcatccacattcccttattgacgacggttggtgataagaaattgagtaaaagaaaaggtgatatgtctatctcggatttaaaaagacagggagttttgccagaagctttgattaacttttgtgcgctatttggctggtctcctccaagagatctggcttcgaaaaagcatgagtgtttttcaatggaggaattggaaaccatttttaatttgaatggtttgacgaagggaaatgccaaagtcgatgataaaaaattgtggttcttcaataagcattttttgcaaaaaaggatacttaatccttctacattgagggagcttgtcgacgacattatgccttctttagagtccatatataacacatctaccataagccgtgagaaagtagctaaaattttactgaactgtggtggttctctatcaaggattaacgattttcatgatgaattttattatttttttgaaaagcccaaatataatgataatgatgctgtcacgaaatttctaagcaagaacgaaagccgccacattgctcacttattgaagaagcttggacagtttcaagagggcaccgatgctcaagaagtcgaatctatggtcgaaacgatgtattatgagaacggtttttctaggaaagtcacgtatcaggcaatgagatttgctcttgcgggatgtcacccaggtgccaaaatagcagccatgatagatattttgggcatcaaggaaagtaacaaaagattatccgaaggtttacagttcttgcaaagagagaaaaagtaa

SEQ ID NO: 78524 - DNA, 1266 bp, Saccharomyces pastorianus
atggtccggattcttcccataattttgagcgccctatcttcgaaattagtggcgagtacaatattgcattcatccatacactcagtgccatctggaggcgaaatcatatctgcagaagatcttaaagaacttgaaatttcagggaattcgatctgcgttgataatcgttgctatcctaagatatttgaaccaagacacgattggcagcccatactgccaggtcaagaactccccggtggtttggacattagaataaacatggacacaggtttaaaagaggcaaaactaaatgatgagaagaatgtcggtgataatggtagccatgagttaattgtatcttcagaagacatgaaagcatcgcctgatgactatgaattttccagtgatttcaaagaaatgagaaacatcatagattctaacccgaccttatcttcacaggacattgccagattggaggatagttttgatagaataatggaatttgcgcatgattacaagcacggctacaaaattattacccatgaattcgccctcttggccaaccttagtctcaatgaaaatttaccattaacattgagagagctcagtactagagtcattaccagctgcttgagaaacaatcctcctgtagttgagttcattaatgaaagttttccaaattttaaaagcaaaatcatggccgctctgtcaaatttgaatgattctaaccacagatcctctaatatcctaataaaaagatacttgtccattttaaacgaattacctgtcacatccgaagatcttcctatatactctacggttgttttacaaaatgtatatgaaagaaacaacaaggacaaacagttacaaataaaagtcctggagttgatcagcaaaattttgaaggccgacatgtacgaaaatgacgatacaaatctaattttgttcaaaagaaatgctgagaattggtcgtcaaatctgcaagagtgggcaaacgagttccaagagatggtccagaacaaaagtatagatgaactacatacaagaacgttttttgacaccctttacaacttgaagaaaattttcaaaagtgacatcacgatcaacaaagggtttttgaattggttagcgcaacaatgtaaagccaggcaatctaacttggacaatgggctccaagagagagatactgaacaagactcatttgataagaaacttatcgacagcagacacttgatctttggcaaccccatggctcatagaataaaaaatttcagagatgaactctga

SEQ ID NO: 78525 - DNA, 1470 bp, Saccharomyces pastorianus
atgttactacgttctcttacaagtgccttcgttttgagtgctggtttggctcaggctgctagcagcagtaacagttccacaccatccattgaaattaaaggcaatgcattttttaattcggaatcaggtgaaaggttttatattcgtggtgttgattaccagcctggtggttcttctaacttgactgatcccttagcagacgcatctgtctgtgacagagacgtccccgttctgaaagatctagggataaatactgtcagagtttatactgtggataactcgcaagatcattcccattgtatgaaactattgcaggagaacggtatatacttgatcctggatgtcaatacccccacgagtgctatttctcgttacgatccagcctgctcctataacgctgactacttacaaaatgtctttgccaccattgatacctttgctgattacgacaatgttctaggttttttcgctggtaacgaggtcatcaatagtgttaatactaccaacactgctacttatgtcaaggcagtggtcagggacatgaagaaatacatcaaggctagaaaatacagacaaattccggtaggttactcggctgctgatatcgtcgctaacagacaattggctgctgaatactttaactgtggtgatgaagctgacgctagaatcgacatgtttggtgttaatgactattcttggtgtggtgaatcttcatttgtggtatcgggttattccaccaagatgaagctatatcaagattactccgttcctgtcttcttaagtgaatttggttgtaaccaagtcaagagctctcgtccattcacagaaattgaagctatctattccactcaaatgtcttctgtattctccggtgggctagtctacgaatattccaatgaaactaacaattacgggctcgttcaaattgatggtgacaaggtcactaaattgacagattttgaaaacttgaaaaatgaatacagcaaagtatccaacccagaaggcaatggtggttacagtacttccaacaactattctacatgtcctgattatgaaaagggtgtctgggaagctaataacactttgcctgctatgccaagtgctgcttctgcttacttcacatctggagcaggttctcctatgggaaccggaatcgccacccaacaaagttgtgatgctaaggacgatgacgacgaagaagacgacgacacctcctcttcatcctcttcttcctcttcatcttcatcttccgcttcttcatcttctgcttcttcatcttctgaatcctcatcctcggcttcaaaggcatcttcctcctccccttccgctagcgaaacgagcttgctaaaatctgccgcatctgctacttcgtccagccaatcgtcctcgaaatcaaagggtgctgccggaattattgaggttcctttgatattccgtgctttggcagaactttataacttggttttatga

SEQ ID NO: 78526 - DNA, 738 bp, Saccharomyces pastorianus
atgagtcaacgaaggtctgtagtagcagttagcgtaaagcccaaaggcttcaaattggggcataaacagggttccatgtctacgacgtctccacctccatcctcaccagatggaaatgtgagtacatcaggaccgtcagctattaagttatccaagaattgggagttaccacagcgcctaaaaccgggccgcaaaccgaaatccaagcgcggggatgcatcagctaataatgatggatcgtccaagataaagaaggttcaaacttccaaccagaaagaccaaatgaccacaaaagatcatgagaacgaaggcgcaaaaggtcacgggggaaaatctgatgatgaaggcaacggaagtggtgatgaaaacggtgtcgatagcgtggaaaagcgaaggaggcaaaatagagatgcgcaaagagcatatagggaacgcagaacaacaagaatccaggttctggaagaaaaggttgagatgctacacaatttggtcgatgattggcaaaggaaatataaactgctggaatctgagttttccgatacaaaggaaaacttgcaaaaatcaatagcattaaacaacgaattgcaaaaagccttgcctttgattgttaatactccatttcaacagcagccagagaacccgccagacaatcctatttcgatattagaaatggtagaaaacttcaaaccaatcggcgctgtcagtttaaaaaaaggaaagctgaaggcccattgttaa

SEQ ID NO: 78527 - DNA, 342 bp, Saccharomyces pastorianus
atgacagaggttgtgggattctgggagagcgtgtcagatgacgaatcagaagacaaagactgtatggaggtgcagaacacagtgagtgccgatgagagcccacttgtgcagagccttgtatcctttgtaggctcgtgctccatcaacctacttttgcctttcctcaacggcatgatgctcggcttcggcgagctatttgctcacgagctctgctggagattcaattggtttaaccatagaaacaaggggtataaggtgtacccagagtcgcgcaaaatagcagcattgaaagagatttcaagccctggcacccgtgggagggttgcgtccaagttcctttaa

SEQ ID NO: 78528 - DNA, 519 bp, Saccharomyces pastorianus
atgtcaaaactatcgtcttatcctcatgctgccgattttataaatatggaagaaccgccaaaatctaaagagtttttcgatgatctttgtgccgtccctaatttactcaaaagacgttttccaaactctcgaagatcgacgcattattgtgaggctttaaattattctaggaaaaagcttcctgttgtgttgtctaaaatgacactgcaagagttgaggcacaatatgtcaacattttttttgcaggaaaaggatcaaataaatatttatgacacctgtaaggtgatagacatgggagaccgtgtcttggtcgaaactatgcctccacagccaagagatttatttgaaaaattgcatgcaagtaaaacaaatttaatagttgagacagcagctttggatgaacccctacttacagtaaaagcagagctacagtcatcttcctttccacaaaaatcaagcctatttctgtatgaggattataaaaaatttatttatcaacaactagatatgtttagttaa

SEQ ID NO: 78529 - DNA, 2031 bp, Saccharomyces pastorianus
atgctcagaagacacggattattctggttaaagacatgtccccgtctaaatgttcttctaaatcaatccataccgatacctcatttacttcatagccgtgatatttgccagcaaagatggtatgcaaaagggaaaagaaggaaccagatttccaagaaagagttaaagcctctcaatttttctattccgaattatatttctgtaaataaattagccaatttgttaaattgtcgtgtggaaagattaatcaaagatttgacagcattaggtttcgaaaatattacaaccacgtatatattatcaaaagaatacgtcgaattgattttacaagaatacaactttgcccttccgaatctgtcaacgtctacaaatttagataatgtttatgatgagctaaaatctcctgtaaacccaaaattattaaccaaaagagcccccgtggtaactataatgggccatgttgatcatggtaagaccactatcatagactatctaaggaaatcttctgttgtggctcaagaacatggtggaatcacgcaacacattggtgcctttcaaataacagctccgaagtctgggaaaaagatcacatttttagacacccctggccatgctgcctttttgaaaatgagagaaagaggtgcaaatattactgatattattgttttggtggtatctgtagaagattctctgatgccccagacattagaagccataaaacatgccaaaaattcaggaaatgaaatgataattgcaataacgaaaatagatagaattccacagccaaaagaacgtgaaaaaaaaattgaaaaagttataaatgatttgattgttcaaggaataccagtagagaaaattggcggagacgttcaagtgatcccgataagtgccaaaactggtgagaacatggaccttttagaggaatcaatagtcctattaagtgaagtaatggatataagagctgaaaactcccctaaaactatcgcagagggttggattatcgaaagtcaagttaaaaaacaggtcggaaatgtggcgaccgtcttggttaagaagggcactttacaaaaagggaaaattctaatttgtggtaatacattctgcaagatcaaaaatttaattgatgataagggcataccgattcttaaggcaacaccatcatatgctacagaggttcttggttggaaagatgtaccccatgttggagatgaggtcattcaggtaaagagcgaagcgatcgctaaaaagttcatcagtaaaaggcaagatcttatcgaagttcaaaaaaactctagtatcgttgaaaaattaaatgaagaaagggcccttgccaaagagcaacacctaaataaggaattggaacatgagaatactgtccaggaacacgaacaaaatactggtcctaaacttattaattacatcatcaaatgtgatgtctctggctcagcagaagcggtttcagaaagcatttcctctctaggaaatgacgaagtgagatgtaatgttatctcttcttctgttggtatacctacggaaagtgacttaaagatggcgcaaataacggagagtacaattctatgcttcaatttggggaatttgccgagtgaggtgatcaacaatcgtgctggcatcaaaataaaacagtacaatgttatctataagctaattgaagacgtcactgaaacactaactgaaaatctaaagcccatctttgaaaaaaagatcgtttcaactgttgacgttcgtgaaacctttgactttagattaaagaaaaaaattattaagattgcaggttgcaaagtaaacaacggtgtcatcaaaaaaaattcattggtgcaggtagttagaggtcctaacgaagatgtaatttttgatgggaaaatctcaactttgaagcacaataaagatgacgtagcagaagtttcaaaagggcatgaatgtggaatcacttttgagagtggattcgagggtttcaaaccaggtgataagatcctagtttatgaaaacgtgcgagttcctcgttacttgtaa

SEQ ID NO: 78530 - DNA, 1227 bp, Saccharomyces pastorianus
atgtctaaaatagaagagctaccaccatcagatactgatgaccattcgtattctagtaaaccgggagatgtatttttagcatttgtggacgcacctgttaaagagactgatgacatattagttgaagatagctttattggcggtgaacctaagtggctacatccggattctgaaccacctgctgaactattgaaatgtggtgcttgtaaatcagcggataatatgaagctgttactacaagctttttcgcccttagatgatgagcagatgagtgccatacaacaacgtcttggtatcaataatatgagctatattaatccccaggatgacagagtattatatgtcttcctgtgtaccgaatgtcaaaggaagggcaattctgttcgctgtatcagaggagtaaagaagaataaaaacgttgatagcctttccgaaaaaatggcttcaacttcattggaaaaagacttccaaatcaatccctttgacttgtcgaataattcagattctaaatgtaatgctttttcaagcaacccatttggcggtgcaaatgctaacccttttggagctgatagcattaattccaatatatcacaaagcaaggacgaaggcaaaaagaaggaatctgctaccgtttctgcaaagacggcgagaaaactacatgatttacaaaaggacaaagaatacgatggcaataaatgctttaaaagttgtttgttgtacgttgaagaggaaaccttcaaaaataaaaagccagctcatctgcagctgccaaaaaatttaaaaattgataaggaggcactagatttaacaggagatgaggatctcgaaaaagatccgatcaaattggacccgaggacagaaaaattatccaagtttcttgatgacgacacattccaaaaattccaagaagtggttggttacaacccgcttcaagtattacgttatgacttaggcggaaaacctttgctatatgccgaaacaaaagtcgatattttaagcactgtgccaagaccgggctacaacccatcgagccaaagaatctttgaaatgcagttaatgccaaagatgatttttgatctggaagaagtagtgtctgtcgataacggcatggaatggggtaccattcttgttttcactgatgttgaaaattacatgcctgaatttgatgaacatggtgtcggttatgtagaagaatgtgtcaaagttcagtgggaatcgagaacgtga

SEQ ID NO: 78531 - DNA, 1779 bp, Saccharomyces pastorianus
atgaccgaagactttatttcttctgtcaagcgttcaaatgaggagctgaaggagcgaaaatctaactttggatttgtagaatacaaatccaagcaattaacatcatcctcatcacacaattcaaactcatcgcatcacgatgatgaccaccaacacggcaagaggaatattttccagcgatgtgttgattctttcaagtctcctctggacggctcgttcgacacaagtaatttgaagaggactctgaaaccaaggcacttaatcatgattgccattgggggcagtataggtactggtttgtttgtcggtagtggtaaggcaatcgccgaaggtggtcctcttggtgtcgtcattggttgggctattgcaggctctcaaatcatcgggacgattcatgggctaggtgaaatcacggtgcggttccccgttgtcggggcctttgccaattacggcacaaggtttttggatccaagtataagttttgttgtttcgaccatatacgtgctacagtggttttttgtattacccttagaaatcattgcggcggcaatgaccgtacagtactggaactcgtctattgaccccgtaatttgggtagccatcttttatgctgttattgtttccataaatttgtttggtgtacgaggttttggggaagcggaatttgcattttccaccataaaagcaataacagtttgcggattcattatattgtgcgttgtcctcatttgtggtggaggtcccgaccacgagttcattggcgccaaatactggcacgaccctggttgtttggccaatgggtttccgggcgttctatctgttcttgttgttgcttcgtattctctcggtggtatagaaatgacgtgcctggcatcaggtgaaacggaccccaaaggcttaccaagtgctatcaagcaagtgttttggaggatcttatttttctttttgatatcactgaccctggtaggattcctggttccatatacaaaccaaaacttactgggtggttcatctgtggacaactcaccttttgtcattgccataaaattgcatcacattaaagccttgccctccatcgtcaatgcggtcatccttatcagtgttttgagtgtaggtaactcctgcatcttcgcttcaagtagaacgttgtgttcgatggcccaccaaggccttattccatggtggtttggttatatcgaccgtgctggtaggccactggttggcattatggcaaattcactatttggattactagcatttctggtcaaatctggctcgatgtctgaagttttcaattggttaatggccattgccggcctggccacgtgcattgtctggttgagcatcaacctgtcacatatcagatttagactggcgatgaaggctcaagggaagtctctggatgaattagaatttgttagtgctgtcgggatttggggatcagcgtattccgctttaatcaactgtctaatcttgatagctcaattctattgttcactatggcccattggtggctggaccagcgacaaagaaagggctaaaatattttttcaaaattatctgtgtgccttaatcatgttatttatattcatcgtccacaaaatttattacaagtgtcaaacaggcaaatggtggggggttaaggcgttaaaggacatagatttggaaaccgatcgtaaagatatcgacatcgaaatagtcaagcaagaaattgccgaaaagaaaatgtacctagattcccgtccatggtacgtgagacagttccatttctggtgttaa

SEQ ID NO: 78532 - DNA, 153 bp, Saccharomyces pastorianus
atgtctaacacctttgttgcagtcgaattctcgtggctgtacgcaatttctcttatcctaccgtgtgaaacaattcgcgtcgcgtgggcgccgaaaagggcttatcacggcacatctgaagaaaagagacggctggctccagctggtatttag

SEQ ID NO: 78533 - DNA, 1656 bp, Saccharomyces pastorianus
atgaagaaaaattcttcggtagttttcttccttgtgggtctatcacaattcgtcactatggcgtttctcattatcggatccattacggctccaattttcaaacaaataggctattctaaatatgatgagatcacatacggtacattcggctactgtaaagagggctcctgctcaaaagcaagttataattatcaccccgatgagctatcagacagtgatagcaactggaaactcaatagcaacgctaggtctatattggggaaaatcatctttatcacacccattgctgctggtcttaattttttgggatttctttgtaccatcatgagcgttttattagttaacgtgctatccagtgatagagttggtagtgcctctgccatcatgttttttgttaatttgacattttccactctaggctttctttctgcttctttgatatgtatcgtggtatttttactgttttacccacatgaaacctggtgttcatgggtcctgataccaggagctgctttatctctactagtaattcctttgatattctcagcttattcaagaagctcaggctcaagggatgatgacgaaaccgaggaactggaagaaaagggcatgctgctgaatgacccatatctaagttcgaagtccgggagattcgatatcgacgctgatagtgaggccaatctccgtggtgattcaagaacgaatttattgggtgacaattttaagaacggtactaatatcactgttgtcccaaatattatttcacacaatcaagatccgaaattatcaaacataaccacttctaccacgtctgatatttctactttcgacaaagaagcaaaggacatggaaaattcaaatggttccggacttaatgaagaagaggacgatggcatggcatatgacaaaaggaggtcaacttcaacgtattctgtcattgaaagtgaaagtggcttgaaaaatgggagtgtttctaataattatgtgagaaacaatggtagtaacaccagcaacaatataaactataaagttccgctaggaaaaacggaaatatcatccagtgcatcattagcgtcctcagactactctcaaagagaggtcataccgcacagaaatccttcgagactactaaacgacatcatggagacttccttcaatgaaccaaacgatagccacatcaacagcatgtcctcctacaacgataaagattcaacgttgacttcaatatcacagagaggtgtcaatccggaagtatacaatcaaatgcctcgagaaacagccgctggtcctgcaaatataaggccgtacgctggtcagccacacccggcgccattagtgtatccccaacaacgactacaaccgcaacaacaccaaccacagcagcaatatcatcaatacaatttatatcaaagaactactcctgctggtccagatccttctaatgttattttacaaagcaatccttatttcaacgttgccccaaaccaagtgccacagcacagaaatccggtaccaggcgtcggttttgctccgaatcctttaccaaaccaaagcccgataacacaaggatataagcctgcctataagaggagaatgcaaaacaaaaacttgccccgagctactacttcactgaacaatccttacggatttaggtaa

SEQ ID NO: 78534 - DNA, 1194 bp, Saccharomyces pastorianus
atgtttagagatagaactaatttatttttatcataccgtaggactttccctcataacataactttctcatctgggaaggcacccttgggcgatgatcaagatattgaaatgggtacatacccgatgatgaatatgtctcacgatatatcggccagattgacagatgaacgaaaaaacaagcatgagaatcacagtgatgcgttaccacccatatttattgatatagcgcaggatgttgatgattatcttctggaggtgagacggttaagtgagcagttggcgaaggtttataggaagaattcgttacctggctttgaagacaagagtcatgatgaggcgctgattgaagatctaagtttcaaagtaattcagatgctgcagaaatgttacgctgttatgaaacgattaaagaccatatacaactctcaatttgtggatggtaagcaattaagtcgagaagagctgatcatactagataatttacagaagatttatgcagaaaagatacaaaccgaaagtaataagttcagagtattacaaaacaattacttgaaatttttgaacaaggatgatttgaaacctatccgcaataaggccagtgccgagaacacgctattattagatgatgaggaagaggaggcagcaagagagaagagagagggtctcgatattgaagattactcaaaaaggacgttgcagagacagcaacagcttcatgacacttctgcagaagcatatttgagagaacgtgacgaagaaattactcagttggcaaggggtgtattagaagtgagcactattttcagggaaatgcaagatttggttgttgaccaggggactattgtggacaggattgattataatctggaaaatacagtggtagagctaaaaagtgcagataaagagttgaataaagcaacacactaccagaagagaactcaaaaatgtaaagtcattttattactaacattgtgcgtaatagcgctctttttctttgttatgctgaaaccacatggcggtggcagtggtggtcgtaataatggtagcaacaagtacaacaatgacgataataaaacagttaataacagtcatgatgacggcagtaatacccatattaatgacgaagagagcaacttgccgagtatcgttgaggtaacagaatctgaaaatgaagctttggatgacctactttga

SEQ ID NO: 78535 - DNA, 1344 bp, Saccharomyces pastorianus
atgcccaaggagtcagaggtcataaattctgaatttcatgtagatgtccaagatccagagcgtctaaacggccaccctgtagcaaaatttatcaataaattaagcggtcaacctgaatcttacgtcaacaggactaattatattttcggtcgaacactgggtgccggttccttcggtgttgtgagacaagccagaaagttgtccacaaatgaagatgttgctataaagatcttattgaagaaggcattgcagggaaacaatgtgcaattacagatgctgtacgaagagctgtccattcttcaaaaattgagtcatccgaacattgtgtcattcaaggattggtttgaatcgaaggataagttctatattgtcactcagctggcaacaggaggtgaattatttgatagaattctgtctagagggaagttcacagaagtggatgctgttgaaatcatagttcagattcttggtgccgtggagtatatgcattccaagaatgttgttcatagagatttgaaacctgagaacgttttgtatgttgataagtcagaaaattcgcctctggtaattgcggacttcggtatagctaaacaattgaagggggaggaggatttgatatacaaagcagccggatcgttgggctatgtggcaccagaagtcctcacacaagatggacatggtaagccttgtgatatatggtccattggtgtgatcacatatactttactgtgcggttattctccttttattgccgaaagcgttgaaggattcatggaggaatgtacagcttcgagatacccggtaaccttccatatgccatattgggataacatatctattgatgccaagcgtttcatcttgaaggcattgagattgaatccagctgacagaccaactgctacggaattgctggacgatccatggattacttcaaagagagttgaaactagtaatattttaccagacgttaagaaagggttttctttgcgtaagaaattacgtgacgctattgaaattgtgaagcttaataatagaattaagagattaagaaatatgtattcattaggggacgatggcgataacgatatagaagagaattccctcaatgaaagtcttctggacggcgtcacacattcgttggatgatttacgtctgcaatctcagaagaaagggggagaactaacagaagagcaaatgaaattgaagtctgcattaacaaaggatgcctttgttcaaatcgtcaaagctgcaacaaagaataaacataaagttttggctggcgaagaggaagacgatagcaagaaaacactgcatgatgatcgggagtcgaagtcagaagactaa

SEQ ID NO: 78536 - DNA, 1761 bp, Saccharomyces pastorianus
atgttcattgaatactctagattaccaggtttcgaaagcatcaatatatcattttctagaggcatgctaagattggctaaatttactaatttcgctacatacaaacaaaaattagagtacttcaggctgttggcaggttcaaacaaatacatccaacgaatcagcgttgctgactttgagagacatccagatgaaatcaattatatttacattatactaatatctattctccaaatggaagagtgtatgccagtcctagttctatgtccaactgtttattgggtacgattccactggcctggaaaatgttccgtgaacagtttgaactttacgaatgaaacgttgaaaagcgctttccatgctgtcttcactccctattttgcactaatgaaaaaagttcttggaaggattaaaaacaacatgttgctatttgcagaacctcatgcaaatttaaataatttgtttgtcaagcatttccacgatctcatatataagagcgtaaaggatgaaaaaaccggcgaggcaattctatatttgagaactaacgttaatgttccaaatgtttttattgacgataaaagagcagtttttcatggtgacggtatgaaaattggaaaatttaccggcaaatttttatgcttttccttcaaacgaacaataagatggtcaaaattagattcagtggattcttttgcggttacgacagtaaattatagagtatctgtaaattgggaaaagacgccaagaaagactttcctttctctagacagtgacaccaaaaatttacactatatatcgaaaaagatattgaataaaaagggaaagaacgccactacatcaaaaacaacaaaaagttcatgcacaagtgagaacgtttgcgatgataaaacattctccgtcgaattcccacttacaacgtcagcaaaaactgaatatttgttgagaagtaatttttctttagaaaaaattaatgaaaacaacaatcctacccttcaagaacttactttaaaccgtacacatcgcttataccgatcaaattttcgcaatgaacaaagcaccacacagaggaagtttgaaaaaatcggtagaactgtctctactgattcaggcaataaactgcttacgtttccggaacaaaaggccacgagagatagtagccccttctcaatcgaattgacacatgcaacagtaatttccagcgacgaaagtgccttaaaagacactactagtcaagcgatagccgaaatgcaacgtataactcctgctattgcaaagacaatctcgagaagaacagcaaattgggtctgctcaaacccagctcctgatccgtatggggaaccttcaacgtggtccagaattttgacccctaatttgaaaataatatcggaatcatcaccatattatccagtccatctagcttcaccaaattctacctttagtagagatcaaagtgtaagaagtgttgtcatgaggagaagttctgtatgtgttgaaaaacaaaatagtttcttcagaaattacgaacatttcaaaaatatattgtcgagaagaattattaaggttaagacatcatgtcctaggctgagcgttgacgtaagtgacaacaaaagagaaaatttatcacaagaacacctcattttaccgaacaaatctagagaaaaagtcaaccgatttaaaaattgcctacatagagttgcagaagcgctcagagctgccaaagaaaactgggatcagcacaatcccaggaactctattcattaa

SEQ ID NO: 78537 - DNA, 291 bp, Saccharomyces pastorianus
atgagtgattttgagataattgttggaatttcatcgttgttacaggttataatattaaatatacaaaatatgctggaagttcttcttgagtatataggaattcacaaaaggagagtcgatatatctacatattatgataatgtttacttcttcttccattttatatgttatcattcattatcctattgcattatcaatcttaggaattctgcttcctttatatgtgattgctgttccttaatcattatgtcaccttcctatgccgtatgtgataatatactagtaacatga

SEQ ID NO: 78538 - DNA, 1656 bp, Saccharomyces pastorianus
atggtgccagaaaatagaaggaaacagttggcaatttttgtagttgtcacatatttgctcacattttattgcgtgtattcagccaccaagacaagcgtttcctttttgcaagtaacactgaagctaaatgaaggcttcaatctaatggttttatcgatattcatcttattaaattctaccttactatggcagctcctaacgaaactattatttggtgaactgaggcttattgagcatgagcacatttttgaaaggttaccatttaccattataaacaccttgtttatgtcctcactgttccacgaacggtattttttcacagtggcattttttggactattactactctatctgaaagttttccattggattttaaaggataggctggaggccttattacagtcaataaatgattccaccacaatgaaaacccttatctttagtagattctcatttaacctcgtactattggcggttgtagactaccagataataacacgatgcatctcctccatatatacaaaccaaaagagtgatattgaatccacatccctttacctgatacaagtaatggagtttaccatgcttttgattgatttgctaaatttattcctacagacttgtttgaatttctgggaattttatcgctcacaacaaagtctgtctaatgagaacaaccatattgtccatggcgatcctacagatgaaaacacggttgagtctgatcaatctcagccagtgctgaatgacgacgacgatgacgacgatgatgatagacaatttaccggcctggagggtaaattcatgtatgaaaaagcaattgacgtattcacaagattcttaaaaacggcacttcatttgtctatgctaataccatttaggatgcctatgatgcttttgaaagatgtggtgtgggatatctcggcactatatcaaagtggcacaagtttgtggaaaatctggagaaataacaaacagctcgacgacactcttgtcactgtcaccgtagaacagctacaaaattctgcaaatgatgacaatatttgtatcatttgtatggatgagttaatacattctccaaaccagcagacgtggaagaataaaaacaagaaacccaaaaggttaccttgtggccacatacttcatttgtcgtgtttaaagaattggatggaacgttctcagacttgtcctatttgtagattgcctgtctttgatgaaaaaggtaatgttgtgcaaacgactttcacttccaatagtgatatcacgacacagaccaccgtaacagatagcactgggatagcgacagatcaacaaggtttcgcaaacgaagtagatctacttcccacaagaacaacttcccctgatataaggatagtgcctactcaaaatatagacacattagcaatgagaacaacgtcaacctctacaccatctcctacgtggtatacgttcccattacataaaactggtgataattctgttgggtcaagtcgatcagcctacgaatttttgatcacaaattcagatgagaaagaaaatggtattcctgtcaaattaacaatagaaaatcacgaagtaaattctctgcatggagacgggggcgagcaaattgccaagaaaattgtcataccagataaatttatccagcatatctag

SEQ ID NO: 78539 - DNA, 405 bp, Saccharomyces pastorianus
atgtcaggaaaagctcatggatttacaggtaaatccggcgctaaagacagtggttcattaagatctcaatcttcttcagcaagggctggcttgcagtttcctgtcggtaggattaagcgttacctgaaaaggcacgctaccggccgaacaagagtaggatccaaagctgccatttatttgactgctgtgttggaatatctgactgctgaagtgctggagttggctggtaatgcagccaaggatcttaaagtcaagaggattaccccaagacatctgcaattggccattagaggtgacgatgagttagattctttgatcagggctacaattgcttcaggtggtgttttgcctcatataaataaagcattattattgaaagtggaaaaaaagggaagtaagaaataa

SEQ ID NO: 78540 - DNA, 2061 bp, Saccharomyces pastorianus
  modified_base (1272)..(1272): a, c, g, t, unknown, or other
atgatacgtccattatgttcaaaaatcattatcagttacatattcgcaatttctcagtttctactggccgctaatgcgtggtcgcccacagatagttatgttcctggcaccgtgtcgtgtcccgatgacataaatctggtaagagaggctacgtctatatctcagaatgagagcgcatggttagaaaagagaaataaagtcactagtgtagctttaaaagatttcttgactagagctactgcaaatttttcagatagctcagaagttttgtcgaagctatttaatgatggcaacagcgaaaacctgccgaaaattgctgtcgccgtttcaggtgggggctatcggtccatgctaacaggtgcgggtgttctagcagcaatggataacagaactgaaggtgcttatgagcatgggctgggtggacttttacaaagcacaacatatttatctggtgcctcgggcggcaactggctagttggtacattagccttgaacaattggacatccgtgcaagacattcttaataatatgcagaacgacgattctatttgggatttgtcagattctattgttacccccggcggcattaatatattcaaaacagccaaaaggtgggatcatatctctaatgctgtcgaatctaagcagaacgccgattacaatacttctttggccgatatttggggcagagccttggcgtataattttttcccttctctaaatagagggggtataggcctgacttggtcttccattagggatttcccagtgtttcaaaatgctgaaatgccttttccaatttctgttgcggacggtaggtatcctggaacaaaagtcatcaatttgaacgcaacggtttttgaatttaatccctttgaaatgggatcctgggatccctctttgaactcttttgccaacgttaagtaccttggaacgaatgtctccaatggtgtaccattggaaaggggaaaatgtaccgcaggctttgataatgcaggttttatcatgggtacttcctccaccttatttaaccagtttcttttgagaataaactccactcacttacctagtttcatcacaagattagcaagacattttctaaaggatttatctcaagattttaatgatatcgctgtttacagtcctaatccatttaaagacacgaagtttttggatagtgactatacgacaagtattgttgattcagacagcctattcttagttgacggcggtgaagacgacgaaaatgttcctgtgttaccgcttatacanaaggaacgtgatgtggacattatttttccggtagataattctgccgatatgagattggcttggcctgacggttcttctttagtccatacctatgagcgtcaattcgttaagcaaggtcaaggtatgtccttcccatatgttccagatacgaatacattcgttaatttgggtttgaacaagaaaccaaccttcttcggttgcgatgctaataatttgaccgatcttcaatatattccacctctagttgtttatctgccaaatgcagaatactctttcaatagtaatcagagcgcgttcaagctatcatattccgaatcccaaagaagaagtatgattcaaaacgggtttgaaattgcaactaggaacaacttcactgatgatcctgaattcatgggctgcgtcggctgcgccatcattagacgtaagcaacaagctttgaatattactttgcctccggaatgtgaaacctgttttaaaaattattgctggaatggtaccctggatactaccccattaccagatgttgaaaaggatgttcaccactcctttatcaacgtcaatagcttcaacagctccataggacaagaagaaagtctttacgccggatcttcagcttcccagtcatcgtcttcatcttcgtcttcatcttcgtcttcggaaattccttcggctactgcaacccttgagaaaaaggcagctactaattctggatcacatttatctggcataagtgtaaagttctctgctatgattatgcttactttattgatgtttaccggagcagtataa

SEQ ID NO: 78541 - DNA, 1104 bp, Saccharomyces pastorianus
atgtcatcttccgcccccatatacaccactttccaagggtcacaaaattttaggttacggatcgtcttggcaacattatcagggaaaccaataaaaattgaaaaaatccgttcaggcgacttaaatcccggtctgaaagattatgaagtgtcttttctaaggctgatcgagtcggtcaccaacgggagtgtaattgaaatttcttataccggtactactgtgatttataggcccggtatcatagttggtggtgcatcaactcatatctgccctagttccaaaccggtaggttatttcgtcgaaccaatgctatatttggctccattttcaaaaaagaaattttctatattattcaaaggcataactgcatctcacaacgatgccggtattgaagctatcaaatggggactcatgcccgttatggaaaaatttggcgttagagagtgcgccctacatactttgaaaagaggttcaccaccactaggaggtggcgaagtgcatttggttgttgattctttgattgcgcaacctataactatgcatgaaatagataggcccataatttcatcgattaccggtgtagcatactctaccagagtaagtccgtcgcttgtgaatagaatgatcgatggtgctaagaaggtattgaaaaatctgcaatgcgaagttaacataacggcagatgtctggagaggtgaaaattcagggaagagtccaggctggggtattactttggttgctcagtccaagcagaaaggttggagttattttgcagaagatatcggtgatgcaggttctatacctgaagaacttggtgaaaaagttgcctgtcaattattagaagaaatatcaaagagtgcagcagttggtagaaaccagcttccattagcaattgtttacatggtcatcgggaaagaagatatcggcagattgagaattaataaggaacagatagacgaaagattcataatcctcttgagagatattaagaagatctttaatactgaagtctttttaaaaccagttgacgaggcggataatgaagacatgatagctactatcaagggtattggtttcacaaacacaagcaaaaagattgcatag

SEQ ID NO: 78542 - DNA, 816 bp, Saccharomyces pastorianus
atgtcttttgatattaattggagtacattggaatctgacaatagactgaatgatcttataagaaaacatctaaattcatatttacaaaatacgcaactaccaagctacgtaagtaatcttagggtactagattttgatctgggaaaagttggtcctgctataacactgaaagaaataacagatcccctagatgagttttatgattcaattagagaggaggctgatcaagagacggaggaaaataatgacaacaaggaggacagcgaacatgtttgtcctgatcgtactatagctaatcatgaaggacctaaagatgattttgaggcgcctgtggtgatgccatcccccaacgatatacaatttttactagaggtcgagtacaagggtgacttactcgttacgattggtgccgaccttgtgctgaattatcccgtagaaaaatttatgactttgccagtaaaactttctatcagtgatatcggtctccattccctttgcattgttgcatgtttatcaaagcaactgtttcttagctttctgtgtgatgttagtgatcctgcactggatgacaaccaaactgttttagatcctaaggggccaattctggcagctactaagccattggagcgaatatccattgtgagaagtatgaagattgaaaccgaaataggggaacaatatcagggacagggctcagtattaagaagtgttggagaactagaacagtttttgtttacgatattcaaagattttttaagaaaggagttagcatggccaagttggattaatctggatttcaacgatgatgatgagtaa

SEQ ID NO: 78543 - DNA, 624 bp, Saccharomyces pastorianus
atggttttgataataaggcccccacagacattgatattattcaggaaagcgatgctcaagccaattgggagatatcctcttaaaagaaatttttttggtttgagcggtaccaatcacactattagggaacagcgatatgttttgcgcaaggccataaacgcccctccaagcacagtctacgctgcagtgtcagaagttgcccaatataaggaatttattccttattgtgttgattcgtttgtagataaacgaaatcctgtggataacaagcctctcattgcggggcttcgagttggtttcaaacaatacgatgaggaatttatatgcaatgttacctgtaaagatactgatcatacgtataccgttgttgcagaaacaatatctcataatttgtttcaccttttgatttcgaaatggaccataatgcctcacccaaatagaccaaatgcggccatggtagaacttctattaagatttaaattcaaatctcggatatataacagtgtctctctaatatttgcgaaaactgtgactgaattggtgatgaacgcatttgccaaaagagcataccatttagtaagattagcaatgctaaaaccttcttctaaagaaggttctccgtga

SEQ ID NO: 78544 - DNA, 1026 bp, Saccharomyces pastorianus
atgagactgccagaaatctccatttggaaagtgatactactacttcatttgtttgctctacaagaatttcaacttgtctccgctgcaaatttgccctctttatcaagtagtacaaaggcagcagatagttctagtaaaggcagctcttcagccaagacaaccacgtccttaggcaaaagctcagtaaccagtaaggatgtttcgtcaagtcataatgtcacttcaagcactaaaatgcccaaaatcaccacgagcgctagtacaagcttatacaccaactctagtttatggagcaacaacagtgtaatatcaacttcatctattacaccttccagcgtttatatcccggttacggacggaaataaattcttatatcaggctcatcatcctaacggtactgtgttcattgcatttgctggctgtttaggtgcaattctactatcactgacgggtgcatggattgcattgaatataaagtcatggcgaagtgctagaaaggaaaataagctgagaaatctagaaaatcaataccaacacgatcctttctacttccaaacaaacattaatgacgacgaaagtgaaacatcttcccattctgacgacagtgacatatcagaaaaagttctgaaaaataactcatctcgtatgagtttgtatactctaggatccacttctgttttgaatcttttgaacaataaaacagatgccaacgataacttcagatcatctatgtttatttcacccaccgaaattctgcaatctgatgccaacaactctaatacatggtctcaaagcaatgagagtgctatatatgattccttgtccagtactccaagggaacctggtgctacccaaatactgggaaagtttacagacagtactaatccattcaattatacatcatacaatttaagtcctgactctgaagaccgctctacgccaaaatcaaatgttagtcagggtaaagtaaagaagtaccgtcctcccagtgttcatctggatcaactgctcgacggtaaggaataa

SEQ ID NO: 78545 - DNA, 2310 bp, Saccharomyces pastorianus
atgactattgctgatgcttccaaagttaatcatgagttgtcttctgatgacgatgatgatgtgccattatctcaaactttaaaaaaaagaaaggtggcgtccatgaactctgcctctcttcaagacgaagcggaaccttatgatagtgatgaggcaatctctaagatttccaagaaaaagactaagaaaataaagaccgaaccagtgcaatcgtcgtcattaccatcgcctccagcaaagaaaagcgcgacatcaaagcctaaaaaaatcaagaaagaagatggtgatgtaaaggtaaaaacaactaaaaaggaagaacaggagaacgaaaaaaagaaacgagaagaagaagaagaggaggacaagaaagcgaaggaggaggaggaagaatataaatggtgggaaaaagaaaacgaagatgacaccataaaatgggtcacactgaagcataacggtgttatattccctccaccataccagcccttaccatctcacatcaaattatattacgatgggaagccagtagatttacctccgcaagctgaagaagtagccgggttctttgctgccctattagagagtgatcatgccaaaaatcctgttttccaaaagaacttcttcaatgatttcttgcaagtactgaaagaaagtggtggtcccctcaatggaattgagataaaggaattttctcgttgcgatttcaccaaaatgtttgattacttccagttacaaaaagaacagaaaaagcaactgacttcccaagaaaagaaacagattcgtttggaaagagaaaaattcgaggaagattataaattctgtgaattagatggcagaagggaacaagtagggaatttcaaggttgaacctcctgatctatttagaggtcgtggcgctcacccaaaaacaggcaaattgaagagaagagtgaatcctgaggatatcgttttaaatctaagtaaagacgcacccgttccgccagccccagaagggcacaagtggggtgaaatcagacacgacaataccgttcaatggttagccatgtggagagagaatattttcaactcattcaaatacgtcagattggcagcgaactcttcattgaagggtcaaagtgactacaagaagtttgaaaaggcgagacaattgaaatcctatatcgatgccatcagaagggattacacgagaaatttgaaaagcaaagttatgctagagcgccaaaaggccgtagccatttatttgatcgatgtattcgctttaagagccggtggtgaaaaatccgaagatgaagccgatactgtgggttgttgttcattgcgatatgagcatgttactttgaaacctccgaatactgttatctttgatttcttaggtaaggattctattagattttatcaagaggtagaagttgacaaacaagttttcaaaaatttgacaatttttaaaaggccgcccaaacagccaggacatcaactgtttgatcgtctagatccatctatactgaacaaatatctacaaaactacatgccgggattgactgctaaagttttccgtacatataatgcttccaaaacaatgcaagatcaactggatctaattccaaataaaggatctgtcgcagagaaaatattgaagtacaacgcagcaaatagaactgtagccatcctatgtaaccatcaaaggactgtcacgaaggggcatgcacaaacagtggaaaaggccaataatagaatacaagagttggaatggcaaaagattcgttgcaagagggccattttacaattggataaggatcttttaaagaaagagccaaaatatttcgaagaaatcgacgatttgacgaaagaagatgaagccaccattcacaagagaattattgatagagaaattgaaaaatatcagcgaaaatttgttagggagaacgataagaggaaatttgaaaaggaagaattattgccggaaagtcaattgaaggaatggttggagaaagtcgacgaaaagaaacaagaattcgaaaaggaattgaaaaccggtgaagtggaactgaaatcaagttggaattcagtcgaaaaaataaaagcacaagtagagaaattagaacagcgtatccaaactagttccattcagttgaaagataaagaggaaaactcccaggtttcactgggcacttccaaaatcaattatatagaccctagactttctgtggtattttgcaaaaagtatgatgttccgattgaaaagatttttacaaaaaccctaagagagaaattcaaatgggccatagaatcggtagatgaaaattggaggttttaa

SEQ ID NO: 78546 - DNA, 363 bp, Saccharomyces pastorianus
atgaatgctccagacagattcgaactgttccttctgggtgaaggggaatccaagctaaagattgaccccgacaccaaagcccccaacgcagtagtgataacgtttgagaaggaggaccacacgttgggaaacctgattcgtgcagaacttctgaacgacagaaaagtgctgtttgccgcttacaaggttgagcatcccttctttgctcgtttcaagctgagaatacagaccaccgagggctacgacccgaaggatgccttgaaaaacgcctgtaacagcatcattaacaagcttggcgccctgaagacaaatttcgaaaccgagtggaacctgcaaactctagccgccgacgacgcattttga

SEQ ID NO: 78547 - DNA, 882 bp, Saccharomyces pastorianus
atggaaagcacatcaggagaccgttccgaaaatatacatgaggatcaagggataccaaaagtaattctgcccgctgattttaataaatgctctagaactgacctagtggtactcatatcacgaatgttagtatcgctgatagcaatcaatgaaaattcagcaacaaagaaatctgatgaccaaattactttaacacgataccattctaagattcctccaaacatatcaatcttcaactatttcatacgactgacaaagttttcctctttagaacattgtgtgcttatgacatcactctattatatcgatttattgcaaactgtgtatcctgattttacgcttaattcgttgactgcccataggtttttattaacagccaccacagtcgcaacaaaaggcttatgtgattcgttctcaacaaacgcccattatgcaaaagttggaggagtacgatgtcacgaattgaatatactggagaacgattttttaaagagagtaaactacagaatcattccgcgggatcataacattacgttatgtagtatagagcaaaaacagaaaaagtttgtcatagataaaaacgcattagggtctctcgatttggattcttattcttacgttaatcgtccaaaaagtggatataatgttatagataaatactatcgaagaatagttcagctggtgggttcctttaacgcttcacctgataagagtagaaaggttgattatgttctcccgtcaaatattgatatagtgagtgaaagtggctcccaaactactcaactaaaggggtcgtcatcacccaattctcactcttcacaaaagcgatattctgaggcaaaggacgcacatatctataacaagcgatcaaagccagattaa

SEQ ID NO: 78548 - DNA, 1635 bp, Saccharomyces pastorianus
atggccattggcaaaaggttactggtgaacaaaccagcagaagaatcattttatgcttctccaatgtatgattttttgtatccgtttaggccagtggggaaccaatggctgccagaatatattatctttgtatgtgctgtaatagtgaggtgcacaattggacttggtccatattctgggaaaggcagtccaccgctgtacggcgattttgaggctcagagacattggatggaaattacgcaacatttaccgctttctaagtggtactggtatgatttgcaatactggggattggactatccaccattaacagcatttcattcgtaccttctgggcctaattggatcttttttcaatccatcttggtttgcactagaaaagtcacgtggctttgaatcccccgataatggcctgaaaacatatatgcgttctactgtcatcattagcgacatattgttttactttcctgcagtaatatactttactaagtggcttggtagatatcgaaaccagtcgcccataggacaatctattgcggcatcagcgattttgttccaaccttcattaatgctcattgaccatgggcactttcaatataattcagtcatgcttggccttactgcttatgccataaataacttattagatgagtattatgctatggcggccgtttgttttgtcctatccatttgttttaaacaaatggcattgtattatgcaccgattttttttgcttatctattaagtcgatcattgctgttccccaaatttaacatagctagattgacggttattgcgtttgcaacactcgcaacttttgctataatatttgcgccattatatttcttgggaggaggattaaagaatattcaccaatgtattcacaggatattcccttttgccaggggcatcttcgaagacaaggttgctaacttctggtgcgttacgaacgtgtttgtaaaatacaaggaaagattcactatacaacaactccagctatattcattgattgccaccgtgattggtttcttaccagccatgataatgacattacttcatcccaaaaagcatcttctcccatacgtgttaatcgcatgttcgatgtccttttttctttttagctttcaagtacatgagaaaactatcctcgtcccacttttgcctattacactactctactcctctactgattggaatgttctatctcttgtaagttggataaacaatgtggctttgtttacgctatggcctttgttgaaaaaggacggtcttcatttacagtatgccgtatctttcttactaagcaattggctgattggaaatttcagttttattacaccaaggttcttgccaaaatctttaactcctgggccttctatcagcagcatcaatagcgactatagaaggagaagcttactgccatataatgtggtttggaaaagttttatcataggaacgtatattgctatgggcttttatcatttcttagatcaatttgtagcacctccatcgaaatatccagacttgtgggtgttgttgaactgtgctgttgggttcatttgctttagcatattttggctatggtcttattacaagatattcacttccggtagcaaatccatgaaggacttgtag

SEQ ID NO: 78549 - DNA, 1041 bp, Saccharomyces pastorianus
atgtcagcatcaaaagaagaaattgctgcccttattgtaaactacttttcttccattgtggaaaagaaagaaattgcagaagatggcgccgattctttaaatgttgctatggactgtatctctgaagcctttggctttgaaagagaagctgtttcaggcattttaggcaagtctgaattcaagggtcaacatcttgctgatatattaaattctgcgtcaagagttccagaatcgaataagaaagacgatgctgagaatgtcgagattaatattccagaagatgatgcggaaactaaagccaaagctgaggacttgaaaatgcaaggtaataaagcaatggccaacaaggattacgaactggcaatcaataaatatactgaagccattaaagttttaccaacgaatgctatttattacgccaatagagcggctgctcattcatccctgaaagaatatgatcaagcggtcaaagacgctgaatctgcaatttctattgacccatcttatttcagaggctactctagattgggttttgctaaatatgcgcaaggtaaacccgaagaagcccttgaagcatacaaaaaggttcttgatatagagggcgataatgcaacagaagctatgaaaagggattatgaaagtgccaagaagaaggttgagcaatctttgaatctggagaaaaccgttccagaacagtcaagggatgctgatgtcgatgcaagtcagggtgctagtgcgggtggattgccagatcttggttctttattaggaggtggtcttggaggtttaatgaacaacccacaattgatgcaggctgcgcaaaaaatgatgagcaatccaggtgcaatgcagaatattcaaaaaatgatgcaagatccaagtatcagacagatggctgaaggctttgcttcaggcggaggaactccgaatttgtctgacttgatgaataacccagcactcagaaacatggcaggcaatctttttggtggagcaggtgcccaatctacagatgaaacaccagacaatgagaacaagcaatag

SEQ ID NO: 78550 - DNA, 102 bp, Saccharomyces pastorianus
atggcaaccaaaggcaacttaaaaagactaacgaagtacttttcaacaatagcttacactgaaactcgcggagaggcgacgctgcgcgcgaattatcagtaa

SEQ ID NO: 78551 - DNA, 723 bp, Saccharomyces pastorianus
atggcttacatcaagatcgctttattagctgctatcgctgctttggcttctgcccaaactcaggaagaaattgacgaattgaacgttattttgaatgacgttaagtccaacttgcaagaatatattagtttggctgaagattcttcatctggattttccttaagcagtctgccatctggtgttttagacatcggtttagctttggcttccgccactgatgactcctacactactttgtactctgaggttgactttgctgctgttagcaagatgttgaccatggttccatggtattcttccaggcttctaccagaattggaatccttgttaggaacttctaccaccgctgcctcttctactgaagcttcttctgctgctacttcttccgctgttgcttcctccagtgaaactacttcttctgccgtcgcttcttccagtgaagcttcttcttctgcaactacttcttctgctgtcgcttcttccagtgaggctacctcttccaccgtcgcttcctctaccaaggctgcctcttccactaaggcttcttcctctgctgtttcttcagctgttgcttcttccaccaaagcctccgccatttctcaaatcagtgatggtcaagttcaagccactagcactgtttccgaacaaactgaaaacggtgctgccaaggctgtcatcggtatgggtgctggtgtcatggccgctgccgccatgttattataa

SEQ ID NO: 78552 - DNA, 4185 bp, Saccharomyces pastorianus
atgtcaatttcaaagtacttcactcccgttgctgacgggtcactcactttcaatggcgcgaacattcaatttggcgccgatgctcaaggcgagtcaaaaaagagttatgacgctgaggacagcatgccgaatccggcaaatcaactaaatgacataaccttccaagcagaggctggtgaaatggttttggttttgggttatcccacatccactctatttaagactttgtttcatggtaaaactagtttgtcatactctcctccaggctcgattaaatttaaaaataatgagtttaagagcttttccgaaaaatgtccccaccaaatcatttacaataatgaacaagatgtgcatttcccatttctaacggtagagcaaacaattgattttgccttgagttgtaagttcgatattccaaaaggtgagcgcgatcaaataagaaatgaacttttaagagaattcggcctgtctcatgtattgaaaactattgtaggaaatgattttttccgtggtgtttctggtggtgagcgtaaacgtatttctattattgaaacgtttattgctaatggttccgtttatctatgggataattctactaaaggtttagattccgccacagctctggattttttggaaattcttagaaaaatggcaaaagctactcgttctgtaaacttagtcagaatttctcaggcaagtgataaaattgttgataagtttgacaagattcttatgctatccgattcctaccagcttttctatggtacggtcgatgagtgtttgacttattttcgtgacactttaggtattgagaaagatcctaacgattgtattattgaatatctgacctctatcttaaattttcagttcaaaaataaaaatttggggaatttatcaaattcatcatctgctagcgttctcaaaaccgcaacaggggaagtcactaagtatacttataattctgatttcgatttatatgatcaatggaaacattcttcgtactatagaaatataaagcagcaaatccaggggtcttcaattgatgactccattaaggaagtggatccctctgatgtctcacctatttttaatattccgttgaagaaacaattattattttgcacaaaaagagcttttcaacgaagtttgggtgataaagcttatatgacggcacaatttatttccgtcgttattcaatctttggtcattggttcactgttttacgaaattccgttgactaccattggttcatactcaagaggttctttaacctttttctccattcttttcttcacttttctttctcttgcagatatgcctattgccttccaaagacaacccgtcgttaaaaagcaatcccaacttcacttctatactaactgggttgaaaccctttcaacaacagtgttcgactactgctttaaactttgtttggtaattgtattcagtatcatcctatacttccttgctcacctgcaatacaaggctgcaagatttttcattttcctcctgttcctttccttttacaatttctgtatggtgtccttattcgctttgacgacactagttgctccaaccatttcagttgcaaatttatttgcaggtattctgctactagctatagcaatgtatgcttcttacgtcatctacctgaaaaatatgcatccttggtttgtatggattgcttatctaaatcctgcaatgtacgctatggaggcaatactgtctaatgagctttacaatttgaagctggattgtagtgagacaattgttccaagaggtcctacttacgacgatgttccattttcccataaggcctgtgcttggcaaggtgctactctgggtaatgattacgttagaggtcgtgattacttgaagcaaggtttatcctacacgtatcatcatgtgtggagaaactttggtattattattggtttcctagtattctttattgcctgtactctgtttgcatctcaatatattaagccttatttcaataaggatgaaatagagcgcaacaatagtcgtttgacaagatggctaccatttttgaataaaaagagaggtaccaggtcctctgcaagaaatgacagtaagtatgttggtattccaaagtcgcactccgtttcgtcttcctcgtctagcctgtcggctgttccatatcagatatcaccctcaaataaggaaatggctctaaacgattataacgagcaacctatcacggaaacagtagagactcaaaagcatatcatctcttggaaaaatatcaactacacagttggtacaaagaaactgattaataatgcatccggtttcatcagttctggtttgaccgccttaatgggtgagtccggtgcaggtaaaactactttgctgaatgtcttatcacaaagagttgagacaggtgttgttagcggcgaaattttgatcgatggccacccattgacagatgaggacgcatttaagagaagtattggttttgttcaacaacaggatttgcatctagatttgctgtctgtgaaagaatctctggaaatatcatgtcttttgagaggtgatggtgacagggcatacttagacactgtttcaaatttactgaaattgccatctgacattttagtcgctgatttaaacccgactcaaaggaagcttttatctatcggtgttgaacttgttactaagccttcacttttattattcctagacgaaccaacctctgggctggacgctgaggctgcactaacaatcgtcaaatttttaaaacaactttctttacagggtcaggctattttttgtaccattcatcagcctagtaaaagtgtcatcagccattttgacaatattttcttattgaaaaggggtggtgaatgtgtcttctttggaccaatggacgatgcctgcggctatttcatgtctcatgacaacacgctcgtttacgataaagaacatgataaccctgcagatttcgtcattgatgcagtaggtagcagtaactcctcggcagggaaagatacagcggaggaagctcttactttgaacaaagaagccatagattggagtgcattatgggaatcttctgtagaaaagaaactagttgaaaaagaaacagctaggttagaagatgatgctcgtgcgtctggtgttgattacacaacctcattgtggaagcagccttcctacttacagcaattagctcttattacaagaagacaatatatttgtacgaaaagagacatgacttatgtcatggccaagtactgtttgaatggtggcgctggtttgtttatcggtttctcattttggcacattaagcataatattatcggtttgcaggatagtatcttcttctgtttcatggctctttgtgtttcatctccattgatcaatcaaattcaggacaaagccttgaaaacaaaggaagtttatgttgctagggaggcgagatcgaacacttatcactggactgttcttcttttgtcacagtcaattattgaactaccactggcacttacaagttccacactatttttcgtctgtgcctttttctgttgtggatttaacaacgctggctggagtgccggtgttttctttttaaactatatgcttttcgctgcttattactcgactcttggtttatggctgatctatactgctcctaatctacaaactgctgctgtttttgttgcgtttattgacagttttacagcatcattctgtggtgttatgcaaccatactctttgtttccaactttttggaaattcatgtacagggtttcgccatacacatattttgtggaaacttttgttagtattctattgcataactgggaaatcaagtgtgacatgtcggagatggttcctggtcaacctctgacggggcaatcttgtggccaatttatggaagctttcatagaagaatacggtggctatctacataataagaacactttcacagtctgcgcttattgtacgtacactgttggcgatgacttcctgaaaaatgagaatatgagttacgaccacgtttggaggaactttggtattgaatgggcttttgttggtttcaatttctttgcgatgtttgctggttactacttaacttacgtggcaagaatatggccaaaggtctttaaaattatcaccaaagtaattccacacagagggaagaagcctgtacagaactaa

SEQ ID NO: 78553 - DNA, 207 bp, Saccharomyces pastorianus
atggcaaaatcggttttcaatttctttcattttgaaatattggagtatttaaaccgttttgtgtatcattcacaatactttcttccatactactgctctcttgaagttcttgggaagagccgaaaaaattggacatttcaatattggtgcttatacattactactaacaagaagataataaaaaagaaagatttctatcaccgatag

SEQ ID NO: 78554 - DNA, 414 bp, Saccharomyces pastorianus
atggtagcatcatcgatcaatgaagaatcctctttggcggtaaacttgacaagcgatgtagagaaggcttcgaaaactttgtttaaggcattcgaaaagtcatacgcaaatgactacttgatgaaaaagttcttccatatcccaatcactgaaaaagtttcaagggcaagaataaatgcaatgatacattactacacgacgtgctaccatgacttggatggtgaaattgctgaggcaaatgatttcgatgcagtcgcaatatggagccgccctgggtgccacttgcctgctacactatctgacgacgagtctttcaataagatttttttttcacgacttgactgtgaggaagcacgaagtcatgcctctgggaatggactattactacctttatgccatcggaaaagatcctag

SEQ ID NO: 78555 - DNA, 471 bp, Saccharomyces pastorianus
atgacttggatggtgaaattgctgaggcaaatgatttcgatgcagtcgcaatatggagccgccctgggtgccacttgcctgctacactatctgacgacgagtctttcaataagatttttttttcacgacttgactgtgaggaagcacgaagtcatgcctctgggaatggactattactacctttatgccatcggaaaagatcctagccatcccgaatttagaggttcagtcagaaaaatactcgaaaaatataaaaccaaagcagacaaggccaattgcgcccttgctctcgaggctatttcggagcacgcaagatctgtgtacgaatatttcggtttcaaaacctatttggtgtttcagttcggggttggagaagtgaactccaaaggagaacccgatccgcaggggaaggggttcacggcctacttgatgctctaccacaaggatgcagacaccatctttcacgcctga

SEQ ID NO: 78556 - DNA, 2274 bp, Saccharomyces pastorianus
atgatgcgtggtttcaagcaaagattaataaagaagaccaccgggtcttcttcttcttcaagcagtaaaaagaaggacaaagagaaggaaaaagaaaaaagttccactacctcatccacatcaaagaagcccgcttcggctagtagctcttcccacgggactactcacagttctgccagcagtaccggatcaaagtctacaactgagaagggcaagcaatctggtagtgttccctcgcaagggaagcatcatagtagctctacatcaaaaacaaaaacagcgacgaccccttcttccagcagcagtagcagtagaagctcaagtgtcagtcgctccggttcaagctccacaaagaaaacaagttcaagaaaaggacaagaacagtccaaacaatcgcaacagccatcacaatctcaaaagcaaggatcttcttcatcctctgccgctataatgaaccccactccagtactcactgttactaaggacgacaaaagcacttctggtgaagatcatgcacatcctactttgctgggggcagtatccgctgttccatcatctcccatttcaaatgcttcaggtacagcagtttcttctgatgtagaaaatggtaatagtaataataacaatatgaatatgaatactagtaatactcaggatgcaaaccacgcctcctcacaaagtatcgacattccgagatcatcacactcatttgagagactaccaacacccacaaaacttaaccctgacacagatttagagttaattaagactccccaacgtcattcttcatctagattcgagccatctagatatacgccattaacgaaattgccaaattttaatgaagtttctcctgaagaaaaaatccctttgttcattgccaaagttgaccagtgtaacactatgtttgactttaatgatccgagttttgacattcaaggtaaagagattaaaagaagcaccttagatgagctaatagaattccttgtaacaaataggttcacttacacgaatgagatgtacgctcatgtggtgaacatgttcaaaatcaatctgtttagacctattccaccaccagtaaatccagttggtgacatttatgacccagatgaagatgaacctgttaacgaactagcctggcctcatatgcaagctgtttacgaattctttttaaggtttgtggaaagtcctgatttcaatcatcagattgctaaacaatatattgatcaggactttattttaaagttactggaattatttgatagcgaagatatcagagaaagagactgtttgaaaacgacactgcatagaatatatgggaagttcttatcattaagaagctttattcgtcggtcgatgaataatatttttttgcaatttatttatgagactgagaagtttaacggtgtggcagaattgttagaaattttgggttccataattaatggatttgcacttccattaaaggaagagcacaaggttttcttggtgaggatattgataccattacacaaggtccgttgtttatcattataccaccctcagttggcttactgtatcgttcaatttctcgaaaaagatcctttattaaccgaagaggtagttatgggcttactgcgttattggccaaaaataaattccacaaaagagataatgtttctaaatgaaatcgaggatatttttgaagtgatcgaaccgctggaatttattaaagtagaagttccgttatttgttcaattagctaagtgtatttcttctccacatttccaagtggcggaaaaggttttaagttattggaataatgaatatttcttaaacttatgtatcgaaaatgccgaagtcatcctacccattatatttcctgcattatatgaattaacttctcagttagagctagatacagcaaatggcgaagatagcatttcagatccttacatgcttgttgagcaagcaatcaattctggttcgtggaatagggcaattcatgctatggcattcaaggcattgaaaatttttctggaaacaaacccagtattgtacgaaaactgtaatgcattgtacttatcaagtgtaaaagaaactcaacagcgtaaggtgcaacgtgaagaaaattggagcaaacttgaagaatatgtaaaaaatctaaggattaacaatgataaggaccaatacacaatcaaaaacccagaattaagaaacagtttcaacacagcaagtgagaataatacattaaatgaagagaacgaaaatgattgtgacagcgagatacagtga

SEQ ID NO: 78557 - DNA, 624 bp, Saccharomyces pastorianus
atgcgcgtttttactttgattgcgattttgtttggttcatctttgttaacacatgcattctcctctaattatgctcctgtaggcatatctttacctgcttttaccaaagaatgtctttactatgatttatcctctgataaagatgtccttgtggtcagttaccaagttttgacaggtgggaatttcgagatagacttcgatattaccgcccctgatggctctgttatcgtcactgaaagacaaaagaagcattctgattttctactgaagtcgtttggtataggtaaatacactttctgtttgagtaataactacggcacttccccaaagaaagttgaaatcaccctcgaaaaggaaaaggaaattgtttcttcccatgaaagcaaagaggacataatcgcaaacaacgccatcgaggaaattgataggaacctgaataagatcaccaaaacaatggattatttaagggctagagaatggagaaacatgtacactgtgagttctactgagtcaagattagcatggctctcattactaattatgggggtaatggttggtatcagtatagtgcaggcattaattattcagttcttttttaccagtcgccaaaaaaactacgtatag

SEQ ID NO: 78558 - DNA, 2403 bp, Saccharomyces pastorianus
atggggttctacaactgtagattcctgtccagacgtctatctgttgagcgttgcagaataggtagcgccgctaaaagctatcaacagcgatcgatttatcactttggcgctgctctcacaaatgcccctagtggaagagaaacaccagacaagctacgttctgacctgcatagtgctttagagatggtcgatgaaatatatgacacaaattcgactgtagaggacattggaaacaaggaaaagggaggtcgacaaaaatatacggaagaaatggacaaggcgattaatatactgaaaacaaatataaggaaggagtatagacatgataagtatttggagcggacaaaggtaggaacgtatcctggtagaagaacatatcctggtaggagaacatatcccgctaggagaacatatcccgctagcagaacatattcagatagcaattcatacacttttcggataaatgtccagaagattaggcacgcattagtacgttacaatcaagatggtgttcaaaaacacaaccaaaagcctcctaggattggtcatggattaacgagagtgttataccaaccgttgtcgctacaaaaattgagagataataggagcagaatgtataattttgaccctgcagtggaaaatattaatccagagtatttggaaaagaaaagtgaaaaagatgtgaacacagactcctctggagaaggacaaagcaagccaatattcatcacaccccacaaagatgaatctctgttaaaggttgccaaagaacatagaaaaaagtacatatcttcatcaagttccatgacatcagtactttctcagttgcactatttattatccaatttcagaagattgaatatcattgattcctcgatatcgaaaaattttcctcaaaaaaactgcaattattcagaaagtgcatattttccgtcagcagtcattctgagaaagaagagaaatggcatttgttctattgattcagatagaagtctggatagggagattgtgctttctctactaggtcattatcttgaagactttttaacggaaaagtccctgaagaatagttcaaaaagtgaaaattatcactattctagtatagatgaattcattgtgagatctcaattggacgcgtacgacccaaatctacctggaacgggtgtatttgatctgaagacaagagcagtttctgccataagatacgatttatcacatgtagagagtaataacaaccaaactggatatgagatagataaagtttatggggaatttgagtctttggaaagagaatattttgaactaatcaggtctgcccttctaaagtattctttgcaagctagaattggcaaaatggacggtattttcgttgcataccacaatatttctaagatgtttggattccaatatctacctttggacgaattagattatataatccattcttcgtataacagcaaattcgacagtttgttaaaggagaagaatgatatcacaaaagggatatatggtgaggaggactacattctacactatgacagggacgataggaaaattgcttgcttggtggctaatagggaatttaagatgtctatgaatctgttcagtaatattttgaaacacgttgagcagttacttaactcaagtaatacgaaatgggaaaaatgcaaaataatgcttaaaaccgaagttgaagaaaaacgatccaaaagtggccgcttctttaacgaaccggtgctaaatattgtagccctgccgttgtcacctgagtacgaggataaatctttattggtaaaggatacttcgaacgaacaattaacagaggagctactaaacctccgctcatataacgaaaatcttttggaggaacacctgaattccttagttggatttaaagtaaatgtcaagcatttctatcaccatcatcctaatactacacatctacctgattttgctttaaaaaagaacgatattctcgacaccgaatcccgtaaatatattactgacatgatgaaacgagactggtacaaagatataccatctacacagactccaaactttttccacgcttccgatgtttccacttgggaggtgaactctacttttacagatatcaatgacaaacaaattttacgaaaactgtactttaaatatttggatgttaaattaaacgcattgaaaaatcaagtaatcacacgtcaggaacctgatatgtctaaaaaggatgaaattatgaatcgaatcaaatcactacaagcccgcaatgatcaccgcgataatggaagtaacaaaagatattctaattttggccctacccgactgcaaactaaactgcgcgcatatgctaaaaaaggtgcccttcgaagaaaactattagaaaggagtaacaagttccatatctag

SEQ ID NO: 78559 - DNA, 321 bp, Saccharomyces pastorianus
atgtccacccttttgaagtctgctaaatctatcgttccattgatggaccgtgtccttgtccaaagaatcaaggcacaagcaaagacagcatccgggttgtatttacctgaaaagaacgtggagaagttaaaccaagctgaagttgttgccgtaggcccgggctttactgatgctaatggtaataaggttgttcctcaagttaaagttggtgaccaagttttgattccacagtttggtggttctaccattaaattgggtaacgacgatgaagttattcttttcagggacgctgaaatcctggctaagattgccaaggactaa

SEQ ID NO: 78560 - DNA, 273 bp, Saccharomyces pastorianus
atgggtgctgcatacaaagtatttgggaagacggttcaacctcacgtattggctatatctacgtttatcgctactgctgcagtggcatcttactttaccacgaaaccaaaaaccaaaaatgaaggcaagaatagttctgccttgagccaacaaaaaagcggtgaaagttcaaactcagatgctatgggaaaggacgatgatgtcgtaaagagtattgaaggatttttaaatgatttagagaaagatacgaggcaggatacgaaagccaactga

SEQ ID NO: 78561 - DNA, 642 bp, Saccharomyces pastorianus
atgaagtacattattgagcatatggaggaagggtttagtgaatgggtcattttagagtatagccaaatcctgagagaagtaggagctgaaaacttgattttatcatcgttaccagagagtaccacggaaaaggacatccctcaaaggctactaaaacttggtttaagatggactacaaaggatttgaagggcattaacgaagatttcaaggatttggaactgttaaaagatggcagagtctgtctattggaccctagggctacaatcgatttacagccggaggatgctacgaaattcgactatttcgtatttggtggcatattgggtgatcatcctccaagagatcgtaccaaagaactaaagactgcctatccgaatcttttaattagcagaagactaggtgataaacaaatgactacggatactgccataagaacaacacagttgattatcaaagacaggattgcatttgaagacatcaagttcattgactaccctgaatttaggttcaataaaaatgaggccacggaaatgccatttagatacgttttagataaagaaggtaaacctattttgcctgaagggatgttggatttgatcaagaaggattctgctcaaagtttggacgatctgttgatgtag

SEQ ID NO: 78562 - DNA, 1701 bp, Saccharomyces pastorianus
atgatgagtcccgcccaagataaactgcagcaccagcatcataatcctaattcttcttcatcgtcatcctctaagatgacgaacgtttatcaggttaccacgccaaaatctcctcaggatttggaaaacaacatggatgagcccttcaaaatggacaccgccactagtaatccggacaagggtagcgaaaatacccagcggttgaagtacgaatgtgccaaaggggaaatacagaatgttttgaacctacatataatgctaaaccacaagcatgttaggcacttacgaagaaatgttcaaaaggttaacgcaaaactagctctcttggaaaccctgcataaggatactggtctattgaacaaaatcgaacggacgtatcaactcaaaataaaacaacatcagcagcatagcgtgctcggcggccacttccatgacagtacggctacggaaaatacgaacgcatcaaattataacctgtcatacccggttctatcggattataacatcaactgtcagcctttgtcttcgagcagcaacacaaatctgtcaacaacacgcataccacaccaccattatcatactagaagcaagagtaacgggcttttgctagaaccttctgccctccgtccggcaaattcgaatataattgattacaggctaacaggttctaaatctttatcggaagccataaccaagcccactcccgtctcgcttcctcactctaattcggatggcatttcttcacctcgttcctcttcaatctcccccttagacgagcagccggggttccagatactcccttttaaaccaagtcagatgcatcttaaccacagacgtaattacagtagcacttgtttgacgagcaatagcggtatcatcggtaagactgaaaataatgagcccatttttagaagatatgacggcattttggttataattacgtgctccaaatgtgaccgttccggtttcacttccgcgcaaggtatcgtgaaccatactcgactaaaacattctaaactatattcaagccaaccattggcagttttaaacaaccaaaaactacttcctaatgataagcaggatccggaaattttatctaagttcaagaaactaaatttggacccaaacaaagactatctaccctctgacattgcaatcccaaaaccacaatcaccaatcaaccactccgagaaccatacgcgggctccaaagactgtcaagaacactcctcatttagaaaaactataccaaaataaagaagacttcaaaaaactgattgacatggttaatgaaactccggatgatttgaatgaatatttgaagcaacgtgaaattcaattaagatatcaaaaggagcaagaagaggaatcttccaaatctgatgacgaagcttcttacgtcccatcaccgtctctctcagcaacggctacaacaacaacgactacggacccaccctctccacaagtgctatcctcctccttacaaagaaaattgctgcgtaagagaaaactgagcttgaatatctctactcccatggaagatttacctttaagagaaaggttgagagcaaatcccactgacaagaaaccaagaaaagcggcccttttgactaatgaacttgagggtcctgatcctgcagcaaaatcatcatcttattacaatctaaggtcgaaatcaagactgcgtggttctcatacatag

SEQ ID NO: 78563 - DNA, 1026 bp, Saccharomyces pastorianus
atgcagatagtacaaattgagcaggccccaaaagactacataagcgacatcaaaataatctcttccaggtcactgcttttgattacgtcttgggatggttctttaacagtctacaaattcgacattcaagcaaagaatgttgaccttttacaatcgctacgatataaacatccgttattgtgctgcaatttcatcgataataccgatctgcaaatatacgtgggaactgtacagggtgaaatcctaaaagttgatttgataggtagtcccagcttccaagctttgacgaacaatgaagccaatttgggtatttgccgaatatgcaaatatggagacgataaactcattgccgcgtcatgggatggcctgatagaggttatcgaccctcgcaattatggtgatggagttattcctgttaaaaatttgaactctaataacacaaaggtgaagaataagatatttactatggatacaaactcctctcgattgatcgttggtatgaacaatagtcaggttaaatggtttcgcatgccactctgtgaggatgataacggaacaattgaagaatcaggactgaagtaccaaataagagatgtcgctcttttaccgaaagaacaagaaggttatgcatgtagcagcattgacgggcgagttgctgtggagttcttcgatgatcagggcgatgattacaactcaagcaaaagatttgcatttagatgccaccgtttgaatctaaaagatacaaacttagcgtatccagtaaattctattgaattttccccccgtcataagttcctatacacggctggctctgatggcataatttcatgctggaacctacaaacccgcaagaaaataaaaaatttcgccaaatttaacgaagacagcgtggttaagattgcctgttctgacaatattctatgtctggcaacttctgatgatacttttaagacaaacgccgcaattgaccgaactattgaactaaacgcaagttcaatatacataatatttgactatgagaactga

SEQ ID NO: 78564 - DNA, 1770 bp, Saccharomyces pastorianus
atgtcattgacagccgatgaatacaaacaacaaggtaacgctgcatttaccgctaaggattacgataaagccatagagctcttcactaaagctattgaagtttctgaaactccaaaccatgttttatattctaacaggtccgcctgttatacttctttaaagaaatttagtgacgcattgaatgatgctaatgaatgtgtcaaaatcaatccatcttggtctaagggttataatagactcggtgccgcccacttaggtcttggcgatctcgacgaagctgaaagcaactacaaaaaagccttggagttagatgccagtaacaaggccgccaaagaaggattggatcaggttcatcgtacccaacaggcaagacaggcacagcctgatttaggattgacacagttgtttgctgacccaaatttaattgaaaatttgaagaagaacgcaaaaactagcgaaatgatgaaggaccctcaattagtggctaaactgattgggtacaagcaaaatccgcaagccattggccaagatctgtttactgatccaagattaatgaccatcatggctacattgatgggggttgatttaaacatggatgatataaaccaatcaaactccatgccaaaggaaccggaaaccagtaaaagcactgaacaaaagaaagatgctgaaccacaaagcgattctactacgagcaaggaaaattcctctaaagcaccacagagagaagaaagtaaggaatccgagccaatggaagttgatgaagatgactctaaaattgaggccgacaaggaaaagaccgaaggtaacaagttttacaaggcacgtcaattcgatgaagctatagagcactacaacaaggcgtgggaactgcataaagatattacctatttaaacaaccgtgctgctgctgaatacgaaaaaggcgaatacgagacagctatttctaccttgaatgatgctgttgagcaaggtagagaaatgagagcggattacaaggtcatttccaaatcatttgcgcgtattggtaatgcctatcacaaattgggtgacttgaagaaaactatagaatactaccaaaaatcattgactgaacatcgtactgctgacattttgaccaagttaaggaatgctgaaaaagaattgaagaaagctgaggcggaggcgtatgttaaccctgaaaaggcggaggaagcccgtcttgaaggtaaggaatattttaccaagagtgattggccgaatgctgttaaggcttacactgaaatgatcaaaagggcacctgaagatgctagaggatattctaatagagctgctgcactagcgaagttaatgtctttccctgaagctatcgcagattgtaacaaagccattgaaaaagatccaaatttcgtgagagcttatatcaggaaggccaccgcacaaattgctgttaaagaatatgcttccgctttggaaacactagatgcggccagaaccaaggatactgaagtgaataatggttctagtgcaagggaaattgatcaactgtattacaaggcaagccaacaaagattccaacctggtaccagtaacgaaaccccagaagaaacctatcaaagggccatgaaagatcctgaagtggctgcaatcatgcaagatcctgttatgcaaagtattttgcagcaggcccaacagaatcccgctgctttacaagaacacatgaaaaatccagaagtattcaaaaagattcagacgttgatcgctgctggtatcatccggactggtcgttaa

SEQ ID NO: 78565 - DNA, 336 bp, Saccharomyces pastorianus
atgatgcagacatcaactagttctcgagtgaggaggtatccttatcaaatcactctctccctagtgttggaagggtttcactcgccttctgctcctggttacaatttttgcctagtactccttcctaccctcatcctcatagatttagtgccaataaaattttctttgcatgtcatcattgggataagtgacgcaactccggttccgattttttttttttcagcgccgtggtatttccgctcgggaaatcccctcccgcattgcatcaaagcttatcgatgtaaagttaatttccctttttttcggttgggctggagcaattggttgcattactaa

SEQ ID NO: 78566 - DNA, 1860 bp, Saccharomyces pastorianus
atgatcataagattgcatttttactacctcctcactttagtttaccatttaggacttgtaggtgcgtatgaaaaagcagcaagaaagagaattcaacctcccgatttgatacctggtcctccgggacataaacttggtgatgaaagaccaccgcattacgaccaccggccaccttataaaaaacacatcgacaacattccagcttacaatctgactgatttgatagatgataaaatactaaataaatatgaaaactcatgcacggtaaatgtattgacaggtggcttcatctctctagcaagtaattcgtggcacttacgtgcttataattacactttaaattacccatcctttttgatccgatgcgataatggcagtgcaaatcctaatttctctcatgtcttacaagactttgtttatgacatcaacaacaaattcaacgttcaagatgacagtagtaaatacatcggaaaagacccatttcccttaggaatgataatgatcacctttgcttctgggtgtatctgtgtggcaacatggatgctatttttggttgtcttattactgccatccgataatcataatagaagaaataaagttgtacatgtttacgtccttttctctgcgattataagaactgtatttctaaacgagactatagccgtcatatttgacagccaatatcacgatgactaccaggatgcgagccaatttgaatcgttcatcgtagaaactgcaccatataaaatatgtgaattagttgcaaatattttgagtgatataaactggatttatattgttcactacttacagtccaattatggaaaaccaacttggaattggatcccatttaaaatgaaaaaggggacacatatcataattaccgtgggttgcttcctctcactagccgataacattttattcgcaaaccttctttggagaaagaaccttgtagttttgaaggtattttacaagctaatcgaattactgatttacacaattttcatctccattatttgttacttcacatggcataattttgcttacatacttttaccgaaaactgctgaaattaatacggacggtaagtgtaaaacgaaactgagaattctttgggaaaattatcacgaaactataccattattggcgtataatattcttatatttattttattctatttcaccacaatttttttcgctgctttcaccaaacatgttagaggttggacatttaactttgttcatcttttgaaagttttaataacagtgaacgtttggggcttaattggagtattggaaaagagggagctgcacataagcaaaaaaacagtccttggacgaaaaattaacaatagggacaaatttttcgccaatccaacagtcaattattacggagaagatttaggcaagcatttaagcgccataacgttaaacagggatttaaacactactaaaagtaacactacttcccacgattcatcaagtttagtaggatccccttcacccacctggaaatctccaatcgaaagaataagggacagaagaagaagacataagataatgaaaagtgagaataaatttgggcaaaatcccagttttggaagtaaatcgaatggcaaacctaatactaaaacgacattatccaaatatcgacagctattaaggaagcctaggcgaaaaaccaattcatatgaaccaaaaaatggcattggacagaataaagaaggctcaactgttagaccaggagccgacaaacatattagagattccaattatctagctacagacatcagtgacaacgaaagtatggaaaccgaacttcgaaccaaccacatttataattacgaaaatagtgattaa

SEQ ID NO: 78567 - DNA, 210 bp, Saccharomyces pastorianus
atgactgtaaaaatatgtgactgtgaaggcgaatgttgtaaggactcttgtcattgtgggagcacctgccttccaagctgttctggcggtgaaaagtgcaaatgtgatcacagcaccggaagccctcaatgtaagagttgtggtgaaaaatgcaaatgcgaaaccacgtgcacttgtgaaaagagtaaatgcaattgtgaaaaatgttag

SEQ ID NO: 78568 - DNA, 1305 bp, Saccharomyces pastorianus
atgccaaattttcaaaaacctttttctggttcttcggatggcaattctgtaatgaacgacctaggtaataaagtcgccatcaaggttttcgattgtagaagtgctcaagatggcagcgaagagcagaatgtaaatgtaaccacgaaccaaatgtatttaatgtttcaaagtaacaattacaacgtgccgccaccaaattacaataccgaggatttgggttctcaaggacctccgacgcatgcttattacgctccatttcagcatcccatccatcttcaacatcccgtgcctcctgtatataagaacaacacatattctgccacagaccagtatagtgactcctcgtttcctaatacttcaggccacactccagtaattgatagcaattactataatgatgctctggcttctatacctacaacaacgacgggtagtactacaatgactacagacagtggcaatactattgacagcgaagaatacattgataacatggaagtctttagtagcgaggaaaatgaaaacattgataatgtaaagcaaaccgatcttaaatctgaaaaggactcgagtcttctttcagcagcttcaatagtgaaaaaggaacaattgtctggctttgaaaattttctgcctttatcgaagacagagtctcccttagttactgcagacgagattaaatcatctttgaatttggagaatattgacaatggtgacagtttgagcttcaagttaaaaacttcacctatacggaaacattttcatgttaaacccaaaagaataacaagggtgaggacaggaagggtatcacacaatataattgaaaagaaataccgttccaatattaatgataaaattgaacaattaaggagaactgtcccaacgctacgagtagcgtataaaaaatgtaacgatcttcccattacatctagagacctagcagacttagatggcctagagccagcaacaaaattgaataaggcgtccattttaacgaaatctattgaatatatttgtcatttagaaagaaagtgcctacagctaagcttggctaatcaacatttatcaaatgacacacgggattctttcgtccatcttaccgagccatctcaaccgttgagtgacaacagtagtagtgaacaagtacaaaagcaaaccagaagctgccaacgccaacggcagcggcagccacgacaacaacaaccattgcataacattcaatataatattccacatcaaaacggcctcatgagcggcaccaacaattcacatgatatggattttaacaacgcaggagacttttaa

SEQ ID NO: 78569 - DNA, 201 bp, Saccharomyces pastorianus
atgcggcgtgcattgttcatagcggggcaaacatacttgtggcttaatttgacacatctacttttaatcttttcttggtctaatacaatggctttttcccaaagtagaaggcttcttactccaaccgtaccctgtcctactttactgggcattgattttttaattcttgtcttgaggcatttcgacgagattttcatttga

SEQ ID NO: 78570 - DNA, 2370 bp, Saccharomyces pastorianus
atgccactgtgtgagaaagggaatgatccaatcgatagctctactattgatagcctctgcgctgcatttgacaagactttgaaatccacccctgatgtccaaaaatacaatgatgctataaatacaattttccagctaaggcaaaaatctgaatctgggaaaatgccggctgatttaacgaatagtgaagcccttaaagatcgtcagaaaatcgaagaaatattgaccaggtcttaccaagaccattctgagtcccgcgtacatttatctaaacttatacagaatgatattcccttcgcactcaatttatttgaaatattatcaagatcatccatccacgttttcgttggttgcttttccaataaagacgcaacaattgcattgttaaatgagctgcaaattaggatacactatggcgaggacacccacgtcacgtatttactgagcatagttctacaactattgaataagttcaagtacaatttcaaggaggtgcgatttttagtgaaggaacttattttgcgcataagcgaagatgaagtaaaatcgatgatgcttataatttttgctgaattacaatcaagcttccaaaaagactttgataaagcagtggtcgatttcatgagtagcttaattgtggaggcagaaatagacgttggaaatgatccattgtccatcatagtcaaaaccctatcagaattatatccttcattgacaacactttgttctgaaatatttttgaccaaaggactaagtaagctttttaagaagagagtattcgaagagcaggatttacagtttacaaaagaactgctgcggttattatcttccgcgtgtattgatgagaccatgagaacgtatattacagaaaattaccttcaactattggaaagatcactaaacgtggaagatgtacaaatatattctgcattggtgttagttaagacatggtctttcacaaaattaacgtgtataaacttgaagcaactgtccgaaatctttataaacgctatttcaagacgtatcatgccaaaaattgaaaatgtcaatgaaagtgcggttaagctcgaggaggttcctaaagttgaaatatccgttgaagcgctggcatatttaagtctaaaggcctcggttaagattatgattaggagtaacgagagctttactgaaattctattaactatgattaaaagccagaaaatgacgcactgtttatatggtctcttagttatcatggcaaatttgtccactttaccagaggaatccaatggtagttcacagtctatcaatgacttaaaaaattacgcagatttgaagggcccaggcgcagacaaggtaggcgcagagaaagaatcaaaggaagatattcttttgtttaacgaaaagtacatattaaggaccgagctgatttcctttttgaagagggaaatgcacaatttgagccccaattgtaaacaacaagtggttagggttatatataacataacccgctcgaaaaacttcattcctcaatgcatttcacaaggtggtacaactatcatcttagaatatttggccaataagcaggacataggggagccaatacggattctagggtgtcgggcattaacaagaatgctaatattcactaatccgggcttgatatttaaaaaatactctgcattaaacgctatccccttcttgttcgaattgttgccaaggtctacgccagtggatgacaatccgttacataacgacgaacaaataaagctgacagacaattacgaggcactattagctctgacgaacttggcatcatcggagacctctgatggtgaagaagtttgcaagcatatcgtatctacaaaagtatattggtccacgattgagaatctgatgctagacgaaaacgttcctttgcaaagatcaacattagagctcataagtaatatgatgagtcatccattaacgattgctgctaagttctttaacttggaaaatcctcagagtttgagaaattttaatatattggtgaaacttcttcagttatccgacgttgagtctcaacgagcagtggctgctatctttgctaacattgccaccacgattccattgatagctaaggaactgttaaccaagaaagaactaatcgaaaatgctattcaggtatttgcggatcaaattgatgacattgagttaagacaaaggttacttatgcttttttttggattattcgaagtgataccggataatggcactaacgaggtgtatccgttgctgcaagaaaatcaaaaattaaaggatgctttaaatatgtctttaaagagaggcgattcaggaccagagttttcagcggcaattcccgttatccttgctaaaattaaagtctaa

SEQ ID NO: 78571 - DNA, 1215 bp, Saccharomyces pastorianus
atgaagagtgaaaattcacttaacccaagtgaaaaatacaacttcgaagagtgcaacgtgttgaaagaacccttcaaaaatagaaaagaggaaacgaaaaaaagaaaaagtagcatgctgtggaaaaattatgttctatccagttcccgaataacacgtaggcttcataagtcacctagaaagagcagcttctctaagaacttttttatcacaggctgcctactgacagttggagcagtaagcagttatttaacctacaggtacacaagtgagagggaaaacaaacatgagttatctccatcttattttgtcaagtacaagatttcacacaagcgagatattgattcatcacattttttattggaagtaactccgttgtttaagcagaaagttaacatatggtcattgatgactgcggaaaatctgtggtccgtcgagatcaaacaaccggaagtcatggtggtccgcaattatacgcctctaccgcttaaatttaacccagcttcaaaagagattgaaatcttaaaagatggtgacaatgcagatggaaaattatctttctatattaagaagtatgagaatggagaagttgcaagatggttacaccatcttcccaagggacatataattgaaataagaggcccgtttatcgattatgagtttcctcatttgcctaatgagctaaaaagatctcgcgattgtttatacatggataatcgcaacgaaaggggcaataacgttagagaaaattcccaatttatttaccagccttatgacataatgatgttcaccgctggtaccggaatagttactgcgttgcaactacttttgactgaatcaccatttagaggtactataaagttatttcatacggataagaacattaaacaactgggacccttgtatcctatccttttaagacttcaagcttcaaacagggtccagttaaaaatttttgaaacagaccgacaaactaaacaagacgtattgaaaagtatccagaaatcaatcacgaagccctacccatacaaaggtctgctccccttttccaacgttagcaacaagaatgttatgcctgtgttggcattggtatgcggccccgaaagttatattaatagcatatctggaagaaaatacgatcttaatcagggaccagtaggagggttactttccaaagaaggctggaactccgataatgtgtataaactttcataa

SEQ ID NO: 78572 - DNA, 777 bp, Saccharomyces pastorianus
atgggcagtagatcggagaatgtgggaacagtgactagagaaggctccagagtggaacaagatgatgtcctcatggatgatgactctgactcatcggaatacgtggatatgtggatcgatttatttcttgggagaaaaggccatgaatatttctgtgatgtcgatcctgagtacatcactgatcgttttaatctgatgaacttgcaaaagacagtttcaaaattttcctacgtggtacaatatattgtggatgatttggatgatagtatcctagagaacatgacacatgcccgtttagaacaattagaatcagattcccggaagctgtatggtctcatccatgcacgctacattataactatcaaaggattgcaaaaaatgtacgctaagtacaaagaggcggactttggaagatgtccccgtgtgtattgtaatttacaacagttgttaccggttggtttgcatgacattcctggtatagattgtgtcaagttatattgtccatcttgtgaggatctttatataccaaaatcatcgagacatagttccattgatggtgcatactttggaacaagttttccaggtatgtttttgcaagcatttccagatatggtacccaaacacccaactaaaagatatgttccaaaaatatttggatttgaattacataaacaagctcaactgacaaggtggcaagaactacaacgactcaagttagttgagaaacttgaatccaaagatgttgatttgacgaaaagtggtggttttaaaacctaa

SEQ ID NO: 78573 - DNA, 432 bp, Saccharomyces pastorianus
atgatcaccgctttaatgtatttttcttccaaattgggaaaagcatccttcaattcttgcaatattggattctctttagatggctcctcctcagacttccttctggcaggtaaggggggattctcctcctcctcttcttttgcatcctcagcgggtgtcaccacttcgtcctcatcaattcctgaggacttgttcaccttttcttcaaccttaggtgtaccatccttggcagaagtgtcattatcctttttcccatcggaatttaggtccacatccgtcgtctttgaaatatcctcattaattgattccggaacattactcttttcaaggagagaagaatccttgataccttccttttcttccatgattttgatttggcaatatcgttttgctgggggtggctacttaactagtctcaagctgtttatttga

SEQ ID NO: 78574 - DNA, 1236 bp, Saccharomyces pastorianus
atggaagaaaaggaaggtatcaaggattcttctctccttgaaaagagtaatgttccggaatcaattaatgaggatatttcaaagacgacggatgtggacctaaattccgatgggaaaaaggataatgacacttctgccaaggatggtacacctaaggttgaagaaaaggtgaacaagtcctcaggaattgatgaggacgaagtggtgacacccgctgaggatgcaaaagaagaggaggaggagaatccccccttacctgccagaaggaagtctgaggaggagccatctaaagagaatccaatattgcaagaattgaaggatgcttttcccaatttggaagaaaaatacattaaagcggtgatcattgcgtcccagggtgttttgagcccagctttcaatgccttactattcctatcagatcccgaatctggtaaagatatcgagttaccgacacaacctgtaagaaagaacccagaggcgccggcaagaagacggcaaactcaattagaacaagacgaattattggcaaggcaattagatgagcaattcaacagctcacattcccgtcgtcgtaatcgtgatcgcgcaactagaagcatgcatgaacagcgcagaagacgtcataatccgaacgaaagggagcaacatcacgaagacagtgaggaagaagattcgtggtcgcaatttgtagaaaaggacctgccagagcttacggacagagctggtcggtcattacaggacacagcaaacaaagttagtaactggataagtgatgcttaccggagaaactttgcgtcaggtaatgagcaaaacgacaaccaacatggtcaccaagatcagcaagaatgggagccagagattgtggatttgtcacaaggcgggaaaaattcaagaccccagcaacctgagagaagaagattcaattcgtttggcgttcaagtcggtgatgactctttagaaagccacggaatcacactacacaacgaagatggatttgaagatgatgaagatgtgccacctcagttaccaacgagaacaaaatctggtgagtcggctggaaaagtagtggcagagacaatctacattgatactccagatacagaaacgaagaagaaatggcagccgctaccaccggaacccctggatactacaccaactaaagtaaacgctgtttctagaaataagaaaaatccggatgaggatgaattcttaatcaatagtgacgacgagatgtaa

SEQ ID NO: 78575 - DNA, 1461 bp, Saccharomyces pastorianus
atggacgatataatcacgcaagtttctccagataatgcagagtccgctccgattctacaagaacagcaacagcaacagaactcacagtacgaaggtaacgaggaggattatggtgattcattgattcatttgaatattcaagaaaaccattattttattacgagggaccggttgatgtctctacctgaatccctattactgtgtttatttccctcaggtgtttttttggaccgttgtggtcaggtcattactaatttgaccagagacgatgaggtctacattgttcatttccctcctgattgttttgagtacatcatggagatatatacaaaagcgcatgatgatttgtataatcatcctgtggagaaattttttgacaggccatcaagtagctttgtttcgaatgcaaaggggttttttggactgagtagcaataattcaatttcgagcaacaatgagcaggatattttacatcaaaagcccgctattattgttttgagagaagacttggattattattgtgtacctcaggaggaatttcagtttgattctactaatgaagaaaataatgaggatttattgcgacattttatggctcaagtgaaaatggctgctggcagttatttaacttcaaaaacatcgattttccaaggtttgtattcttcgaatagactaaagcaacaacagcaacaacagaaaattgaaaaggagtccaattcttcttcaaatactaaatctacttcgaaaaaattgggacctgctgaacaacatttaatggatatgttgtgctcctccggattcactaaggaaacttgttggggtaacagaactcaagaaactggcaaaacggttataagttcactgtctctttgccgattggctaacgagacaactgaaggatttaggcaaaaatttaacgaggctaaggctaagtgggaggcagagcacaaaccttctcaagacaacttcatcaccccaatgcaatctaacatatcgattaactatttatctgcaagtaaatctaacagtaccatttctacagcaaggaatttaacaagcggaagtacagcacctgctacagcacgtgataagagaaaatcaaggctgtcgaaactagcagataacgttcgttcgcactcttcctcgagacatagttcgcagaccagaagtaaacctccggagttgcccaaattgtatgatctagtgccaaaacctaatatcaacgctaagctactattattttggagaaaacctgctcgtaaatgttggtggggtgaagaagacatagagctagaagtggaagttttcggctcttggaaagatgaatcaaagaaaatcattgaattgatcttgccaacaaacgttgatcctgaagcagaactacataaaatcattgtacccgtccgattacatattcgtagagtttggactttagagttgagcgttattggggtgcagtga

SEQ ID NO: 78576 - DNA, 474 bp, Saccharomyces pastorianus
atgatagaggcgttggaaatagttctattgctcgttatacaatcacttcaatatatctgtcgcacatgcatagcttttttgctaataccattcttaggcctgtatgcattcgatctcttcctatacgtttatcggatgatactttatctgtcacaaatgttcaactacaagagaaaactaggacgttctaaaacaaataataggccgcatagtcccaggctacataagatatacagtagtggggattgcatggataccttaattggccaagtaagggatttgagagtatttttgttatccacgatccacagccactctaaaagattcttttctacgagatttcagacaaaatcaggcattaactctgctattgacgcgaatgatgttgaaacaacatctgacgtatctagttttacaaatttacatttaacaaggtcatcggaagaaggttattatatcgcaggatcgatataa

SEQ ID NO: 78577 - DNA, 186 bp, Saccharomyces pastorianus
atggacggtatgtttgctatgccaggcgcagctgcaggtgcggcctccccacaacaaccaaaatcaagattccaagctttcaaggaatctccactatacacaattgcactaaacggtgccttcttcgttgcaggtgttgcgtttattcaatctccactcatggacatgttggccccacaattataa

SEQ ID NO: 78578 - DNA, 1449 bp, Saccharomyces pastorianus
atgagtgatacaaagagagatccggccgatttactagcttctttaaagattgataatgagaaagaggatacaagtgaagtttcaacaaaagagactgttaagtcccaaccagaaaagactgctgattcgatcaagcctgcagaaaaattagttccaaaagttgaggaaaaaaaaacaaaacaggaggatagtaatttaatcagctcagaatatgaagttaaggtcaaacttgctgatatccaggctgacccaaattctccattgtacagtgctaaatcttttgatgaattaggattagcaccagaactactaaaggggatatatgctatgaaatttcaaaaaccatccaaaattcaagaaagggcgctgccattattattacataatccgcctaggaacatgattgctcagtctcaatcaggtacaggtaaaactgccgccttttctttaacgatgctaacaagagtaaacccagaagacgcatctccacaggcaatttgcttagccccctccagagaactggccagacaaacattagaagtcgttcaggaaatgggtaagttcacaaaaataaccagtcagttaattgttcccgattcttttgagaaaaacaagcaaattaatgctcaagtgattgttggtacgccgggcactgttcttgacctaatgcgtagaaaattgatgcagctacagaaaattaaaatttttgttttggatgaagccgataacatgttggatcagcagggtctaggtgaccagtgtattcgtgttaagagatttttacccaaggatactcaacttgttttgtttagtgctacttttgccgatgcagttaggcagtacgcaaagaagatcgttccaaatgctaatacgttagaattacaaacaaatgaagttaatgttgatgccatcaaacaactatacatggactgcaaaaacgaagcagataagtttgatgttttaactgagctatatggtttaatgacaattggatcttccattatttttgttgcaaccaaaaaaaccgcaaacgttttatatgggaaattgaaaagtgaaggtcatgaagtttctatcttgcatggtgatttacagacacaagaaagagacagattaatagacgacttcagagagggtagatccaaagttttgattactactaatgtcctggcccgtggtattgatattcctactgtctcaatggttgtcaactatgatcttccaacgcttgctaacggacaagcagatccagctacttacattcacagaatcggtagaaccggtagattcggcagaaaaggtgttgccatttcctttgtacatgacaaaaattctttcaatattttatctgcaattcagaaatacttcggtgatatagaaatgactcgtgttccaacggatgattgggatgaagtcgaaaaaatagttaagaaagtgttaaaggattag

SEQ ID NO: 78579 - DNA, 1335 bp, Saccharomyces pastorianus
atgtttgtttcaccacccccagcaacagcgaggaaccaagtattagggaaaagaaaatcgaaaagacatgacgaaaatccaaagaatgttcaacccaacgctgacacagaaatgacaaatagcgttccttctattggattcaacagcaatcttccacataataaccaagaaataaacacaccaaatcactataatttgagttccaattcaggaaatgttaggagcaacaacaattttgttactacaccaccagaatatgcagacagggcaagaatagaaatcataaaaaggttattgcctactgcaggaactaaacctatggaagtgaacagtaatactgcagaaaatgcaaatatccaacacataaataccccggacagtcaaagttttgtttcagaccattcatcttcatacgaatcgagtatattttcacagccatctactgttcttacggacatcaccacaggcagctcgttaattgatacaaaaacacctaagttcgtcacagaagtaacacttgaagacgctttacccaaaacattctatgatatgtattctcccgaagttctgatgtctgatccagcaaatatactttataacggacgtcctaagtttacaaagcgcgaattgctggactgggatctaaacgatatacgatccttgttaattgtggaacaattaaggccagaatggggttcccagttaccgacggtagtgacctccggtataaacttaccgcaattcagactacaattacttcctctaagttccagtgatgagtttataatagcgacattggttaactcagacttatacatagaagcaaatctagaccgcaattttaagttgacaagcgcaaaatatacagttgcatcagcaagaaaaagacatgaagaaatgactgggtcaaaggaacccattatgcgtctatcaaagcctgaatggagaaatataattgagaactatttattaaatgttgccgtcgaggcccaatgcagatatgactttaaacaaaagcgttccgaatacaagagatggaaattactaaattcaaatttgaaaaggcctgtcatgccgcctccaagcctcataccgcatggttttaaaatacatgactgcactaactctggtagtcttttaaaaaaggctttaatgaaaaatttgcaactaaaaaactataaaaatgatgctaagacattaggtgctggtacacagaaaaatgtcgttaataaggtttctctaacttcagaggagagggctgccatctggtttcaatgccaaacacaggtttatcaaaggttggggttagattggaagcctgatggaatgtcctag

SEQ ID NO: 78580 - DNA, 453 bp, Saccharomyces pastorianus
atgtctgatataaacgaaatcgaaattccatccagaaaggatgaaattagacaagttactcccaaagatcccatgcatgagatcgaggataaaagcacataccacgctaagataaagaaatcagattccgggaccgtcctgggtgctataccgttgaattcaaggtcttctagtaactctagcgtgacatcgacgggtcagagcagtaggcgggtgactaagaaaacgaccaagaagaaaaagaagaatgcttgttatttcgatacctgttcaagtgcggcttcgaaattcatcggtgactgtaatttttgcaaaggtcacttttgctcgaaacacagattaatggaaaaccatgcttgtaatggcttaacgagctgcaaagaacagctacatcaaagaaacgctgataagctagaagctgaacaaactaaggctccaaagatacaaatttaa

SEQ ID NO: 78581 - DNA, 276 bp, Saccharomyces pastorianus
atgaaattagtcctatttaagatcgctgtagccctcctttatcttctttcttttttccttcatcgtcgtcgtcgtcgtcgtcgtcgtcatcatcatcatcatcgtcgtcgtcgtcgtcgtcatcatcatcatcgtcgtcgtcgtcgtcgtcgtcgtcgtcattatcttcatctttaccaccagtatcgttcttcttattatcatcctcctcatcgttatcttcatcctcttcttcttcctttcccgcagaaacatcgggataaccacctagtttga

SEQ ID NO: 78582 - DNA, 435 bp, Saccharomyces pastorianus
atgtgtacagacgttgctttcttttcgctggactgtctggccacctggttaggtggagtttgctccacatctgatctgagactacccaactttggatcgctgaatgtaacagttggtatcctttttaaccctggctctggtgtattacttacaactgccccagaagttccgctagcattcatgattgacttagtttgtgaaccagtgggactagttgatttccttactacaggagtgtccagactagaaacggaagaaaatggtcccgtagaatttgtgtcaggcattgccgatgaacctatattggcctgctcagctccagagagagtattcgaagcaacccctttcctattgtttttcaggctagatttgtttgtcattgcgtctctgcactataattatggccagtattcctctttctggtctcttctttga

SEQ ID NO: 78583 - DNA, 1380 bp, Saccharomyces pastorianus
atgaccgaaaaccaaaccgcacatgtaagggcgttgatattggatgccaccccattaattacgcagtcatacacacattaccagaattatgcacagtctttttatactactcccacagtttttcaagaaattaaggatgctcaagcaaggaaaaaccttgaaatttggcagagcctcggaactttgaaattagtacatccaagtgaaaactcgatagccaaagtaagtacgttcgccaaattgaccggtgactactccgtactgagtgccaatgatttgcatattcttgctttgacatacgagttagaaattaaactaaataatggcgattggagactgaggaaaaaaccaggtgatgcattggatgcgtccaaggctgacgttggtacggacggcaaacagaagctcacagaagataataaaaaggaggaggactctgaaagtgttccaaaaaaaaagaacaagagaagaggtggaaaaaagcaaaaggcaaaaagagaagcaagagaagcaagagaagctgaaaatgcaaaccttgagctagagagtaaagctgaggaacatgttgaggaggctggatccaaagagcagatatgtaatgatgaaaatataaaggaatcttccgatttaaatgaagtattcgaggatgctgatgatgatggcgattggattacccccgagaacttaacagaagcaattattaaggatagtggtgaagataccactggttcattgggtgtagaagcgtccgaagaggatcgccatgtcgcattgaatcgaccagagaatcaggtggcattggcgactggcgattttgccgtccaaaatgtagcgttgcagatgaatctaaatctaatgaatttcatgtcaggtctgaaaatcaagcgaatccgtaattatatgctaagatgccacgcctgtttcaaaatatttcctctaccaaaagacggcaagccaaagcacttctgtgcctcatgcggtggacagggtaccttattaagatgcgcagtttccgttgactcacgcacggggaacgttacaccgcacttgaagtcgaacttccaatggaacaatagaggaaacagatattctgtagccagccccttatctaagaactcccaaaaaaggtacggcaaaaagggacatgtacattctaaaccacaggaaaatgtgattctcagagaagatcaaaaggagtacgaaaaggtgataaagcaagaagaatggacaagaagacacaacgagaagattctaaacaattggattggtggcggttctgcggataactatatttctccatttgcaattactgggttgaagcagcataacgtccgcattggtaaaggaaggtacgtcaacagttccaaaaggagaagttag

SEQ ID NO: 78584 - DNA, 1188 bp, Saccharomyces pastorianus
atgcctgttgaaaaagatttaaaaactgcctacaaagctttgtatgatgagaaggaaccactgaaggccctccatctttatgatgaaattctcaaaggctcacccacaaatttaacggctctcatttttaaggcagcatgtcttgaaaagctatactttgggttttctgattggcacagcgatgcaactatggaaaacgcaaaggaacttcttgacaaggctctaatgacagctgagggtaggggcgatagatcgaagattggtcttgttaactttcgttattttgttcatttcttcaatatcaaagattatgaactggcccaatcttattttaaaaaagccaagaatcttggttacgttgatgacactttgcctttatgggaagatcgtctggagacaaaattgaataaaaaaaataaaaagcagaaggattcaactaataagcatacaattaaaccagtggaaagtattgaaaacagaggagataataattcttctcatagtcccatttcacctctcaaaattgaaatcgctcctcaagaatcccctaaatttaaaatcgattggtatcaatccagcacctctgtcactatatcattatttactgttaatcttcctgagtctaaggaacaagtcaatatatatatttctccaaacgatagaagaactttatcgatatcgtaccaagtaccgaaatctggatctgaatttcaatacaacgctaagctttcgcatgaggtggatccaaaagcagtgtcattaaaaattttcccaaaaaagctggaaattaccttgagcaaaattgatagcacgcaatggaagaagttggaagaagatattttaacggaatcctcaaggttatcagatgagggtaaaaattctgattctgcaacccgcttattatcagcagaaacggcatcaaaagagagattgtcttatccatcgtcctctaaaaaaaaaatagattggtctaaacttgacattgatgaagaagctgatgaagaagcgggatcggctgatagtttctttcaaaagctttacgctggagcggatccagataccaaaagggctatgatgaaatcctttatagaaagtaatggtactgcattgagtacagactgggaagacgtatctaagggaacggttaaaacttcaccaccagaaggcatggaacctaaacattggtaa

SEQ ID NO: 78585 - DNA, 2658 bp, Saccharomyces pastorianus
atggagacagcaacttcttcccctttgcccattaaatcgaggagaaacagcgaaaattctgggtctactacagttataccgcatatgaacccttctttagcaacaccgttgactgtgtcgaccatggtaaatcaatcaaattctaaagaatttatgaagttgaccccagttcgtattagagattttggttctcctttgaaaaacgtgtccactaattaccattttttagactcagaaaatggtaaaggtaacacaatggataatatgtatagagaaaatttcattcttatttcaaaggatctagagaaattactggagaatctcaatgtcatatatcaaaatattgggtattctaatacggaaattatcaccaaggagaaaatcatattcaccactatatctaattccataaaacaattttttgagcaagctgacgaagaattgaaaagactgtccgcagagaacggaattgaacaggatattctaaataacattctagagagaataaatgacccaagtggcataaagactattcctgacttatacattagaaatgctattctactgcaagaaagtaaaactgtgccacagtcaccgaaaaagccactttccttactaagcaaaaaagcagcattagatacagcaaaaaaatttgtcctaggaagttttttacccaggctccgcgactatttaaaatccttaatcactctaaaacacctcatacaatctgtaaaagaaaaccttcctggattgacagaagcagataacgaggctatcgccgagtttccagaattaagcacattaaccgcatatttgtcacaaatagaaaatggtaaaggcgatattggtttgtccatgaaatttattatagataatagaaaagatattttaaagggatcggcatttaaaactattaacgaagaatctgtgaaacacatgaatgaagtcataaaaatttacgaggaagaatacgagaggaggtttaaaagcgtactcacaaaaaaggttagtatttcatcaatatgtgaacaacttggaactcccctagcaacgttaatcggtgaagattttgaacaagatctaagatcatatggagaagaggaaaactccacatcagaaataccaaatttccacccggtagacagagaaagaatgtctaaaattgatactacattggaaaaactgcaagctatccataaggaaagagcagacaaaaagaggctcctgatggaacaatgccaaaaactttggacaaggctaaaaatttctcaagaatacataaacacttttgtgcgtaacaattcaagcttatcaaccgagtccttaggtagaatctctaaagaagtaatgcgacttgaagcaatgaaaaaaaaactaataaaaaaacttatatcagattcctgggacaaaattcaggaattgtggcgtacgttacagtattcagaagaaagtcggtctaaattcatcattgtatttgaagaactaaggaacagtgcaacaactttacaggaagatgagcttcttctagaaacttgcgaaaatgagctaaaaagactagaagaaaaactgaccctttataagccaattttaaaattaatatcagattttgaatctttacaagaagatcaagaatttttggaaaaaagttcaaaagactcttcacggcttttgtctagaaattctcataagatattactaactgaagaaaaaatgaggaaaaggataacaagacactttcctcgagtcatcaatgatttaagaattaaattagaagaggccgatggtctatttgatcaaccttttttgttcaaaggtaagccactttcagaagcaattgacattcagcaacaggaaatcgaagcaaaatatccaagatgtagagttagaatgcagggatctaaaaagggaaaatgtggtgcgaacaaagagaataaagtcataaaaaacactttcaaggccacagaaagttccatcagggtaccgattggtttgaatttaaatgatgccaatattacttataaaacgccttcaaagaaaacaatacaaggcttaacaaagaatgatctatcccaagagaactcgcttgctcgtcatatgcaaggaacaacgaagttatctagtccgaacagaagagcaacaagattactagcacccacagtaatatctaggaattccaaagggaatatagagagacctaccttaaacagaaacagatcatccgatctttcatcatcgcctaggataaatcatacgcatggcgaacatgcagtaaaaccacgccaattgtttcctatcccgctgaacaaagtcgacactaagggtagtcatatccctcaattaactaaagaaaaggctttagaacttcttaaaaggtcgactggcaccacgggtaaggagaatgtacgaagcccggaacgcaaaagctcattagaagattacgcacaaaaattgagcagtccttataaagaacctgagcacagcatatataaactttccatgtcgccagaaggtaaatttcaattaaacattcaacaaaaagatattgaaagcggatttgatgataccagtatgatggaagatgaaaatgataaggattttattacatggaaaaatgagcaagtttcgaaattgaatggattctcctttacagatatttga

SEQ ID NO: 78586 - DNA, 774 bp, Saccharomyces pastorianus
atgtcacggaaattatgcacactaaattttactcttagcggaaagcagggaagtttggtcattagggatatccaactttggagcaatcgacctacagcaagtaaatcaacttcagagttgaggggacaattcattcagtatgtagatctcgcaaaactgcctttgtgggtccgctccacaaatatgaatacatatagatgttatagtaccagtgcaaccgcacaggcttacttcaaatcaaaactaaggaacgcgaatcgtggcattgtcattgaattgtctgacaaggttgatcagcgatcgcaggagccagcatacttgattatatttcgagagaacacagagttaaactgctttcaagtggatctaacaatgaagcatgagtttgatggccaggtcaccaaattgaagcaagagattggaaagacaagggcctccgtatcaaaggaaggtagtattgatataataatacaacaatctcaacaaaggaagatcggaacgaaaacgaaagtgtatcgcaacgtgcatattaatgacaaacggcttcaattcaatgaaactttgtccaagctaattttgggtggcctccgacttcgaggtatttctaattctattacagactatcaaaagttatacaagataacgtttgatgcagctgaatttacgcacagggatgaattaaaacgcatttcgatgggatctggtgaagaggtttcgtttgaatcattgcaggaaactgtggaaactcttctgaagctctttaccaaatcatga

SEQ ID NO: 78587 - DNA, 1020 bp, Saccharomyces pastorianus
atgccattacctccgtcaacattgaaccagaaatctaatagagtctactctgtagctagggtgtacaagaatgcttgcgaggagagaccacaagaatactgggactacgaacaaggggtgaccatcgattggggaaagatttccaattacgaaattatcaacaaaattggaagagggaaatattccgaagtgttcagcggtagatgtattgtaaacaaccagaagtgtgttattaaagttttaaaaccagttaaaatgaaaaaaatttatagagagttgaaaattctgaccaatctaacaggcggccccaatgttgttggcctttatgatatagtacaagacgctgactccaaaatacctgctttgatctttgaggaaatcaaaaatgttgatttcagaactttatatcctacattcaaacttcctgacatccagtattatttcacgcaattattgattgcgttagactactgtcactccatgggcataatgcacagagacgtaaagcctcagaatgtcatgattgatcctacggaacgtaaactaaggctgatcgattggggcctggcggagttctaccatccaggtgtagattacaacgttcgtgtcgcttcgcgttaccacaagggaccagaacttttagtaaacttgaaccaatatgactactccctagacttatggtcagtaggatgcatgctagcagctattgtcttcaaaaaagaaccttttttcaaagggtcgtctaatccagatcaactggtaaagattgccacagtactaggaaccaaggaactgttaggctatttgggtaagtacgggttgcacttaccatctgaatacgacaacattatgagagactttacaaaaaaatcgtggacacactttataacctctgagaccaaattagctgttcctgaagtggttgatttaatcgacaatttattaaggtatgaccatcaagaaagattaacagcaaaggaggctatggatcataagtttttcaaaacgaagtttgaataa

SEQ ID NO: 78588 - DNA, 807 bp, Saccharomyces pastorianus
atgactagtttagatgacagtgtgctgacaaaaaaaaatatagcactattagacaacgccaccaactatattcgccccgccatagattattttcatttcaaatttaaatatgatagcttggacgtgtccactacctggcgcttgttgctgaaaatgcgcaagcataaattattgcggttacccagttgctcttctgaaaatgagtttgactatagcatatatatggctaggttgtatcattgtatatggaggaggtggtccataaagcacttcaatttagatgaatacaaaattgatccactaagcataaactggaataaagaaatagacgttactgttctttacggacctgatctggttggaatacatgaaagagcgcaacctactccaacggactttcctatggggaatataaaggaacaagggaagcaattattggatgtaagaaaggagggaagtggttcttcattgctgaaaaaaggcagcgtattttactcaaagggtaaatggctctctcagcgttcaatatcattcgatgacactgttcgtaggcgagatattgacaaacgtgggagatttcgtgaatcatgtgttctaataaatgatgtagaacaatttcaaaactattccattgtctgggacgagagtagacatcgctaccgtcggcaggcacttccagacacgtacgattacgagcatctctatcccaatggcgacgaaactcctcggaacacgcctcacgacagtataataattcatcaaaacttgcatagcattacggaaggctcttatatctatataaagtga

SEQ ID NO: 78589 - DNA, 1164 bp, Saccharomyces pastorianus
atgtctcacagaaagtacgaagcaccacgtcacggtcatttaggtttcttgccaagaaagagagctgcctccatcagagctagagttaaggcttttccaaaggatgacagatccaagccagttgctctaacttccttcttgggttacaaggctggtatgaccaccattgtcagagatttggacagaccaggttctaagttccacaagcgtgaagttgtcgaagctgtcaccgttgttgacactccaccagttgtcgttgttggtgttgtcggttacgtcgaaaccccaagaggtttgagatctttgaccaccgtctgggctgaacatttgtctgacgaagtcaagagaagattctacaagaactggtacaagtctaagaagaaggctttcaccaaatactctgccaagtacgctcaagatggtgctggtattgaaagagaattggctagaatcaagaagtacgcttccgtcgtcagagttttggtccacactcaaattagaaagactccattggctcaaaagaaggctcacttggctgaaatccaattgaacggtggttccatctctgaaaaggttgactgggctcgtgaacatttcgaaaagactgttgctgtcgacagcgtttttgaacaaaacgaaatgattgacgctattgctgtcaccaagggtcacggtttcgaaggtgttacccacagatggggtactaagaaattgccaagaaagactcacagaggtctaagaaaggttgcttgtattggtgcttggcatccagcccacgttatgtggagtgttgccagagctggtcaaagaggttaccattccagaacctccattaaccacaagatttacagagtcggtaagggtgatgatgaagctaacggtgctaccagcttcgacagaaccaagaagactattaccccaatgggtggtttcgtccactacggtgaaattaagaacgactttatcatggttaaaggttgtatcccaggtaacagaaagagaattgttactttgagaaagtctttgtacaccaacacttctagaaaggctttggaagaagtcagcttgaagtggattgacactgcttctaagttcggtaagggtagattccaaaccccagctgaaaagcatgctttcatgggtactttgaagaaggacttgtaa

SEQ ID NO: 78590 - DNA, 930 bp, Saccharomyces pastorianus
atgttttcaaatctatctaaacgttgggctcaaaggaccctctcgaaaagtttctactctaccgcaacaggtgctgctagtaaatctggcaagcttactcaaaagctcgttacagcgggtgttgctgccgccggtatcaccgcatcgactttactctatgcagactccttaactgccgaagctatgaccgcagctgaacacggattgcacgccccagcatatgcttggtcccacaatgggccttttgaaacatttgatcatgcatccattagaagaggttaccaggtttaccgtgaagtttgtgccgcctgccattctcttgacagagttgcttggagaactttggttggtgtttctcataccaacgaagaggttcgtaatatggccgaagaatttgaatacgatgacgaacctgatgagcaaggtaaccctaaaaagagaccaggtaagttgtccgattacatccctggcccatacccaaacgaacaggctgcaagagctgctaatcaaggtgccttgccacctgatctatctttgatcgtgaaagctagacacggtggttgtgactacattttctctttgttgaccggttatcctgatgaacctcctgctggtgtggctttaccatcaggttctaattataacccttacttcccaggtggttccattgcaatggcaagagtcttgtttgatgacatggttgagtacgaagatggtacccccgcaacgacatctcaaatggcaaaggacgttaccacctttttaaactggtgtgccgaacccgaacatgacgaaagaaagagattgggtttgaaaacggtgataatcttatcatctttgtatttgctatctatctgggtgaagaagttcaaatgggccggtatcaaaaccagaaaattcgttttcaatccaccaaaaccaagaaagtag

SEQ ID NO: 78591 - DNA, 1890 bp, Saccharomyces pastorianus
atggataaaagcatgatcaaaaaaagaggcaggcctcccatcaccaaagattatcccaatcccctacaaagccccatggcgcattcttcaatgcaggttcagaagcaggggcctcacagttttgccaaacctttgatgaaagtggggcaatctagtccatccccgaataaaagaagactcagcatcgatcatcatcataatttggcggcaactacgagaaagggcagatacaggggcgttcttctttctactcccaccaagaaatcgagcactaatggctctacgccgatctctaccccgtcttcgaatgacagctataataacacggtattttctgaaacaaggaaaacctttcttcagagttcgccgcctatcatgacgtcttctccagctttccaaaagaaaaatgactacatgtttccttcacaggaccaattcaaactttctttaaccattaccgaaagtgggaaggccgttattgcaggatctttgcctttctctccatcgtcaaaatcgtctcatttaatgaacaataataataaaaagatcatgcaaaatgaaaaaattcacaaaggaagcaagaaaaatgcacccaagtttgagaagaaacgtattctttctctcttaaaacagatgaagaatgagaaatactgtgatactgatacgctccccgaagcacctccagcgaaaccaagcagatctgacatcatcgacacagaattgccgactatcatagaaacttcagcttctccaataggcagtgctagaaacaataatatattgctttcgcaaccaccacaatcacccccttcaagcgcgcaacttaagcccccatccactccaaagagttctctacaattcaggacgggatttactcccaatgttgcactaaattccgtatcattaagtgatactatatccaaatctacaaatgctgtgggtgccagcaataataacaatcagaacggtaattccattagcaatatcgcggatgctaatactttacttaccttgactaatagcccaggagttttcttatcacctcgaaacaaaatgttgcccaagtcgactactgcatctaacgaacaacagcaggaattcgtgtttaagttttcaagtggtgacccgttattgcttactgacgacgcagatgggaattggccagaaatgctgttcaatgtatctaatacgcccagacgtcaaaaatgttttaatacacctccttcatggataaactttggttcacctggattattcagcccaccaagaagctctaatgtcatggtaaatggcaccactgtagccaccgcatcggatagcggcaacgtccatagacaattacaagctcaattggaggcgcaagtgcaagtgcaatcgcaatccaattctcctactcaaaggcaacaacaacagcgtcaatttcaaatacccccacctcacataaacatgaactcttccccgccacaaatcaatatcgcttccccaccccatcaatctatgtctcgggtgtcatctatttacttcaacaaagaaaaaaccacaacaggggtagcaaatatgctaggtaacaccaaaagcgaaaacttacagccgccggcgaatttatttaccgctgcccatggaccttcaactcctagaaatcaagaatttcaattacccactttgattgaatgcactccattaatccagcaaaccatgaatggctcattgggaaccaagtacataccaggtacttccatttcgaacagtgcaactcctaatttacacgggttccctgttggaaccgggaaagctccctctagctttgacgattcactaaaacaaaacccgtacagcaacaaacaggatgatgctagaactgccttgaaaagattaatcgatgatcagtga

SEQ ID NO: 78592 - DNA, 345 bp, Saccharomyces pastorianus
atgctttttgaagtatttggtgaagtgttagcatcgtatatcgtatcgtcaaaaactaagggagagttggcgtttccagtgaacaatgcgccaccggattctcttgttgcaataaattgtgtagtgctattcttgagatcagcaatcggatcctgttcaggggctaaagaattaataagatcgtcagctttggaattgtcatgctcctctagttgcggattaccagccaccgacaaaccagggtctttccattctggcgcactatccaagtctatcttgtccgcaaatgaagctgtggtctctaaaagctcattgtcttttctttcttcatttgtagatatttga

SEQ ID NO: 78593 - DNA, 1914 bp, Saccharomyces pastorianus
atgggtgtgagatccgctgcaaaggaaatgcacgaacgggaccataattcggacagttccagtttagtaacttccctgatgaaatcttggaggatatcgtcggcttcttcctccaagaagccatcgttatacaaaatgaatactactgaatctactagtttaccctcgggttatgcttcctcggcagatagagatcggagaaccagtgacggtaattttgaagctatggcaaagcaacaagcaagcactagacgtacctcgaattcctattcacctctacgatatgtaagccccactctaagcactgcaagtaacgaaagtccccggcctgctttactcttacgtcagcatcaccagcgtcatcaccaccatcaacaaccccgccatagcagtagtggtagtgtaggcaacaattgcagtaacagtacagagcctaacaaaaagggtgatcgatatttcaaagacttagatgaggattggagtgctgttattgacgattataatatgcctattcctatacttactaacggtggatttggtacacctgtagctccaacgagaactttgtcgcgaaaatccacttcttcttccatcaattcgatttcgaatatggggacctccgcagtacggaattctttctcctcttttacataccctcaattaccacagctgcaaaaagagaaaacaaatgattccaagaaaactcagttggaaatcgaaaacgaacgggatgttcaagaattaaactccatcatccagcgcatttctaaatttgacaatattttgaaagataagacaatcataaatcaacaggatctgcgccagatcagttggaatggtatcccaaaaatacacaggcctgttgtttggaaattattaataggttatttgcctgtgaacaccaagagacaggagggtttcttacaaaggaagaggaaagaatatagggatagtctgaaacataccttttctgaccagcactcaagagatatcccaacttggcatcagatagagatagatataccgagaacaaatccccacattcccctctaccagttcaaatccgtacagaacagtttacaacgaatactatatctttgggcaatcaggcatcctgctagcggatatgtgcaaggtattaatgatttagttacaccatttttcgagacttttcttaccgaatatctgccgccttcacaaatagatgatgtagagataaaggacccctctacttatatggtagatgaacagattacagatttagaagcggacacgttttggtgtcttaccaaattgctcgaacaaattaccgataactatattcacggacaaccaggcatattaagacaagtgaagaatttgagtcagctagtgaaacgaattgatgctgatctatataaccattttcaaaatgaacatgtggagtttatacagtttgcattcagatggatgaattgccttttgatgagagaatttcaaatgggtacagtaataaggatgtgggacacatatttatctgaaacttcacaagaggtcacttcttcttattctatgtcgtccaatgacattaaacctcctgttactccaacagaacctcgagtggcaagttttgttacaccaacaaaagatttccaatctcccaccacagctctttctaatatgacaccaaacaatgctgttgaagacagtggaaaaatgagacagtcttcgttgaatgagtttcatgtgtttgtttgtgctgcattcctcatcaagtggagtgaccagctaatggaaatggatttccaagaaactataactttcttacagaaccctcctacaaaggactggactgaaacggatattgaaatgcttctgagcgaagcctttatttggcaatctctttacaaagatgctacgtcgcactggctgtaa

SEQ ID NO: 78594 - DNA, 1797 bp, Saccharomyces pastorianus
atgagcttcagtagtatagtctcaaagtttttgagatatttagaaattcctgccaaaaataggactgccgtgaattttctgaggaaccctgatttgcaacctatcaagtctgcaaatcaaacatgggggttctggtctaatttggcgtactggggcgctgtgtcctttacagcaggtacatggatgagtggttctgctgcactaagtgtcggcctaagttacccagagaccattgtttcgtttcttctcggtaatgtcttgaccattattttcactatggccaactcttaccccggttatgattggaaaatcggtttcaccttggcccaaagattcgtttttggcatttacggttcagccttcggtatcatcattagaattttgatgagtattgtcaattatggttccaacgcttggttgggtggtctatctatcaacatgatattagattcctggtcccaccactatctgcacctgcccaatactttgtccccaagtgttgccatgaccaccaagcagttggtcggcttcattattttccacgtcctcaccgcgctctgctatttcatgaaaccctaccatatgaactaccttttaatttggtcatgtgtagctacttgctttgccatgctgggtatagtgatttacttgactaagaatgcccatggtgtcggtgaattgtttacctccacaaaatctaccgttactggttctaaaagagcatgggcttgggtttacatgatttcatactggttcggttccatttctccaggttccaccaaccaaagtgactattcaagattcggttcctccaatttggctatctggaccggtagcgtctgtgcattactaatcccagcaaccttggtcccaatcttcggtgtcattagtgcctccacctgcgacaaattatacggtaaacaattttggatgcccatggatatattcgattattggttgacaaacaactattctgcaggcgctcgcgcaggtgccttcttctgtggtctttgctttaccatgtctcaaatgtcctccaccatctccaactgtgggtttgccactggtatggatatggccggtttgttgcccaaatacgtcgatatcaagagaggtgctcttttttgcgcatgtatctcctgggcttgtttgccatggaacttctacaactcttcttctactttcttaactgtcatgagttctttcggtgttgtcatgactcctattattgctgtcatgatctgtgataactttctgatcaggaagaggcaatattccattactaatgcctttattctaaagggtgaatactattttaccaagggtgtcaactggagagctatcgttgcctgggtgtgtggtatggctcccggtctacctggtatcgcttgggaagtcaacaataactatttccacgactcaggtattgttaaattcttttatggtgattctttcttctcctttttgatttcttttttcgtttactgggggctatgtgtcttcttcccattcaaaattactgttagacatgatgacaaagattactatggtgcatttaccgacgaagaagcgagaaagaagggcatgattccatacagtgaaatttctgaggaagaaatccgtgcttacacgttaggcgaatgctacacaactggacacgaatacaaacctgagagttctgataacgaatcacctgaattgatcaaaactagctcagaaaacactaacgtatttgaaatcgttcaccaaaaggatgatgaaaagcactcctttagtaccactcaacaagttgtctga

SEQ ID NO: 78595 - DNA, 315 bp, Saccharomyces pastorianus
atgctgacgaaagttgtgttcctctttttttggagcaggtctgactcaactaaaaagctagctgcatgcaaccacgctacattggcacactatatcctgacgctcgcgctatactctgacgcctgcgctatatattctgacgcctactccataactattatagtagtggccactgttgttcgtaacccggcgcggtgttcgctccgagcacgaaaattctgtcgtttattctcttccttcttccagttccattacttaaaggagctgttttatttcattcgaaagcccgatgacaaattctcctctttcatataa

SEQ ID NO: 78596 - DNA, 249 bp, Saccharomyces pastorianus
atgacaaattctcctctttcatataaattaataaggcggtcagcaggaaactcctattgccaaccgtcttgcgaaccgaccggtcgctgcgcgcgatcatgcgtccacgcgcttctgtggcgacggacgactacagcaagacattactctggtcatttacgcctggcgcccagaatgtacaagcgcagacggccagatcatatgatgaaacggaatagtcccagctataccggtgatcacaagacgtag

SEQ ID NO: 78597 - DNA, 162 bp, Saccharomyces pastorianus
atgattctcgctttgggcgacttcctgactaacaggaagacaaagcatgcgagaggccctgggttcaattcccagctcgccccttttatttttgattatttatttcctattggtcgggtaacagattttttttatttttttcaaggcccttttgttttgtaa

SEQ ID NO: 78598 - DNA, 1773 bp, Saccharomyces pastorianus
atgccgaagagaaaaattgctcctaacaaggaaagcagcaggcgtacggtctcccacgatgatttaaccccacaaatacaagaatttcaaaatctaatggatctcgaatcgcaaaaagtggaaaacatcagacagtcgtattcgaggcaaaactccctgctggccaaggataactccatattgaaaattaaagttaatagcttggaaaaaaaaataagccagctggtacaagaaaacgtgactctacgatctaaaacctctataagcgaagctatctacagggaacggttaagtaatcaactacaagtcattgaaaacggtattattcaaagatttgacgaaattttttatatgtttgagaacgtacgtaaaaacgaaaatttgcccagttcgagcttaagaacaatgttgaagagaacgagttccaggtcaagatcatgctcattgtcatcacccacatactcaaaaagttacactaggttatcaaatcacgagaataacctgtcgcatgaatcaagttttaacaaggacgatggtccagaccttgaacctaaggctaaaaaaaggaagagttctaggcggcaatctatgtttgtatccacgagtttagaacctgaagacgaaaccggtgaaaacgaagccatgatggaaaattcctctgtagaggtaccggcagaatcacacgagactgcgcaagtggaggaaacaatggatgccttaaaccctgaagaggaaaatagcgattctgtcagtaattttaccaattcaattatagaatactccataccagaggagaatccgacagaacccgagcattcatcttctaaactagaaatattcaatgacagtacgaatatgctaagtacagtgccgtcaaatcctttaccgttacctttaccaggcccatccgcaactttacctagtaccactagcgatgcttcaacggtctatccttcatcaagttcttctactaattctcatccaaagaccaaaattaagcattccatgaagccgcctaggatagaactgaagaaaaaggttattgacgaagtcatgcccgtaagtaacatgagcagcaacagcgaaatatcatttacgagaactagaagaactcgtggtaaagctgtagattacactttaccttctttaagagccaaaatgagaaggccttcagaaaaacttgtggatgctactactgtgattgatatacatgatctacaggtttccaagagaaatcgggaaacttcacataaaaggaaaagtttatcccaagattcaatacccgacgaaccgcaattgagagaagtcgtcgtctcaaaagattatggaactccaaaagggaaaaaaacggaagatgaaatacacgaggataccgcttatctaatggccacttccaacaacaacagcaacaacaaaaacgaaaaaaaactaactagcaacaatagccctaaaaaatcgtcacctttacttgacattacaaataaatcggagaataaaaaaaagtcaacaagaactaaaaaattgttcaaaaatgcaattgtcaataatttatctgatgaaaattctactacgcgaccctccaagtcgtcaaagggaaccagtaataataacaacaattacaacaatttcgacaataacaattcaaacattaataatgttaataataaatctgttagctttagactaaatgaagatgatttagcagtatttgatttatttggaaatggtaaggcagtgaaacatcaaccaaaaacatatcgcaccaaaaaatga

SEQ ID NO: 78599 - DNA, 915 bp, Saccharomyces pastorianus
atgactatggacggaaaaaacaaagaagaagagcaatatcttgatctatgcaaaagaatcattgatgaaggtgaatttaggccagatagaacaggcactggtacgttgagtctttttgcaccaccccagctgcgttttagtttacgtgatgataccttcccactactaacgaccaagaaggtctttactagaggtatcatacttgaactattgtggtttttggccggtgatacagacgctaacctattgtctgagcaaggtgttaagatttgggacggtaatggatctcgtgaatatttagataagatggggttcaaagataggaaagtaggagatctggggcccgtttatggatttcaatggaggcattttggtgctaaatacaagacgtgcgatgacgactatactggacaaggtattgatcaattgaaacaggttattcataaactaaagacaaatccctacgatagaagaatcattatgagtgcctggaacccagctgattttgacaaaatggctttgccgccatgccatattttttcacagttctatgtcagtttccccaaagaaggagaaggatccggtaagccccgcctttcatgcttattgtaccaacgttcttgtgatatggggttgggagtaccatttaacattgcatcatatgctttgttgactagaatgattgctaaagttgtcgacatggagccaggtgagttcattcatactttgggggatgcacatgtttataaagaccacattgatgccttgaaagaacaaatcaccagaaatccaagaccattcccgaaactaaagattaaaagggacgttaaagacattgatgatttcaagttgacagactttgaaattgaagattataatcctcatccaagaattcaaatgaaaatgagtgtataa

SEQ ID NO: 78600 - DNA, 234 bp, Saccharomyces pastorianus
atgatacctctagtaaagaccttcttggtcgttagtagtgggaaggtatcatcacgtaaactaaaacgcagctggggtggtgcaaaaagactcaacgtaccagtgcctgttctatctggcctaaattcaccttcatcaatgattcttttgcatagatcaagatattgctcttcttctttgttttttccgtccatagtcatcctgtaccgttctgttatgaagctctctccttga

SEQ ID NO: 78601 - DNA, 1041 bp, Saccharomyces pastorianus
atgatgtctgatttaacaccaatattccgtaagtatgttgctgttatcgatgatgctagaaatgagcaaaatagtatagatgatcatgttgaaaggaaacaagaggacttcgggaattctaatggaacgtgtgaaatgtttagggattcgttcattaaggaatgtgcaagactattgaagttcctagtcgaattaaacaaggtaataaaacagattgaaaaaaactatttagatgactttaatatgagtgatgcggaaaaggacgagtttgacatggaatgcaggctgcaaattcaacaatatttcaaaaagtttgaattcctagagaattacgaaatggaaaggcatagtttgtcgctgaaaagatttcagtcaaagtctcacagatggtcaaaaatactttccaataaaaacgacaacactaagcatgtgatacatccgcaagacattgaaaatggagttcatgaatttagattaggtgtcctacggtgtttgaatttgtggataaaatatgtttcatccaaattcactaccatacaacaggaaagattgatattagaaaataaaatgaatttcaattcaacgcctatgcctactttatccaacaatgcggatgatttctctgcagatgcaatagacatctcagtgtcacaatctgctcccgtagaaactgtacaagacgaagtaaaacattatgaagagacgatatccaaattaacccgggagcaactacaagtgttggagacagaacattcggaactgctaaatcaaaaaaatgagcaattgaaaaaagtggagactataaacaaaacaattttagacattgtcaatatacagaacgaattgtccaatcatttaacggtgcaatctcaaaatataaatctaatgctgaacaatcaagatgacattgaattgaatattaagaagggaaataaagaattacgtaaagcgaaacgagctgctggaagaactgctaaaatgaccacttatggtgccattatcatgggtgtttttatattgttcctagattatgtaggttaa

SEQ ID NO: 78602 - DNA, 2244 bp, Saccharomyces pastorianus
atgtcgttattagagcaattagcaagaaaaagaatagaaaaatctaaaggccttttaagtgcggaccagtctcatagtacatcgaaaagtgcatccttactagaaagactacataagaatagagaaactaaagataacaatgctgagacaaaaaggaaggatctgaagacgctacttgcaaaagacaaggtaaaaagaagcgactttaccccgaaccagcatagtgtttcattgagtttaaagttgtctgccttgaagaagtcaaatagtgatttggagaaacaaggaaaatcagtgacattagaaagcaaagaaaacgaactccctaccaaaaggaaatcgcctgatgataaactcaacttagaagagtcatggaaggctattaaagaaataaaccattactgtttcttgaaaaacgatccatgcataaatcaaaccgacgattttgcgttcacaaactttatcataaaagataaaaaaaactcgttgagtacatcaataccgctatcgtcgcagaattcatcatttccgcccttaaaaaagcataacaatgagctccttggtatttttgtgccttgtaacctgccgaaaacaactcgtaaagtagccattgagaatttcaatagaccaagtcctgatgatataatacaatcggcccaacttaatgctttcaatgaaaaattagaaaacttaaatatcaaatctgtgcccaaggccgaaaaaaaggaaccaattaaccttcaaacaccacctactgagtcgattgatattcattcattcattgccacccatcctctgaatttgacatgtttgttcctcggtgatacaaacgcaggcaaatccactttgcttggtcatcttttatatgatctaaacgaaatttctatgtcatcaatgagggaactacaaaaaaaaagcagtaatttggatccttcatcttcaaatagttttaaggtcattctagacaatatcaaaacagaaagagaaaatggattttccatgtttaagaaagttattcaggtagaaaatgatttactaccgccatcatcaaccttgacgcttatagacactcctggtagtatcaaatacttcaataaagaaactctgaactcaattttgacctttgatcctgaagtttatgtattggttattgattgcaattatgactcgtgggaaaaatcattagatggtccaaataatcagatttatgaaattttaaaagtgatctcttatttgaacaagaattccgcatgcaaaaagcacttgataattcttttgaataaggcagatctaattagttgggataagcaccgactagaaatgattcagtctgagctaaattatgtgttgaaggaaaactttcagtggacagacgcagaattccaatttatcccgtgttcgggtttattaggttcgaatttgaataaaactgaaaacatcacaaaatctaagtataagtcagaatttgactctataaattatgttcccgaatggtatgaaggtccgacatttttttcgcaactatatctattggtagagcataatatgaacaaaatagaaacaactttggaagagccatttgtaggcacaatactgcaatcttctgttcttcaaccaatagcggagataaattacgtgtcactcaaagtcttgatcaacagcggatatattcaatcaggccagacaattgaaattcatacacaatatgaagattttcattactatggtatagtttcaagaatgaagaattcaaaacaaatactggagactaacacaaaaaataatatatcagtcggtttgaaccctgacattttagaggttcttgttaagattcataataccgaagacttcacgaaaaagcaatttcacattcgtaagggtgatataataattcactctagaaagacgaatacactatcaccgaatttaccaaacacactaaagttgttagccttgcgtttaataaaattatcaatacaaacgcacgcgctaagtgatcccgttgacttgggttctgaattgcttctttaccataatttgacgcacaacgcggtgaaattggtgaagattcttggaactaacgacatctcaattaatccaaatcagtcacttattgtcgaagtcgaaattatagaaccagactttgctcttaatgtgattgattccaaatacattaccaacaatattgttttaacatcaatagatcataaggttatcgcagttggcagaattgcatgccagtaa

SEQ ID NO: 78603 - DNA, 699 bp, Saccharomyces pastorianus
atggcagattatgatagtgcgaaatattggtccaagcagggagctcgtcgtgggttacagaaaacccgttactactgccaaatatgccaaaggcaatgtaaagatgcaaacggatttcaatcacataacaaatcgccatctcatttaaggaagattagtcaagtgacagctgaggacgctaggcgctacaatatccagtttgaaaagggatttctacagttattgaagcagcggcacggagaaaaatggattgatgctaacaaagtatacaacgagtatgttcaagatcgcgatcatgtacatatgaatgccaccatgcatcgttctttgacgcagtttgtccggtacctaggccgcgcgggcaaggtagacgtggatatggatattgatgatacatctgagaacgttgaaggtcctttgcttatcaggatccatccctcatctttatcatcaccttctgaagatggaatgctgcgaagtcaacaagaggagcaagaagtcatagccgccgagcttttgaaaagacaactcaatcgtgctaagcgacaaactgaaaaggtatatcatccagagatgaaatcggaaattagcggggatagcactctgaaacgtgttcaagtcaccttccacgggaatggtcgggtaaataaaaagaaaaagaaggttcctccacggaaagaaggtatcaagttccgttga

SEQ ID NO: 78604 - DNA, 645 bp, Saccharomyces pastorianus
atgagtaatggacacgtcaagtttgatgccgatgaaagtccagccagcgcaagtgctgtcacagatagacaagatgatgtgctggtaatatcaaaaaaggacaaggaagtgcattcaagtagtgatgaggaaagtgatgatgatgatgctccacaagaagaagggcttcactctgggaaaagtgaggtagaatcacagatcactcaaagggaggaggctataaggctggaacaatcacaattgcggtccaagagaaggaagcaaaatgaattatacgccaagcaaaagaaatcagtgaatgagacagaggtcactgatgaagtaattgcggagcttcctgaggagttgctaaaaaatatagatcagaaggacgaaggtagtacgcagtactcatcttcaagacatgtaactttcgataaattggatgagtcagatgaaaatgaagaggcattggctaaagctataaagactaagaaaaggaagacattaaaaaatttaaggaaagattcggtgaaaagaggaaaatttagagttcaattgttatccaccacacaagattctaaaacattaccaccaaagaaagaatcatccatcatacgttcaaaagaccgttggctaaatagaaaggctttgaataaagggtaa

SEQ ID NO: 78605 - DNA, 2241 bp, Saccharomyces pastorianus
atgtcgtataaatttattaccaagaacaaaaaatacaccccgatgtcttccccagggaattcaggcgtggctatagattctaccgttctgaaagcaattgaattaggaacgaggctttttaaatctggagaatacctgcaagcgaaaaggatattcacaaatgctttgagagtatgtgattcttattctcaggagcagattatgcgcattaggaacgcgtatcaattagatactgcgagaccggataacaaacgattatatcatcctagatacataaagatattggataacatctgtgcgtgctacgaaaaattgaatgatttgaaatcttgtatggacgtatcacaaaggttacttaagttagaaccaggtaatatcaaatgctatatacgatgtacaaggacgttgataaaattaaaagactggaaaagggcatataaaacatgttctcgtggactgcaattatgcaataacgatagcaatcatctaagacaacaaaaacaattcattaaaaataacatggttcaaaaacaggacggcaagagaagttatatagatccatcagaggagaccaaaatagcaaaaaaaaaaaagaataataattttctagaatcgttaccaaagaagaagattaaaggtagtaccaagaaaactgatttagttggcaatttgccgatagaaatactacctatcatattccaaaggtttaccactaatgagcttgttacgttgtcgctagtttgtaacaaatggagggacaaaattttgtatcatttagactgcttccaagaattcaacttggcaccaataaattttaaaaattttgtaaagtttatggattttttacaacagaatttcaccaggacgtatagaaaatatattctttcacaagtaaaagtcagttctaaaattacttcggaagagttacgaataactcaattattattcagtaaaatgccgaaatgtataaacatcgaacggcttatactgtcaatgccaacactaactacaacacaaatctttaagttaatggttagaggaggcacagatttttttgcaaggctgctggaattatctctcatgataacttataggcctgataaacaacatgaattagagatactgcagacttgtcctctgttgaaaaaaatagaattaatttttgtcaattcactaatacccattttcgacggaaataatagcgttgggagggatggaagtttcaatgtgatggcccgtcatactaatatgcagatacccactgcggataatgatgaacagggaatagcagaagaaaaggtgatttatagtgagctagagaagataacattgatatgtgataagaagaaaattaagaattttccactttgtcgtgctctattgagaggccagtttcctctattgcagaaactgacgataactggtgtaacatttcctatgaataatcaagacataataaattttcaatggctattaaacttcccagacctaaaagaactatggatagaagataacgacaactgtgaactcagtaagtttttgcaattgttaaaattttcgaatgtctggaaaaacttggaaaagttaacctttagagagaacaagctatatccaattattaatttggatgaagatcagcctgttacgaatgacaacgaggtgccatccatgctattttacaaggaaaatctccaaaacctggaaaagttggatctaatggggacgtcgataagtggttctgcgttgactagattatgcgagcaggaatatttggatggtcggaaattaagaagtttaaacattgggaattgccccaacatccagttcccaaataatcacgctcatgcagcaaggatgatactcgatgtgaatgcagttttgaagagactctccaagttggaagaaataaatttatcgcatctcagctccttgaatgatagtacgatgaagtcattcattattaatgtaccatttttggaaaatttaaagaggcttgacatttcgcacaattttgaaattacaggaatatcaatatatgaatttctaaaaaaatttcagatggatcatgacaacgaagcgggaggtcaaccactggcatatttaaatattgacggatgttcccaagtgtctcatatcacagttaatatgatccgagcgcagaacttagttactcaagtggattgtgtttatgaaagagatgtatggagaaaatttggaattaattcatattcatactcatag

SEQ ID NO: 78606 - DNA, 2250 bp, Saccharomyces pastorianus
atgtctaataccttgccagtaacagaatttcttttatccaaatactacgaactttccaacactcctgccacagactcatcatcgctcttcaaatggttataccacaagactctctcccgtaaacagctactcatatccgatttgttttcccagaaaaaacacgccatctcctacgatcaatggaatgacatagcgtcgcgattagacgacttaacgggactttccgaatggaaaacaatcgacgagtcctcgttgtataactataagctgctgcaagacttgaccatccgtatgcgccatttgagaaccactcacgactaccaccgcctgctttatctgattagaactaagtgggtccgtaatcttggcaacatgaataacgttaatctttacaggcactcgcatacaggcacaaaacaaattatacatgactacctagaagagtctcaagcagtgctcaccgcgctgatccatcagtcaaatatgaacgatcactatctcctcggtatcttgcaacagacgagaagaaacatagggcgcacggctctcgtgcttagcggtgggagcactttcggccttttccacattggtgttcttgccgccctttttgaatcggacctgatgcctaaggtgatcagcggtagcagtgctggcgccattgttgccagcatattttgcgtccacacgacccaggaaattccctccttgttgaccaatgtacttaatatggagtttaacatcttcaatgacgacaattccaaatctcccaacgaaaacttactaatcaagatatcgaggttctgccaaaacggtacctggttcaataatcaacctttgattaacacaatgctttcgtttttaggaaacttgacctttagggaagcctacaacaagactggaaaaatcctgaatatcacagtctcgcctgcttccatatacgaacagccgaaactactaaacaatttaaccgctccaaacgttctcatctggtctgccgtatgcgcatcttgttctctacctggagttttcccctccacgccgctattcgagaaagatcctcacactggaaagattaaagagtggggggcaacaaatttacatttatcaaacatgaaattcatggacggatctgtagataatgacatgcccatttctcgtctttctgaaatgttcaatgtcgaccatattatcgcctgccaggtaaatatacatgtctttcccctgttaaagttttcaaacacttgcgttgggggtgaaattgaaaaggaaattaccgcccgtttcagaaaccaagtaacaaagatcttcaaatttttttccgacgaaactattcattttttagacatcctaaaggagcttgagttccatccctatttgatgaccaaattgaaacacctttttttacaacaatactccggcaatgtcacaattttacccgatctatcaatggttggtcaattccacgaagtattgaagaacccgtctcaacttttcctattgcaccaaaccactttaggtgcaagagctacctggccgaaaatttccatgattcaaaataattgtggccaagaattcgctctggataaggccatcacattcctaaaggagaaaataataatctcttcgtcaataaaaaaccctttacaattctaccaacctcgattcagtgagcaaatcaaatctctttccataatggatgctgacttgccgggagttgacttggaagaatcctcctccaattcactatcaattatcaagtctcccaacaaaacagcggcaccgggaagatttcctcttcagccattgccttctccatcttctaccttcaacaagaggaaaatggatatgttatcgccttctccatcgccttctacatctccacaacgttcaaaatcttcattcacgcagcagggtacaaggcagaaggcaaattctttatcgtttgccatcggtgcatctagtttacggctaaagaaatcaccattgaaggttccatcacgacctcaattcaaaaaaagatcttcttattataatcaaaatatgtcggcagagatgaggaaaaatagaaaaaaatctggaacaatttcctcttatgatgttcaaacaaactcggaagattttcccataccggctattgaaaacggttcatttgataacactttattcaatccaagcaggttccccatggacgctatgtcggctgccacaaacgacaatttcatgaacaattcagacatttttcaaaattga

SEQ ID NO: 78607 - DNA, 372 bp, Saccharomyces pastorianus
atgctcgttgtttacatgtgtatctgggttctgcacctgctcttgttcttgttcttgttcttgttcttgttcttgttcttgttcttgttcatcgctagtcctgcttctcttcggcgttctcaaactcatattgttcaatgtctctactatttttcgttgctattaatatctggttgtgctttcttccatcaggttctttgccttgttttgcctttgttttgttttgttttgttttgttttgtttttttttatttttttcgttctgctcttgaagttttcgcttcccttttcccccttccctttagcaccagaagtcatgaaacaattagtaaatcaagaattatcattaaggcagcgcgaggaattatgtaa

SEQ ID NO: 78608 - DNA, 909 bp, Saccharomyces pastorianus
atgagtttgagaacgccgaagagaagcaggactagcgatgaacaagaacaagaacaagaacaagaacaagaacaagaacaagaacaagagcaggtgcagaacccagatacacatgtaaacaacgagcatcagcagcgacctgggccaaccactctattgagcacgccagtacgtctcaaaaatggctttggaacaccatcaccgccgtcaccaccaggcataacgaaaagcatcactaaatcgagaagaaggccgtcgacaacgagtcttcagggtatattcatgtcgcccgtcaataagcgtcgtgtcggcataaccgcacatggacgtgtatatgaccataacgacgacggacacgaaagtgagagtgaggacgacgaaaatgaagaaaatgaaaatcaaaagaagtacgacgggcacgttagtatgcctttgttgccaccgacaacgcccaagtcaagacggtcggaggtgtttctgtcgccgtcgccgcgtttgaggtcacctccgacggctacgcgtcggtctacgggcgagcggcccatccgcgaaatatcacatactttgcgcaccaggcttaattacgcgttagtcaagctgcaaaatggatggacggacaagacacttcccgaactggagacggagcttgctccagcagtgcagacgccgccacgccgctatcacaacagatttccagatagtgcagacgcgggtacttccgcgcatacagcgtttcttcaggcgctcggaggccacccaccacgggaggaggccacggctgtcgaaacactgatgctattgtcgtcgcctaccaagaagcaacagcaccgacccgtgccggcgacatctgctggagaacccacggacgaaacggagcccgagtcggataccgaagtggagacgtcttaa

SEQ ID NO: 78609 - DNA, 1164 bp, Saccharomyces pastorianus
atggaacagaacaggttcaagaaagaaacgaaaacttgtagcgctagctggccgcgcgcaccgcagtcgacgctgtgtgcgacagatcgcctcgagctcacatacgatgtgtacactagcgcagagcggcaacgccgctctcgcactgccactaggcttaaccttgtgtttttgcacggcagcggcatgagtaaggtggtatgggagtactatttgccgcgtctggtagccgccgatgcggagggcaattatgccatcgacaaggttttgttgatcgaccaggttaaccacggtgattctgcggtacgcaaccgcggcaaactcggcaccaatttcaactggatcgacggggcccgcgatgtgctcaagattgccacatgcgagttgggcagtattgacagccacccggcactaaacgtagtcatcggccactcgatgggcgggttccaggctcttgcgtgtgacgtcctgcagcccaatctgtttcatttgctcatcttgatcgagcctgtagtaatcacacggaaagccatcggcgccgggaggccagggcttccgcccgattctccgcagatcccggaaaatctttataactccctacgtttaaagacgtgcgaccatttcgctaacgagtccgaatatgtaaaatatatgaggaacggttccttttttaccaatgcgcacagccaaatcctgcaaaacatcatcgattttgagaggataaaagcctctggagacgatgaagatggtggacccgttcgcacgaagatggagcaggctcaaaatctcctctgctacatgaacatgcagacttttgcgcctttcctgatcagcaatgtgaagtttgtgaggaagcggaccatccacattgtgggcgcgcgctccaactggtgtcctccgcaaaatcagctgtttttgcagaaaactctacagaactaccatctcgatgtcattcccggcggctcccacttggtcaacgttgaggctccggacctggtgattgagaggattaatcaccacatccacgagtttgtccttacctccccgctgcagtcctcacacattccgcaattgacccttgaagaaagagcggtgatgtttgaccgggctttcgactcgttcaagaatgaagctttggttaaaatgactaaacaaaaactgtaa

SEQ ID NO: 78610 - DNA, 1053 bp, Saccharomyces pastorianus
atgaattggctgtttttggtctcgctggttttcttctgcggcgtgtcaacccatcctgccctggcaatgtccagcaacagactactaaagctggctaataaatctcccaagaaaattatacctctgaaggactcaagttttgaaaacatcttggcaccacctcacgaaaatgcctatatagttgctctgtttactgccacagcgcccgaaattggctgttctctgtgtctcgagttagaatccgaatacgacaccatagtggcctcctggtttgatgatcatccggatgcaaaatcgtccaattccgatacatctattttcttcacaaaggtcaatttggaggacccttctaagaccattcctaaagcgttccagtttttccaactaaacaatgttcctagattgttcatcttcaaaccaaactctccctctattctggaccacagcgtgatcagtatttccactgatactggctcagaaagaatgaagcaaatcatacaagccattaagcagttctcgcaagtaaacgacttctctttacacttacctatggactggactccaattattacctcaacaataattaccttcatcaccgtcttactcttcaaaaagcagtccaaactcatgttctccatcatatcttccaggatcatctgggcaaccttgtcaacttttttcatcatttgcatgatcagtgcctatatgttcaaccaaatcaggaatacccaattggcaggcgttggtcctaagggcgaggttatgtatttcttgcccaatgaattccaacaccaattcgccattgaaactcaagccatggttcttatttacggaacattggccgcgttggttgtcgtattggtcaagggtatacaattcttgcggtctcatttgtatccagagaccaagaaagcgtacttcattgatgctattttggcctccttttgtgccttattcatttatgtcttctttgctgctttgacaaccgtgttcacgataaagagtcctgcttacccttttcctttactaaggttatcggcaccattcaaatag

SEQ ID NO: 78611 - DNA, 2028 bp, Saccharomyces pastorianus
atggtatcagccaacggcgatttgcacttgccaatttctaacgaacagtgcatgccggaaaacaatggatctcttggatttgaggcccccactccgagacaggttctcagggttacgttaaatttgaaatacttaattgataaggtcgtacctattgtttacgatcccaatgatattgtttgtgaccattctgagattttatctccaaaagttgtgaagctggcttatgaagcatgtggcgggaaccctaaagacaaggccaacaaaagaaaatatcaatctgtcattattttttcacttcttaaagtttgtgagtggtattccatattggccactatggaagtgcacaatgccaaactttacgaaaccagaaatttagcctcacaacagttatgtaaattgttaattgaaagggaggagacaagagacctgcagtttcttttcatgcagttactgctgcgtcggtacgtaatcaacgagaacgatgaagatcaagaaccgttgaatgccttggaacttgccacagatatgcactgtactacagtgataggatcgagtggattccagcgttgtctaaagtggatatggagagggtggatagtccaaaatggcttggatcccacaacctttatcaaggacgattcactggcggaagtgtcgttgatctctcattttaaccccgtaagattaaaggcgcctgtataccaaaattatttgcagatgatcttttcatttttgtttctagggctttataccttggtggttaatggtaaggactctgagagagtccaatctttcgatttgttagaaagcatattttatgttttcaatactggtttcatcttggatgagctcactaagctttattatattggttatgcgcacctatcgttttggaatttatttaatgataccacatatttgataatcacgtttgctatggggttccgtgcaatgagcgtaacgccccttaatgcaaaatactcttcagaagattgggataaaatatcatatagagtcttatcctgtgcagcaccatttgtgtggtcgagactcctactataccttgaatcgcaaaggtttattgggattatgttggttatcctaaaacatatgatgaaagaatccattgtatttttcttccttctattcttaataatgataggattcactcaaggtttcttaggtttggattccgcagatggtaagagagatatcactggacccatcctgggtaatttaacaatcaccgttttgggtcttggtagttttgatgttttcgaagaattcgctcccccttatgcggcaatactgtattatggttactattttattgtttcggttatccttttgaatatattaattgctttgtattcgactgcgtaccaaaaagttattgacaatgcagatgacgagtacatggctttgatgtcacaaaagacgttgagatacattagagcacctgatgaagatgtctatgtttctccattgaacttaattgaagtgttcatgacacctatctttcgtattcttccaccgaagcgtgctaaagatttgagctatactgtaatgacaatagtgtacagcccatttttgttgcttatttctgttaaagaaactcgggaggctagaaggataaaatataacaggatgaaaaggctaaacgatgatgccaatgaatatgacactccatgggatttgacagatggctacttggatgatgatgacggtttgttttctgataaccgaaattctggcatgagagccacccagttaaagaattcacgttcgctaaaactgcaaaaaacagcagagcaggaagatgtccattttaaagtccctaagaagtggtataaaaacgttaaaaaatgcagtccctccttcgaacagtatgataacgatgacactgaagatgatgttggtgaagataaagatgaagtcaaagagctcactaagaaagtggaaaacttgacagctgtaattaccgatctactcgaaaaattagacataaaggataagaaagagtaa

SEQ ID NO: 78612 - DNA, 1206 bp, Saccharomyces pastorianus
atgataatgaaaaaatttttgttccccagcgatgagttagtgaaaatcgacaatatatctttttttgatcaatgtgttttactatttctagaaagcaagggaagccactctagtagtaaacctctgggctttacacatataaaatcgcaggaaagttatatttcgaagatgccaccaaaaaagggaaaacaggcccaagcggctggtaagaagaaggataatgtcgacaagacgttcggtatgaagaacaagaaccgttctaccaaagtccaaaaatacatcaaacaagtgcaatcacaatccgaccccaagaaagaagagatgaggttaaagaaactcgaagaaaaaaagcgcagagaagccgaagaagctgaacgaagagcactattcaaccctgtagcagaccaaagggttcgtgcaggtgtagatcccaagtccatggtttgtgctctgttcaaactggggaattgtaacaaaggtgccaaatgtaagttctcacatgacttgaacgtcggtagaagaatggaaaagaaagatttataccaagatacaagaagtgaaaaggaaaatgacacaatggataactgggatgaagaaaagctgagaaaagttatcctgtcgaagcacggtaacccaaagaccaccaccgacaaagtatgcaaatacttcatcgaggccgtggaaaacggtaaatacggttggttttggatctgtcctaacggaggtgacaaatgtatgtacagacactccctaccagagggctttgtgctgaaaaccaacgagcaaaagaggctcgagagggagtcgctcgagaaacagccaaaaattacgctggaggagtttatcgaaacagaaagagggaaactagacaaatccaagctaacaccaataacaatcgccaacttcgcccaatggaagaaggaccacgtcatcgcaaagattaacgctgaaaagaagttatctagtaagaggaaacctactggtagagaaatcattcttaagatgagcgccgaaaacaagtcatttgagacggacaacgccgacatgccagacgacgtcacccagggatccgcatgggatcttactgaattcacagatgccttgaagaaggctgaccaccaagacgacggcggcatcaaggactacggtgacggtagcaaccccaccttcgacatcaaaaaagccaactccgccacgctcgcatag

SEQ ID NO: 78613 - DNA, 528 bp, Saccharomyces pastorianus
atggatttgaaaagggattggttacgatggaaaattacaataggtagtgggcctggcagtattgtgctggatttcccatcatttttggtagggtgcgtattcacaacaatgatggggccaatattacagaagcttataggtaaacttttggtaggtttaataacggtatgcaaattcttagttattattggaagcattgtcttcgttatcggagttgcatcaaagaaatacacatatgacgatttcaaagtaagtataaaaagatcaggagagccaggggaatcacatgatatgaggactgaaccaaaaagaactgcgaaaacggcaactgttccaatggagaaagacgagggcgtaggttcttataattattttgaaatacctataacgaaagaaacatctacaattccttatattaattgtgatagcacgagctcacttagaaagccacctaacggtccatcaagcgtaggcttatctaactccaacagatacgaaaattttataaacatggcacgacataaataa

SEQ ID NO: 78614 - DNA, 984 bp, Saccharomyces pastorianus
atgtcttcagacacttcattatcagaatcttcattattgaaggaagagagtgggagcttgaccaagtctcgtccacctataaaatcaaaccctgtacgcgaaaatatcaaatcatttgtggccggtggagttggcggggtatgtgcggtgtttacgggtcatcccttcgatttgattaaagtgagatgtcaaaatggacaagcgaattccacggtacatgccattacaaatattataaaagaagcaaaaactcaagtaaagggcacattatttaccaattccgtaaaggggttctataaaggtgttatcccgcccttattaggtgttactcccatattcgctgtttctttctggggttacgatgtgggtaagaaactggttacttttaataacaagcaaggaggcagtaacgagttaactatgggacaaatggctgcagcaggatttatcagcgctattcctaccactttagtgactgcgccaacggaaagagtaaaggttgtcctgcaaacatcttctaagggctctttcattcaggcggctaaaaccattgttaaagaaggtggcatagcttctttatttaaaggttcattagccactttagcaagagatgggcctggctcagctctatattttgcatcatatgaaatttcaaaaaattacttgaatagaaggcaacctcgtcaagatgcgggcaaagatgaaccggtcaatatcttgaacgtgtgtcttgctggtggtattgctggtatgtcgatgtggctagctgttttccccatagacactataaagacaaaattgcaggcttcctccacgaggcagaatatgctttccgccacaaaggaaatttatctacaaagaggtggtatcaagggatttttccctggtttaggtcctgctttactaagatctttcccagccaatgcggccacatttttaggcgtggagatgactcattcactgttcaagaagtatggcatatga

SEQ ID NO: 78615 - DNA, 351 bp, Saccharomyces pastorianus
atgcaagcacgccggcaaacccttcctcaatttataaaatgtaaacaaacgaaatgtaaaatcaaactagcaacaataaactcggcaaaagctctgtttttagaaatgcctggaaagctattacacaattgtaaccacaaactcatcaataggacgaattgtcccacacaaataatgaatcccgctaaaaacgcattgaatggaaaattatcacggatcaagataatgaatgtacactggattacccctaataataccaaaaagaaacagaatgtatcaattagcttcagtttaggatatttttcaatttgggcaaaatatgccctcttagaagtcttgaaagtttcttga

SEQ ID NO: 78616 - DNA, 402 bp, Saccharomyces pastorianus
atgactaatatggcaaaaacactaaaggcaaacacaccaaaagtaaccagcacgtcatctgcagtcttaacagattttcaagaaactttcaagacttctaagagggcatattttgcccaaattgaaaaatatcctaaactgaagctaattgatacattctgtttctttttggtattattaggggtaatccagtgtacattcattatcttgatccgtgataattttccattcaatgcgtttttagcgggattcattatttgtgtgggacaattcgtcctattgatgagtttgtggttacaattgtgtaatagctttccaggcatttctaaaaacagagcttttgccgagtttattgttgctagtttgattttacatttcgtttgtttacattttataaattga

SEQ ID NO: 78617 - DNA, 849 bp, Saccharomyces pastorianus
atgaatatttgcaagttgaaagaaatagtaccactatttccgagatcgtcctttacagatggtgtcgtaagtacaggaaaaagtttccgaagctgggacacctgcatggacaataaagcatgtaaagttattgcgattgttggtattgttttggcctgtattcttgtgatttggttgattgggggcttactgacatgtttcaggcaaggggtaacaggaataggtcagttcatttgttggtgttgtcgttgttctaatgacagaaatggaaacaatacaatgccggtaaatgagggttttagtagagttaatatgggcgtggctcctccttctactgtgatttatcaacctattcaacaacctgaaagtgcgtattatagaaacgatgcgaagaatgatacattttacgacgaagtcaaaacccccagtaatgaggtgtatgaattagaggaagatttcgatttggaaaaacaaaaagagaaaacaaggaaaaaacaacagaaggaaaggaataaagaaggacgcagccctagtagggtggcccctctagtgtatgaagaagaaaatttcgaaggtagcagccctcagccgcaatatgatgctagaaattcgtttatccaaaatgcggccaatactggtagcaacaacgctcatgttacttcacaatctccaatttttgacatcagcgattatggcgagaactactattacgataataataacatcaataataacctccagggaaacagttacaatactccctcctctaatcatagaagtccatatccaaccgaaaattatcaatcatatcagggatataaaccaaaccaaagcgatagatattactaa

SEQ ID NO: 78618 - DNA, 327 bp, Saccharomyces pastorianus
atgaagaagaaaatttcgaaggtagcagccctcagccgcaatatgatgctagaaattcgtttatccaaaatgcggccaatactggtagcaacaacgctcatgttacttcacaatctccaatttttgacatcagcgattatggcgagaactactattacgataataataacatcaataataacctccagggaaacagttacaatactccctcctctaatcatagaagtccatatccaaccgaaaattatcaatcatatcagggatataaaccaaaccaaagcgatagatattactaatgaggtaaatatatattctcccttcttttga

SEQ ID NO: 78619 - DNA, 852 bp, Saccharomyces pastorianus
atgtcctttttcgacatcgaagcacaatcttcaaagggtaactcccagcaagaaccacaattctcaacaaatcaaaaaacgaaggaattaagcaatttaattgagacattcgctgaacaatcccgcgtgctggaaaaggaatgcaccaaaattggttccaaacgggactccaaagaactaagatacaaaattgaaacagagttaataccgaactgcaccagtgtaagggataaaattgagagcaacatcctcattcaccaaaatggaaagttgtctgctgatttcaagaacctgaaaacgaagtatcaatctctacaacaatcatacaatcaaaggaagagtctgttccctctaaaagcgcctatttcaccaggaacatctaaggaaagaaaagagatccatccgcgaactgaagccgtgcgacaagatccagagtctagttatatttctataaaagtaaacgagcagagtcctttactgcataacgaaggacaacaccaattacagctgcaagaagaacaagaacaacagcagcaaggattgtcccaagaagaactagattttcaaacaatcattcaccaggaaagatcccaacagataggacacattcatacggcggtacaagaagtcaatgctattttccatcagcttggttcattagtgaaagaacagggagaacaagtaaccaccatagacgagaatatctcgcatttacatgataacatgcagaatgcaaacaaacaattatccagagcagaccagcatcagagggaccgtaacaaatgcggtaaggtcaccctaatcattataatagttgtgtgcatggtggtattgcttgctgtattaagttag

SEQ ID NO: 78620 - DNA, 210 bp, Saccharomyces pastorianus
atgaataatattattgacagtagcaaataccgccttaatagatgcatccccagtgtcttcggagacaccaacaccccacatattactggtagcatgattattgttgtcctttatgtaggaaagatttatgaaagatgccgcttgggttgcggaaccagaacccaaggaatgttcagagtagttttgaacgctcaacttaacattcagtaa

SEQ ID NO: 78621 - DNA, 885 bp, Saccharomyces pastorianus
atgaaggctactttactgttgaaggcccagctctcacctgtcagctatacgacgaagaaatctttccaaaggcaactcaatcgcactccatacactgcttttcaatacttcttccaacttgaagtccaaaagttacataacgtctcgaagtatgaggatattataaattacgtaagagggaatagcaattttaaaagatttgcaaggaatgaatgggataccatgtcattgactaagaaaagactttactatgcatccttttgccagtcaatggatattgacattttgaatgtcagtaaaattgaacttgccaaaagattagaaattcccataccagcaatgagtgaatatttgttatttagaaataagttcaaggtaaaatttgactctcattgcagctccttggagcgtaaagatcgtaaaagtgttccacgaccctctattactaggaaggttgcaactacagaaatatgttcaaaaagccgtagcaacacacccctcggtaaaatcaacccccggaaacgattagtggcattgaaaaggatttcccgttcagagaacactgcaaaaaatcattcccatgaggctcaaaattacctttatgattatatgaaaaggtttcaacaaatgtgcaaagaatgccggtatgcttggaacgaaaaggttgactatgaccagaaactagaaattagaaaaaaattacaggtatggagggcaaaatttgaggaagtgatggataacgagatacaaatattacaaaaaaacatggatatcatgtcaaagtttggtctcagaagtgagtcctatcttacagcagcggatcacaatacaaatacacaaccaaataatattcttcccatgacgtacctactaaaaaagaaatga

SEQ ID NO: 78622 - DNA, 1704 bp, Saccharomyces pastorianus
atgggacagtcttcttcaatcagttccagtaacgaagagggttcttcccactcaaaaaaattcacaaatagcaaagatattttggcatatttcaataacaaagcacagcaacaggtcactattccagaattagtcagttttaagggaaatttgcaaattgaagatctaaacactccaatttctcacaaagctttatgcaactcactttattttccgcagaatcatgccatgattgttgggatagtgactaacatgttgagggttttgagcaacttcccattaatgaaatcatcttacgaaccaattacgggatatgggttattaaaatgcattttgttgttaaacagggcacgatgtgccaaattcttgaaaaccaagtcctatgatcaactaaaactgctgtttatctctttatcacttcagaaaactgacaaagaagaactctccgaagaaagtgaaaacgacggaaacaaggagttgactataaaacaaataataactgggtttgatgatgttgatacagaaatgctgtgcattcctgctgattttatgcttcagtttttaacttggcttttaattttaacagttgattgtccaaccaccaattctaaattggataatacagagactcatgatcaatggggcaatttcaaagtctcagcactcaatctccttagaactatgaatccagacgtggtgggcgatatagaatcacattccataacgtttcaacaattttcaactgcaataagaactgtaatgcccaatctattaaaaccattagagaatttaatggagcattttttttatttgcagcacgatttagttgatcatgacacaaacttatcgtctattcaggattctaaagttatgactccagcactgttggcacagttatcgacgggactaccaaaggaattatttattcataagctacaaagtttatacatcggcaggaaaagtggcttctcaatgaggtctttgcaagcaaaggtgttcaaatggatggcgccttcgattttagttgttagcggaatgaggataacaaattctgaagaatacgcagctgagaagaatccaagataccgccattttcttgaagaatttcctaaattgaaagagtcagatcaaatgatggatgcatcgcatttgaataaaaggaaaactactttcgctgtgtacatagacgatccgtggaaagtaacaaataaagattattttggcgatctgaatacgagaataatagaaatatcacccaggcaggatatttataaagtcaaccaaaaaggcacgatctatttcaatacaattggtggcggaattggaatcggggataaacaaccattaataaaaccagcatccaagagatacataccagggaacgtgtcgcttacttttgacagcacattagaatttgctgtgtttagaaatactggttacggaggttcattagaccctggtttattgtcgatggaaagaaaggaggaaaattccccttatgaattgcattttttgattcaagatgttgaggtatggggctgtggtggtgagaaagaactagaagagcaaatcaaacagttggaatgggaagaagcagaatctaaaagaagacagcaaattaacctgagaagcttgggagaagaccgtgccttactggaaatggcaggtttagttggccaacatcaaggtggcggttcaatgtga

SEQ ID NO: 78623 - DNA, 1455 bp, Saccharomyces pastorianus
atgtccttggaagataaatttgattcattgtctgtgtcgcaaggtgcctcggaccatattaataatcagctcttagagaagtatagtcacaaaataaaaactgatgaattatcattcagcagagcgaaaacatcaaaggataaagcaaatagggcgactgtggaaaatgtcttagatccgagaactatgagatttttgaagtctatggtcaccagaggtgtgattgcagatttgaacggttgcttaagtactgggaaagaagctaatgtttaccacgcttttgcaggtaccggtaaggcacccgtaatagatgaggaaacaggccagtatgaagttttagagacagacggatcccgtgcagaatatgccattaagatttataagacctctatcctagtcttcaaagatcgtgaaagatatgttgatggtgaatttagatttagaaattccagatctcaacataatccaaggaaaatgattaaaatttgggctgaaaaggaatttaggaacctgaaaagaatttatcaaagtggcgtcattccagctcctaagccaatagaagttaagaacaacgtcttagttatggaatttttaagccgaggtaatggatttgcctcacctaaattaaaagattatccatacaagaatcgtgatgaaattttccattattatcacacaatggtggcatatatgagattgctgtaccaagtttgtcgcctggttcatgccgatttgtcagagtataacaccatagttcatgatgataaactatatatgatcgatgtttcccaaagtgtggaacctgaacatccaatgagtttagattttttaaggatggatatcaaaaacgttaacctttatttcgagaagatgggtataagtattttccctgaaagggttatttttcaatttgtcatatcagaaactttggaaaaatttaaaggtgattataacaatattagcgccttggttgcatacattgctagtaatctaccaataaaatctacagaacaagatgaggcagaagatgaaatattcagatcgctgcatttagttagatcattgggtggattagaggaaagagattttgataggtatagtgatggtaagtttgacttactgaaaagcttgattgcccatgataatgaacgcaattttgctgcttctgagcaatttgaatttgataacgctgaccacgaatgtagttctggcacagaggaattctcagatgatgaagaagacggctcaagcggatctgaagaagatgacgaggaggagggcgagtactatgacgatgatgaaccaaaagttttaaaggggaagaaacatgaggacaaggatttaaaaaaattgcgcaagcaggaagctaaagatgcaaaaagagaaaaaaggaaaacaaaagtcaagaagcacatcaagaaaaaattggtgaaaaaaacgaaatcaaagaaataa

SEQ ID NO: 78624 - DNA, 939 bp, Saccharomyces pastorianus
atgcctgctactttacatgattctacgaaaatcctttctctaaatactggagcccaaatccctcaaataggtttaggtacgtggcagtcgaaagagaacgatgcttataaggctgttttaaccgctttgaaagatggctaccgacacattgatactgctgctatttaccgtaatgaagaccaagtcggtcaagccatcaaggattcaggtgttcctcgggaagaaatctttgttactacaaagttatggtgtacacaacaccacgaacctgaagtagcgctggatcaatcactaaagaggttaggattggactacgtagacttatatttgatgcattggcctgccagattagatccagcctacatcaaaaatgaagacatcttgagtgtgccaacaaagaaggatggttctcgtgcagtggatatcaccaattggaatttcatcaaaacctgggaattaatgcaggaactaccgaagactggtaaaactaaggccgttggagtctccaacttttctataaataacctgaaagatctattagcatctcaaggtaataagcttacgccagctgctaaccaagtcgaaatacatccattactacctcaagacgaattgattaatttttgtaaaagtaaaggcattgtggttgaagcgtattctccgttaggtagtaccgatgctccactattgaaggaaccgattatccttgaaattgcaaagaaaaataacgttcaacccggacacgttgttattagctggcacgtccaaagaggttatgttgtcttgccaaaatctgtgaatcccgatcgaatcaaaacgaacaggaaaatatttactttgtctactgaggactttgaagctatcaataacatatcgaaggaaaagggcgaaaaaagggttgtacatccaaattggtctcctttcgaagtattcaagtaa

SEQ ID NO: 78625 - DNA, 306 bp, Saccharomyces pastorianus
atgtttaatttatctacatattacaatcatacgaaaaacacgcaaaaacaattacttgaatacttcgaaaggagaccaatttggatgtacaacccttttttcgcccttttccttcgatatgttattgatagcttcaaagtcctcagtagacaaagtaaatattttcctgttcgttttgattcgatcgggattcacagattttggcaagacaacataacctctttggacgtgccagctaataacaacgtgtccgggttgaacgttatttttctttgcaatttcaaggataatcggttccttcaatag

SEQ ID NO: 78626 - DNA, 3819 bp, Saccharomyces pastorianus
atgccgaacgaagataatgaacttcaaaaagcaattgagaaccatcataatcaactactaaaccaggataaagaaaatgctgacagaaatgggtctgttatagaagacctcccattatacgggacaagtataaaccagcagtctatccctggagatgttgacgatggaaaacacttactgtatccagatattgccaccaacctaccactgaagacttctgacagacttttggacgatatactttgcgatactatttttctcaattctacagacccgaaggtcatgcaaaagggcctgcaatcgaggggtattttaaaagagtctatgctttcttactcaactttcagaagtagtattcgccctaactgcttgggttcattaactgatcaagtggtttttcaaacaaaatccgagtatgattccatttcatgcccaaaatataataaaatacatgtatttcaggcggtcatctttaatccatcactgggagaacagcaaatttcaacttttgatgatattgttaaaattcctatttatcatcttaaggttagcgtaaaagtccgccaagaactggagcggttgaagaagcatgtcggtgttactcaattccactcactagatcatttgcacgaatacgatcgagtagacctttcgacttttgattcttccgatcctaatttgttggattacggtatttacgtttctgatgatactaacaaactgatcttgattgaaatttttaaacccgagtttaattcacctgaagagcatgagagttttactgccgacgcaattaagaagagatacaatgctatgtgtgtaaaaaatgaatcactagataaaagcgagacgccatctcaagttgactgtttttacacacttttcaaaatttttaaagggcctttgacgaggaaaagtaaggcggaacctacaaagacaattgattctggaaatttggcccttaacactcacctgaatcctgaatggttaacgtccaagtatggatttcaagcaagctcggaaatcgatgaggaaactaatgagatatttactgaatacgtccctccagatatggtggactatgtaaacgatttggagacaagaaaaattcgagaatcgtttgtgaggaagtgtttacaactgatattttggggtcaactatctacctcattactggcacctaattctcccttgaaaaatacgaaaagcgtaaagggaatgtcttcattacaaacttctttctcaacactaccttggttccatttattgggagaatccagagcaaggattctattaaattccaatgagcaaactcattcgcctttggacgcagaacctcattttattaatctttccgtttcgcattattataccgatagagatataatcagaaactacgaatctttgtcttctttggatcctgaaaatattgggctgtattttgacgccctgacatacattgcaaataggaagggggcatatcaattgattgcttactgtggaaaacaggacattataggccaagaagctctagaaaatgctttgttaatgtttaaaattaaccctaaagagtgtaacatctccgaattaaatgaggcgactttgctatctatttacaaatttgaaacatcaaataagagccaagtaacctctaatcacctaacaaatttgaaaaatgctctaagattgttggccaaatataccaaatctgacaaactaaaattttacgtcgatcatgagccctacagagctttatcccaggcatacgacaccctttcaattgacgagtctgttgatgaagacattataaaaactgcatattcggtcaagattaacgactctcccggattaaagttggattgtgatagagcactttacaccattgctatcagtaaaagaagccttgatttgttcaattttttaacagaggaatgcccacagttttccaactattatggtccagagaagcttgattaccaagaggcattgaagcttcttcaagtgaatgaaaatgcctctgacgaaaccattttgaaaatctttaaacaaaagtggtgtgatgaaaacgtttatgagcctgaccaatttcttattttgagggcagcattgaccaaaatcagtatagaaagaaattcaactttaatcaccaacttcttactaactggtacgatagatccaaattccttgccgccagaaaattggccaactggcattaataatatcgggaacacctgttacctaaattctttattacaatattacttttccattgcgccactaagaagatatgtattggaatatcaaaaaacggtagaaaatttcaatgaccacctctctaatagtgggcatattagaagaattggtggaagagaaattagtagaggcgaagtggaaagatctattcaattcatataccaacttcgcaaccttttctatgcgatggttcatacaagagaaagatgtgtaacaccctcaaaagagctagcatatttggcatttgctccaagtaatgttgaagtagaatttgaagtggaaggcaataaagtagttgatcaaacaggagttctttcggattcaaagaaggaaacaacggatgacgcatttactacaaaaataaaggatacaagcctgattgatttagaaatggaagatggccttaatggcgatgttggtacagatgcgaacagaaaaaaaaatgaatcgaatgatgctgaagtaagtgagaacgaagatacaacaggattaacttcacctacgcgtgtggcaaaaatcagttctgatcaattagaaaatgctttggaaatgggtaggcaacaagatgttactgaatgcataggaaacgtgttatttcagatagaaagcggttcagagcctatccgatatgatgaagacaacgagcaatatgacttggttaagcaactattttatggtactactaaacaaagtattgttcctttgtccgcaacaaataaagtccgtacgaaagttgaaagattcctatcgttactgataaatattggcgatcatcctaaagatatttatgatgcgtttgattcttattttaaagacgaatatctgacaatggaagagtatggtgatgttatacgtaccgttgctgttacaacttttcctactattttgcaggtacaaatccaaagagtttattacgatcgtgaaagattaatgccgtttaaatccattgagcccttaccattcaaagaagttatttacatggacagatacgcggatacagagaaccctttattgttggcaaaaaagaaagaaacagaagaaatgaagcaaaagttgaaggtaatgaaaaatagacaaagagagcttttgagtcgtgatgattcagggcttacaaggaaggatgcatttttggagagtatcaagctattggaatcggataccataaagaaaactcctttaaaaattgaggctgctaatgatgtgataaagacgctgagaaacaacgttcaaaatatcgataatgaattgatgaaattatacaatgatatcaacagtttggaagagaaaataagccatcaatttgacgatttcaaggaatatggttactcactgttttcggtttttattcatcgcggcgaggccagttatggtcactattggatatatatcaaggacagaaatcgcaatggaatttggaggaagtacaatgatgaaaccatcagtgaggtccaggaagaggaggtcttcaatttcaatgagggtaacactgcaactccatatttcctagtatatgtcaaacaaggacaagaaggtgatattgagccattgaaaagaattctaaagtag

SEQ ID NO: 78627 - DNA, 819 bp, Saccharomyces pastorianus
atgtttccttatttttacagacgagagttttattcttgtgaaaacgtcgttatcttctcctccaaaccaattcaaggaatcaagatatcacgtatacgggagagatacatagaaattatgttatcccgtgtttctgttttcaaacctgccagcagaggcttttccgtcttatcatctttaaagataacagaacatacatcagcaaaacacaccgaaaaacctgagcatgctcccaagtgtcagaatttatcagatgctcaggctgcatttttggaccgtgttattcgtgtagatcaagctggcgaattaggtgcagactacatctacgctggccagtacttcgtgttggctcataggtaccctcacttgaagcctgtgctaaaacacatgtgggaccaggagatacatcatcataatacttttaacaatttgcaattgaaaaggagagtcaggccttccttattaacgcctttgtggaaggcaggagcctttgcaatgggggctggtaccgcattgatttctccagaagcagctatggcttgtactgaagctgtcgagacagtaatcggagggcactacaatggccaattgcgaaacttggccaatcaattcaatttagaaagaacagatggaacaaagggtccaagtgaggaaatcaaatccttaacttctactatccaacagttcagggatgacgagctagagcatctagacaccgctatcaagcatgattcgtatatggcagttccatatacagttatcactgaaggtattaaaacgatttgcagagtagctatatggagtgccgaaagaatttaa

SEQ ID NO: 78628 - DNA, 717 bp, Saccharomyces pastorianus
atggattacgagaagtttctgttatttggggattccattactgaatttgcttttaatactaggcccactgaagatggcaaagatcagtatgctcttggagccgcattagtcaacgaatatacgagaaaaatggatattcttcaaagagggttcaaagggtacacttctagatgggcgttgaaaatacttcctgagattttaaagcatgaatccaatattgtcatggccacaatatttttgggtgctaacgatgcatgctcagcaggtccccaaagtgtccccctccccgaatttatcgataatattcgtcaaatggtatctttgatgaagtcttaccatatccgtcctattataataggaccggggctagtagatagagagaagtgggaaaaagaaaaatctgaagaaatagctctcggatacttccgtaccaacgagaactttgccatttattccgatgccttagcaaaactagccaatgaggaaaatgttcccttcgtggctttgaataaggcgtttcaacaggaaggtggtgatgcttggcaacaactgctaacagatggactgcacttttccggaaaagggtacaaaatttttcatgacgaattattgaaggtcattgagacattctacccccaatatcatcccaaaaacatgcagtacaaactgaaagattggagagatgtgctagatgatggatctaacataatgtcttga

SEQ ID NO: 78629 - DNA, 3024 bp, Saccharomyces pastorianus
atggcatcaactgctcccaatgaacaatttccatcctgcgtacgatgcaaagaatttattaccacggggcatgcatatgagttgggttgtgatagatggcacacacattgtttcgcttgttacaaatgtgagaaaccattaagctgcgaatctgattttttagtccttggaacaggtgctttgatctgctttgattgttccgattcttgtaaaaattgcggtaaaaagattgatgatttggccataatactgtcctcttcaaatgaggcctattgttcagattgttttaaatgctgtaaatgtggtgaaaatattgctgacctacggtacgcgaaaaccaaacgaggtttattctgtttaagctgtcacgaaaagctattagccaaacgaaaatactacgaagagaagaaaaggcgactcaaaaagaatttaccaagtttacccacacctgtgattgataatggccatactgatgaggtctcagcttctgcagtcctcccagaaaaaacatttagcagacctgcatcactagttaatgagattccttcaggttctgaaccttccaaggacatagaaaccaattcgagtgatattgttccgcattttatcactgggtataacgatagcgatgacaactctggaagttcaaaattcggttcaaatgtgtccatagatgttataggaccggaagaaaatagcacggagcatgtaaatgatgatgttaaagaggaagcagaagcaccttcagcgaatatgtcactcaatgttgctacggatccaaccctaagttgtaaagaacctcctagccattcgaggaatttgttaaataaaacaccgttgagaaattcttcgggtcagtatctcgcaaaatctccaagctcctatagacagggaataattgttaacgatagtttggaagagagcgatcaaattgatcctccaaataacagttcacgaaatgcaagtgaattgttgacctcggtattgcatagtccagtttctgttaatatgaaaaatccgaagggttcaaatacggatattttcaacaccggtgaaatatcccaaatggatccttcgctatcaaggaaagtattgaataatattgtcgaagaaacaaacgcacttcaaaggccagttgttgaagttgtcaaggaagacagaagtgttcctgacctagcaggtgttcaacaagagcaagcagagaaatattcctattcaaacaatagtggaaaaggcagaaaaatttcaagatcattgtcacgaaggtccaaagatttgatgattaatctaaaatccagggccacaggcaaacaggatagtaacgttaaactttcacctgcttctaaagtgacatctagacgctcacaagatttaatgagggataatgattcacatactggccttgacacaccaaattctaacagcacttctttagatattttggtgaataatcaaaaaagcctaaactataaaagatttaccgataatggcactcttagggtcactagtggaaaggaacccgcccttgaagaacagaagaatcacagttttaaatctccgtcaccaattgatcatttgttagaatcgccagctacaccaagtaatgtatccatgtatcgaactccgcctttagatagctcattgacatttgataggcgaaatgggtcttcatacagtaaccaaaattatagcatacctagttggcagaaaactccaaagacccaattggagaatagcgacaattttgaggaacagaaggaaacactttacgaaaatagcgaatctagaaacgatccctcgcttgataaagaaattgtcacggcagagcactatctgaaacaattaaaaataaatttgaaagaacttgaatctcaaagggaagaattaatgaaagagatcactgaaatgaagtctatgaaagaggctctacgccgacatattgaatcctataatagcgagaaaaataaactatatcttgactccaatgaattatcaaataatccaccgatgataaatgaaatcagcttaggtgagtcgccacccgtgaaacatgttgcaactgcaagttctgtagcgcgaagttctgttaaaccaaaattttggaagtttttttcatctgcaaagccacagaccgagcaatctatacaaggtgtcagtacaaataatacaaattccatcgttaaaagtgccccagttttgctttctgctccctcatctggtagtaattccggccgtttagaaatttcaccacctgtgctacaaaatcctaatgaatttagtgacgttagattagtacctatcgagaacgatgcaaatatgggacaaagtaaagatggagaagaatatttggatggaagcaatttgtatggttcaagtctcgttgctaggtgcaattatgaaaacaatgaaataccgatgatactatctgtctgcatagattttattgaatcagacgaagaaaatatgagatcggagggcatttatagaaaatcaggttcccagctagtcatagaagaaatagaaaagcaattttctgcatggaaagtacaacaaaataccgaaacgccaaatattttaacggaacaagatctcaacgctgttactggtgtgttgaagcgatacttaagaaagctccccaaccctatctttacctttcaaatatacgaaccgttgatgaggttagttaaatctagaaaaatgatggaaaacttgccatttgttggaggaaagttgtccttagaagcaaaaaattcggacacttatatgtcgagcaagagcgctttaaaaaacatattggaagaccttccaagggaacattatagggtgttaagagtactgagtgaacatatagaaaaggttacacggtacagtcactggaatcgaatgacgctttataatttggctttagtttttgctccaggtttgattcgtgatttcagtggagaaaaggatattattgatatgaaagaaagaaactatattgtcgcatttatatttgggaactacaaagatatcctgacgtag

SEQ ID NO: 78630 - DNA, 1716 bp, Saccharomyces pastorianus
atggattctagaacagttggtatattgggagggggacaattgggacgtatgattgttgaggcagctaacaggctcaacattaagacggtaatactagatgctgaaaattctcctgccaaacaaataagcaactccaatgaccacgttaatggctccttttccaatcctcttgatatcgaaaaactagctgaaaaatgtgatgtgctaacgattgagattgagcatgttgatgttcctacactaaagaatcttcaagtaaaacatcccaaattaaaaatttacccttctccagaaacaatcggattgatacaagacaaatatattcaaaaagagcatttaatcaaaaatggtatagcagttacccaaagtgtccctgtggaacaagccagtgagacgtccctattgaatgttggaagagatttgggttttccattcgtcttgaagtcgaggactttggcatacgatggaagaggtaacttcgttgtaaagaataaggaaatgattccggaagctttggaagtactgaaggatcgtcctctgtacgccgaaaaatgggcaccatttactaaagaattagcagtcatgattgttagatctgtcaacggtttagtgttttcttacccaattgtagagactatccacaaggacaatatttgtgacttatgttatgcgcctgctagagttccggactccgttcaacttaaggcgaagttgttggcagaaaatgcaatcaaatcttttcccggttgtggtatatttggtgtggaaatgttctatttagaaacaggggaattgcttattaacgaaattgccccaaggcctcacaactctggacattataccattgatgcttgcgtcacttctcaatttgaagctcatttgagatcaatattggatttgccaatgccaaagaatttcacatctttctccaccattacaacgaacgccattatgctaaatgttcttggagacaaacatacaaaagataaagagctagaaacttgcgaaagagcattggcgactccaggttcctcagtgtacttatatggaaaagagtctagacctaacagaaaagtaggtcacataaatattattgcctccagtatggcggaatgtgaacaaaggctgaactacattacaggtagaactgatattccaatcaaaatctctgtcgctcaaaagttggacttggaagcaatggtcaaaccattggttggaatcatcatgggatcagactctgacttgccggtaatgtctgccgcatgtgcggttttaaaagattttggcgttccatttgaagtgacaatagtctctgctcatagaactccacataggatgtcagcatatgctatttccgcaagcaagggtggaattaaaacaattatcgctggagctggtggggctgctcacttgccaggtatggtggctgcaatgacaccacttcctgtcatcggtgtgcccgtaaaaggttcttgtctagatggagtagattctttacattcaattgtgcaaatgcctagaggtgttccagtagctaccgtcgctattaataatagtacgaacgctgcgctgttggctgtcagactgcttggcgcttatgattcaagttatacaacaaaaatggaacagtttttattaaagcaagaagaagaagttcttgtcaaagcacaaaagttagaaactgtcggttacgaagcttatctagaaaacaagtaa

SEQ ID NO: 78631 - DNA, 879 bp, Saccharomyces pastorianus
atggaggacagtaaaaagaaaggattaatagaaggcactatactcgatataataaacggttccattgcaggcgcctgtggtaaggtgatcgagtttcctttcgatactgtgaaagtcaggttgcaaacacaagcatccaacgtgttcccaacaacatggtcttgtataaaatttacttaccaaaatgaaggaatagcacgagggttttttcaaggcattgcttcacctttagttggagcatgtctggagaacgcgacattatttgtgtcttataaccaatgttctaaatctttagaaaaacatacaaacgtttccccgttggggcaaatcctgatctctggtggagtagcgggttcatgtgctagtttagttttgacacccgtggagctggtgaagtgtaatttgcagtttgcgaacttacaagttgcatcagcaaaaacgaaacatacaaaggtgttgcctacaataaaagcaattataactgagagaggattggcaggattgtggcaagggcaatcgggcacttttattcgagaaagcttcggtggtgttgcctggtttgcaacctacgaaatagttaagaagtcgttgaaagataggcactcccttgatgacccaaaaagagatgaaagtaagatatgggaactacttattagtggaggaagcgctggattggcattcaacgccagtatttttcctgcggatactgtgaaatcagtaatgcaaactgaacatataagcctcaccaatgcggtgaagaagatatttggcaaatttggactaaagggtttttatcgaggactgggtataaccctttttagggcagtaccagcaaacgctgcagttttttacatctttgagactctttctgcactttaa

SEQ ID NO: 78632 - DNA, 657 bp, Saccharomyces pastorianus
atgacaaagctacaaggactacagggattaaaacacatcaaagcggttgtatttgatatggatggcacattatgcctaccccagccttggatgtttccagcaatgagaaacgccataggattggaggacaaatcgattgatatccttcatttcattgatacattgcccacagaaaaagaaaaaaaagaagcgcatgatagaatagaattagttgaggcaaaagccatgaaggagatgcaaccgcagcctggtctggttgacataatgaggtatttgacgaaaaatggtattagcaagaacatatgtactagaaatgtcggagccccggtagagacttttgttaaaagatttattccatccgagctttcgaggtttgactatattgtgacaagggagtttaggcctacaaaaccgcaaccggacccattattgcacatcgcctcgaagctaaatataaggcccttggaaatgatcatggtaggagattcatttgacgacatgaaatccggtagatctgctggatgtttcacggtattactcaagaatcatgtgaatggacatttactgctcgaacataaagaactagtagacgtttcagtagaggatctttccgaaataattgaattgattcaaaatatgaataaagaaagtttctaa

SEQ ID NO: 78633 - DNA, 1230 bp, Saccharomyces pastorianus
atgtttaacatgaatctactttctacaccttcttctgaagagggttctccacagaataggtcatcttcaatgtcttctgtcgagggcaagaaggatagggacacctttactaatttgcaaaacgaatttgatggtaaagtatttggcgtctcactcgaggaatcactgaaagttgctcaagaggaagtaattatccaaaaaagtacaaatgaaattggttccataccggtggtaatagcaaaaagtgggaaatacctaaaagagaatgcattagacacaacaggaattttccgtattgcgggaagcaataaacgtgttagagagctacaagctgttttctctaaaccgcccgattatggtcgtaaatttgaaggatggtgtgatttcaatgttcatgacattgcaactttattaaaaagatacttgaactcattaagtgagcctttggttcccctagcattatacgacatttttagaaatccaatactagaaaacccaaaaataaatgagcacaaggaacaaatcattaaggactacgaagatatttatatgctcttaccacaacaaaatcgccatttaatactttatttagccgcgctcttgaatttatttgcaagaaatgaaaagaagaatttaatgtcagcaagcaatttagcggccatcgtacaaccctcacttttgtctcatcccaaggatgaaatgtgcccgaaagagtatgaggcttccagaactgtcatcgaattcctcatactacacgcttcagatataataccgaatacggaaaaagcgaataaggacaccatgccgcatgcaggaacagtagcagagtttaacaacattaccgttcctgaaatggctattgactccgatgaagaagattttgtgcacccttcaatagatgaccatatgcttccaaggtcacgtgcactttctgactccaacaattttaccatacatcatcatcatcatcatcatcatgcactgtttcctagcccaatagattttgataacaatgggctttctgtaccgagatcctttaaaggtagaacattgagtgcagagtccctttctcccagacttagtaaattacttgggaacgttggaaacagcagcaatactggcatcaaagaccctacagaaagagttcctagaggtgaacataaaaccaaacacaaacaacgacagtcatggttgagaagactcactagcccttctagaacgcagccttag

SEQ ID NO: 78634 - DNA, 342 bp, Saccharomyces pastorianus
atggtcgttaatccgttgacaaagatagggctaacatcacaagattcccattctatggggacgtttgctgcactaaagattttctttacagacttggaaatttcaggtccgataccatcaccttcaatgaacgagaccgtgtatttgccggtagaagggttaggtttcccggtatatcttccgattgaaggttgctttacagtagccaaaaacctcctcgaggtgtttctaaaaaaagtatttctcaacattattaaaaaatattataattgttgttcgttcccgatctgtatcctattatctaccaaggtaattcaggttcagaaaaagtgtatccaataa

SEQ ID NO: 78635 - DNA, 1110 bp, Saccharomyces pastorianus
atgttgagaaatactttttttagaaacacctcgaggaggtttttggctactgtaaagcaaccttcaatcggaagatataccgggaaacctaacccttctaccggcaaatacacggtctcgttcattgaaggtgatggtatcggacctgaaatttccaagtctgtaaagaaaatctttagtgcagcaaacgtccccatagaatgggaatcttgtgatgttagccctatctttgtcaacggattaacgaccattcctgaccctgccgtacaatctatcacaaaaaacctggttgcactaaaaggtccactagctacacctattggtaaaggccacagatctttgaatctgacattgagaaaaacatttgggttatttgccaacgttcgtcccgcaaagtctattgaaggttttaagaccacttacgaaaacgttgatttagttcttatcagagagaataccgaaggtgaatattctggtatcgaacacatagtttgccctggcgttgttcaatctattaaactgatcacaagagatgcctctgagcgagtcattagatacgcttttgaatatgcaagagccatcggcagaccaagagttattgtggtacataaatctactatccagagattagctgatggtttattcgttaatgttgccaaagaactatccaaagagtatcctgaccttactttagaaactgaacttattgataacagtgtgttaaaggtggtcaccaacccatctgcttacacagacgctgtttctgtttgtccaaatctatacggtgatatcttgtccgacttgaactctggtttgagcgccggttctttaggtttaactccatctgccaatattggtcataaaatctcgatctttgaagctgtccatggctctgcccctgatattgccggtcaagataaagcaaatccaactgccctacttttatcttcagtaatgatgttaaaccacatgggtctaacgaatcatgctgaccaaattcaaaatgcagtattgtctactatcgcatctggtccagaaaacagaacaggtgacttggctggtactgctactacttcatcattcactgaagcagtcatcaagagattataa

SEQ ID NO: 78636 - DNA, 2016 bp, Saccharomyces pastorianus
atgatggataatcaggctgtgaagtcactgctagaaatgggtattccacacgaagtagctgtggacgccctccaaagaactggcggtaatttggaggcagcagttaacttcatcttttcgaacgagctgccggagcaagcggaaatgggtgaggagaatggtggcagtcagcctaggatttttgagaacaaaatagtggctggaaccaagccctgtaatgttccgaacaacggggaccaagacattgaaatgccggatgtgagtggtgtcgatgttgattatgatgacgatgaagacatcacggatgaacgcagcggttctaatagcaccagcggatgcagggttactgctcaggactacgatcgttattctatatcggagacatccattcctcccccctcttatagtatagtacaacacaacgagttcaagtcgaacgtgggcgatcctacggttgtgttgccgctacccttgaatagtctaattgagagctattttgggctgtttgcgttgctcgcggccgtgtatttcccacacgtgttcttgaaaccggactttaaggatttgaactatagggcagactggttcaagggctcgtcgtttacggagcccaaatacagacttgcatattgcgaggcagaggatggttccactacgtcggagatcgtgctggccagcgggcctaatgaagggttgcaaccgcatctgctctggcagctgcaaaaactcatctccgtggttaacacgcgaaagtgtgaaagagcctttgtttcggccaaggtgtttacgtcgtccttggaaccgcaattgaggtccaagctggccgattccgagcatctttatgaggtgctcccagcgtttatcaaatcattggcagtggatttggaaatgtgtcctgggatcagagaccgggaaacaagaagtctctttatatcttctgctttgcatactccgaacaagaatgaacctccaatggagacgtttttgtccttgtttcattttcttcctgaggagtacgattctaatctatataaaatgttcaacgttttattgtaccccgaagaagaggaagaagaagaagacgtgattcgtggtggcgagcaagaagaggcgagatatgtggaaccggagaataccttgaaggaggtggcacccgtattaacaatcctgttcaatgaactagaaacaaatacagaatcagtgtctctacccaatggcgtggatataccgcttgagttttacccacagctttacaccaaacagtgcaaagaccaactaataagacatattatttctaaacgaaagcaagcgcggaccagatccagatgcttgcttcaagagatcaacgagttaaagagttaccaaggcaaaaacatatccactattctagagtcgacgctggcgtatctacaaacaattcctgacgatgctaataatgaagcagcaaagcagatcgcatcgttgaaagatacattaaattctgcgagagccgctaaaatggaggaatataaggacttggcgtccaaactgcatggagaatggaacctttcacatccagagacacacataatcaacactgcaaagcaattgggactgatcgaaaatccctacatcctcacaatggcagcactatcgccatattcatactttatcagaagcagaaacggtgcatggtcatggatacaaagtaatacgttgggaacagaattcaaggtgaaaaaatgttcgtcgccttctgtcgttcaagaagccatcaagcatggcacgaagtacgcaagtgaaactccgctgatgttcatatactgtgaagagggtaaaattcccacggaagaagtagtcgcggaagcgttgaaaagcaatagcgggtgcttaaaatttgctgaggatgaccaaaattcattaaaaacattgcgttcgcaatttttcgatggtatgggagatcctgaacaagccaccaacaatattaacaatggtaacgataatgacaatgacgatgacatcgattctgataattag

SEQ ID NO: 78637 - DNA, 393 bp, Saccharomyces pastorianus
atgttcaactgtcttacaaagctcgtaatattagtatgcttgaaatatgtagccaaagccttactaaaccgttccacgggcttaatcatgaaggataagcccgaaggggtccaccatatcaagtcgtgtagcgattcgtcctccagaatctggtatagcttatggatgaatatcgcattttgtggcggcctgggccccaccagcatcttcgacccatgtttcttaacatcctcggcaccgtcgccgccttcagcaccagcattagctattccagctgctgctccaccactacctacatcggttccagccggggccggtgtagaagctggagctggggctgagaccgtttcctcttcactcatgattttttcttctttttttctatataactga

SEQ ID NO: 78638 - DNA, 2646 bp, Saccharomyces pastorianus
atgtcgcaagaagaagcagaatccagtattatttatgaggaacccattgatattccgttagaggatgatgacgatgaggatgaactggaagaagaaaatagcgtacctttaagcagccaggcggatcaagaaaatgcggagaatgagtcagacgatagtgtcgataacttagttggatctgagacacccagaagtgtaacaggtctttctgttgacccaagagacgttgcagacgaagaagatgaagatgaagaaggggaagacgaagatgaagacgaagacgacaatgatgttgacaatgaggacgaaaatgataatgataatgccaacgaaaatgaaaataaattagagagctctagagataagagggcaccacctgctgtgcagactagtaaacgttataagaaatatccgaagctagatcccgcaaaagcacctcccgggaagaaagtcccgctacatcttttggagaagaggagactaggacgtattaaagctgctgaagaatttgccaagacgttgaaaaaaattggcattgagaaagtggagacaactactttacctgccactggcctgttccaacctttaatgttaatcaaccaaaaaaactactcatcagattatctgaaaaaagacgatcaaatatttgcacttagagatagaaaatttttgagaaataacaatactagccaaatatctagtaccaacacaccagatgttatagatttaaagagtttaccccactcagaagcgagtgcagcaccacttaatgacgagatagatctaaatgatccaacagctactatcgtgatacatcctggatcaaattctataaagataggatttcccaaagatgaccatcctgtcgtagttccaaattgtgtagcggtacctaaaaaatggttggatcttgaaaatagtgaacatgttgaaaacgtttgccttcaaagagaacagccagaagagtttaacaacataaagtcggagatggaaaagaattttagagaacgtatgaggtattataaaagaaaggtaccaggtaatgctcacgaacaagtagtatctttcaatgaaaattccaaacctgagattatttcagagaaaaatgatccatctcctatagaatggatatttgatgactcaaaattatactatggttcagatgcattgaggtgcgtggacgaaaaatttgttattagaaagcctttcagaggtggctcttttaatgtcaagtcaccatattataaatcgttggcagaattaatctcagacgttaccaagcttttggagcatgcacttaactcagagactttaaacgttaagcctaccaaatttaatcagtacaaggtcgtgttggtgataccagacatattcaagaaaagtcatgtagagacgttcattagagttctactcaccgagttacaatttcaagcagtcgctattatacaagaatcattagcgacttgctatggtgccgggatcagtacctccacatgcgtagtaaatataggtgctgctgaaaccaggatcgcctgtgttgatgaaggaacagttttggaacatagtgcaattacgttagattatggtggagatgatattacaaggctcttcgctctatttttgctacaaagtgatttccccctacaggattggaagatcgattctaaacatggatggcttcttgctgaacggctgaagaaaaatttcaccactttccaagatgctgatgttgccgttcagttgtacaattttatgaaccgctcacccaatcagccgactgaaaagtacgaattcaagctgttcgacgaagttatgttagcaccattggccttattttttccacaaattttcaagttgatacgaacttcctctcacaagaattccagcctagaatttcagttgcctgaatctcgtgacctctttacaaacgaattgaatgactggaactccttgtcacaattcgaaagcaaagagggaaatttgtattgtgatttgaatgacgatctcaagatcttaaacagaatattagatgcccataacataattgatcaactccaggataagcctgaaaactatggaaatactctaaaggaaaattttgcacctttagaaaaggctatcgttcaaagtatcgcaaatgcatccataacagctgatgtaacaagaatgaactcattttattcgaatattcttatcgttggtggcagttccaaaatacctgctttagattttattttaactgatagaatcaacatttggaggccctctttgttgagttcggcatcgttcccgcaattttacaaaaaactgactaaagaaatcaaagaattagaaggtcattatgtaaatgcccctgacaagactgaagatgaaaacaagcaaattttgcaagcccaaatcaaggaaaagattgtagaagagctggaagagcaacatcaaaatattgagcaccaaaatggtaacgaacacatttttccagtgagcattatcccaccaccacgtgatatgaatcccgctctaataatttggaaaggtgcgagcgttttggcgcaaattaaacttgtcgaagaactgtttattacgaacagcgattgggatgttcacgggagtagaatcttacaatataaatgtattttcacgtactag

SEQ ID NO: 78639 - DNA, 990 bp, Saccharomyces pastorianus
atgttaagatctaccgtttcaaaagcttctctcaaaatttgtcgtcactttcacagagaatctattccttacgataaaacgatcaaaaatttgctgcttcccaaggacaccaaggtgatctttcaggggttcacaggtaaacaaggtacttttcatgccagcatctctcaagaatatggtacaaatgttgtgggtggtacgaacccaaaaaaggcgggtcaaacacatttaggccaacctgtctttgcctctgtgaaggacgcgattaaggagactggagccactgccagtgccatctttgttcctccaccgatcgcagctgctgccattaaagaatctattgaagctgaaattccgttagctgtatgtatcactgaaggtattcctcaacatgacatgttatacattgcagaaatgttgcagacacaagataaaacaagattagttgggcccaactgccctggtatcattaacccagcaacaaaggtaagaattggtatccagcccccaaaaatttttcaagctggtaagatcggtattatttccagatcgggaactttgacatacgaagctgttcagcaaactacaaaaactgaccttggtcaatcactggttattggtatgggtggtgatgcttttcccggtactgattttattgacgccttgaaattatttctagaagatgaaactacagaaggtattattatgttaggtgaaataggtggtaaggccgaaatcgaagctgctcaatttctcaaagaatacaactttagcaggagtaagccgatgccggttgcatctttcatcgcaggaactgttgctggtcaaatgaaaggtgttagaatgggtcactccggtgcaattgtagaaggatctggaactgatgcagaatccaaaaagaaagctttgagagatgttggtgttgccgtcgttgaatctccaggttacttaggtcaagctttattggatcaatttgccaaatttaaatga

SEQ ID NO: 78640 - DNA, 825 bp, Saccharomyces pastorianus
atggttgcgcctactgctttgaaaaaggctactgtgacacctgtaagtggacaagatgggggcagtagtagaattataggaataaataataccgaaagcatcgatgaggacgatgatgacgacgttctgttagatgattccgacaataacacagcaaaagaagaggtagagggcgaagaaggtagccggaaaatgcacgaatctaagaccgtagtggttgatgaccaggggaaacctcgcttcacttcagctagcaaaacgcagggtaacaaaataaaatttgaatcgagaaagatcatggttccaccacacagaatgacacccttgaggaacagttggacaaaaatttatcctcctttggtcgagcacttgaagctgcaagtcagaatgaatttaaagaccaaatccgtagaactaagaacgaatcctaaatttaccacagaccctggtgcgttgcaaaaaggggccgattttatcaaagcctttaccttagggtttgatcttgacgattctatcgcactattgaggctagatgatttatatattgagacttttgaagtcaaagatgtcaagactctaacaggtgaccatttgtcgagagccatcggtcgtattgccggtaaagacggtaaaacgaaatttgcgattgaaaacgctacaagaacaagaattgtcttagctgactctaaaatccacattttgggcgggttcacccacatcagaatggcaagagaatctgtggttagtttaattttgggttcccctccaggtaaagtttatgggaacttacgtaccgttgcatctagattaaaagaacgctactaa

SEQ ID NO: 78641 - DNA, 306 bp, Saccharomyces pastorianus
atgatctttctcgattcaaattttattttgttaccctgcgttttgctagctgaagtgaagcgaggtttcccctggtcatcaaccactacggtcttagattcgtgcattttccggctaccttcttcgccctctacctcttcttttgctgtgttattgtcggaatcatctaacagaacgtcgtcatcatcgtcctcatcgatgctttcggtattatttattcctataattctactactgcccccatcttgtccacttacaggtgtcacagtagcctttttcaaagcagtaggcgcaaccataatgtag

SEQ ID NO: 78642 - DNA, 1551 bp, Saccharomyces pastorianus
atgatgaggtatcaatggtggctttatttagtatatgccatcggcctaatgctatgcctaggcccgtcgtatattcatccagatgaacatttccaatgcatcgagattttggctatgcagttcatgaaggtcaaaggtaccatcccatgggaatttaaatcaaaatttgctgctaggagttacggtcccctattattggtttacgggcctttgttcactattttaaaatcttttcccgaaattcaggacaacccagcgttaattctgtattcgatgagactacaaaactatgtgatgtacctattgtgctatcattttttaattcctaaattaataagggatgagagaaaggccgtacacttcatcaaaaaaagtctacttttaacttcttacgtaacctggacgtaccaaacacacacgttttccaattccatagaaacgctggctttgatctcaactttaactgtaatggaagatatggtaaacgaaaaaaatattcaaagaaggaatttcaaaaattcggtcatattgggacttatatttagttttggtgtttttaatagagttacttttcctgcatttattttcttaccatgtttgatattattctggaagttttaccgggtccattggaaatccttttctttacttttactttcattttcattttcctcgtgtctatttgttcttattgatacaaatatttataacaacggaaagggatttgttattacgcccttgaataacctgaaatacaacctcaatgtccaaaatttgcaagtacatggattacatccaagatacacccatctgctggtcaatttacctcaaatacttggtccagtattgctgctagcgattttttccggttacaaactcgataaattatctagttacgcaatcatatctggcctgctttttctttcattctttcaacatcaagaattaagattccttgtaccgctagttccactactcgtgacaaacttaaactggacacctctgagttccacgttagtaaacaagaaaattttcaagggaacttggcttctttttaacataatcatggcgttcatcatgggaatttcgcatcaagcaggaattatccaatttttgggagattacttccactttcgtaccgaacaaatgggcgttcacatatggtggaaaacatactcaccacccacctggatgtatatgagcaataacctaaccgtttcttctcttatcaatacacaggatggtattgagtcgatagatgaagtggcattcagtgtaggtaaccatcatgtaatagaccttaaaggctgtgatttaccacttttaacagaaacaattaggcggctgcgtttaaacgggtccataactccactaactttagtaactcccaattccatgacatcagaattgaaaaagttgaagagagatggcactattaacttaatacccaaaagaaattacttgttccatatggatttggatcatcttgatttcaatgatttcacgacttttaagccagggctaacagtgtactccatcgaactactataa

SEQ ID NO: 78643 - DNA, 771 bp, Saccharomyces pastorianus
atgtttaatttaattttatggcccttatttttgcttacctcagttgccattcctttgcacctgacattagaagtggtctatctgacgtcttccgttgacttctcaaaggcaagtgctgctaaaaccgctacttctttgggtcagtccccagttgtcatcaccatttataaatcactgttaaaatattggagtctttacgagttcatacattttatttacctctatactcctattgatgcctttctgaatttcttaccatttacctctttacttatgtcgtttggaagtatttgcttgacaagagagctggtatatgacttcattgcctttatggaatctcaaaacaagcttaccggattccttaataagataacagaaccgaattttaacagttatctactgttttcttcaatttataacatttggtttgcagatgacaccaatgacaaattcttattcggtaaattaactcagattttaatatctgtaacaaaaaggtacgaatttccaagaacattctacttagcaaaagtttctgatttcctacaaaatctcattctaacgagattgagaccctttgtaacggagcaaccccaaggcgacaaaaatcgccatcaaaacggtgaccgtgaatctacaaagaatggagctgcttatcagaagtcttcacaacaatcatcgtctttcgaacaaaattttaccagcactgagttcccgaatgattatgattttatggaggatattctagatgagacaactgaattggattag

SEQ ID NO: 78644 - DNA, 1353 bp, Saccharomyces pastorianus
atgtcctcaaggtatagagtggaatatcatttgaagagccaccgcaaggatgagtttatagattgggtaaaggggctactggcctcaccttttgttctacatgccgtctctcatgaaggtgactacaatgacgacttagcaacaactcaacgtgtaaggtcgcagtatgctgatatctttaaagacattgaagggctgattaaagataaaatagaatttgactcaagaaacatgagccaagacgaaattgaagatggcgcctcttctcaatctctgaatatattaggacaatcgcgtttaaatcttttggttccatcaattggaacattctttacggaacttccattggaacaagcttttctatgggaagactcacaacgggccatttcggcgcgtagaatggtagcacccagttttaatgatatcaggcatatcctgaatactgcacagatatttcactttaagaaacaggagaacttacataatggtaaggttttgagattagtgacttttgatggagatgtgacgctgtatgaagatggtggctccctggtttacactaatcctgtaattccttatattctcaagctgttgcggtgcggtatcaatgtgggaatagtcactgcggccggatatgatgaagctggaacctatgagaacaggttaaaaggattaattgttgcattacatgattcaactgatataccagtttctcaaaagcagaatttaacaataatgggtggtgagtcgagttaccttttccgttactatgaagacccggaggaagataactttggctttagacaaattgacaaagaggaatggctattgcctagaatgaaggcttggtccctcgaggacgtggaaaagactttggactttgccgagagaactcttaacaggttaagaaaaagactaaacctaccttcagagatttctattatccgtaaagtcagggcagtgggtatcgtcccaggcgaacggtacgatgaagcttctaaaagacaagttcctgttaagcttgatagggaacaactggaggaaatagttttaacccttcaaaacactttagagtcttttgccccatctagaagaattcaatttagttgttttgatggtggtagtgatgtctggtgtgatattggggggaaagatcttggtgttcgttcattgcaacaattttataaccctgaatctcctatccaaccctctgaaaccttacacgtaggcgatcagtttgcaccggtgggatcagcaaatgattttaaggcaaggctagctggatgtaccctctggatagcatcccctcaagaaacagtgaattatcttcatagattattagaaactgattaa

SEQ ID NO: 78645 - DNA, 786 bp, Saccharomyces pastorianus
atggcaggtttatcgttcgacaattatcaaagaaataatttcttagcggaaaactcgcacacacaacctaaggcaacttccacgggtaccaccattgtgggcgtaaaattcaataacggagtggtgattgcagcagatacaagatcaacacaaggtccaattgtcgcagataagaattgcgcaaaattgcatagaatttcccccaaaatatggtgtgctggtgccggtaccgccgccgatactgaggcagttacgcagttgatcgggtctaacattgaattacattccttatatacctcgagagaaccaagagtggtctcagctttacaaatgctaaagcagcacctatttaagtaccaaggtcatattggtgcttatttgattgttgcaggtgtagaccctacgggatctcatttgttctccattcatgcgcatggttctactgacgtgggctactacctttctctaggatctggttctctagcggcaatggctgtgttggaatcacactggaagcaagaccttacgaaggaggaagccataaagttggcctctgatgcaatccaggctggtatctggaatgatttggggtctggttctaatgtggatgtgtgtgtcatggaaataggtaaagatgcagaatacttgaggaattacttgactccaaatgttagagaatcaaagcagaaaagctacaaattccccaggggtacaactgctgtgctgaaggagagtattgtcaatatttgtgacatacaagaagaacaagtcgatataacagcttga

SEQ ID NO: 78646 - DNA, 285 bp, Saccharomyces pastorianus
atgtcgaacaaagttaaaaccaaggccatggtgccaccaataaattgcatatttaacttcttacaacagcaaacaccagtaacgatatggttattcgagcaaatcggcataaggatcaagggtaaaatagttggatttgatgagttcatgaatgttgtcatcgatgaagccgtggaaattcctgtgaatagtgccgatggtaaagaagatgtggagaagggcacgcccttggggaagatcctgttgaaaggcgataatatcacattgataacatcagcggactga

SEQ ID NO: 78647 - DNA, 81 bp, Saccharomyces pastorianus
atgctccaaatgcgggccaccttggcattccttggtcagactttgacatataataccagctgccaaagacgccagaaataa

SEQ ID NO: 78648 - DNA, 261 bp, Saccharomyces pastorianus
atgaacgtgaagactaaaaacacaatacctgcagaccagtacctcaaagacatgtacatgatggcagtcccaagagaagccactaggttgatgaccataccgcaatatataaactgcttcggaaaaattcgacaaagtgtgaggcccaaaacggagaataccagggcaataatgcacacgaaaactagcaggatggcagcattggtgttcagcgtaccagtattcacaccatcgtatattccggaacccgtactgctatag

SEQ ID NO: 78649 - DNA, 147 bp, Saccharomyces pastorianus
atgtcttacacacgagtagatcatcccattggaaaaatggcttgtcatctgaggcagattttggcaagcccactgtttttcgcaaattatgtactacatgcagccattcactacccttcgagcgacatacgcggcgacatcctgtag

SEQ ID NO: 78650 - DNA, 567 bp, Saccharomyces pastorianus
atgggcaaaaccgcggataatcatggtccagtacgttctgagacagcacgtgaaggaagagaaaaccaggtttactcacccgttacaggtgcaagattagttgctggctgcatatgtttaacacccgacaagaagcaagttctcatgattacttcttctgcacacaagaaaagatggattgtccccaaaggtggcgttgagaaagacgagcctaattacgagacgactgcccaacgagaaacttgggaggaagctggttgcataggtaaaattgtcgccaatttgggtacagttgaagacatgagaccccctaaggactggaacaaagacattaagcaattcgagaactctcgaaaagattcagaagtagcaaaacacccgccaagaaccgaatttcatttttatgaattagagattgaaaatctccttgataaatttccggaatgtcacaaaagacatagaaagttatactcttatacagaagctaaacaaaacttgatagacgccaagaggcctgaattgttggaggcccttaataggtctgctatcattaaagacgacaaatag

SEQ ID NO: 78651 - DNA, 939 bp, Saccharomyces pastorianus
atggttcctgctgaatctaatgctgtacaagcgaaactcgctaaaaccttacaaagattcgaaaataagatcaaagctggagattattacgaagcgcatcaaacgttgagaactattgctaatagatatgttagaagtaaatcatacgagcatgccatagaactaattagtcaaggggccctttcatttttaaaggcgaagcagggcggttcaggcacggatttgatcttctatcttttagaagtttatgatttagcggaagttaaagttgatgacatctcagttgctagattggttagattaatagccgaattggatcctagcgagcccaatctaaaggacgttattactggtatgaacaattggtctatcaaatttagtgaatacaaatttggagatccttacttgcacaacaccattggtagcaaactattagagggagatttcgtttatgaagctgaaagatattttatgttaggtacacatgattcaatgatcaaatatgtcgatttactatgggactggttatgccaagttgatgatatcgaagatagcacggtggctgagttcttcagcagattggttttcaactatttattcatctccaacatatcatttgcacatgaatcaaaagacatttttttggaaagatttattgagaaatttcaccccaagtacgagaaaattgataaaaatggttatgaaatagttttttttgaagattattctgacctaaattttttgcaattgttgctaattacctgtcagactaaggataagagctatttcttaaatttaaagaaccattatttagatttttctcaagcttacaaaagtgagttagaatttttgggccaggaatatttcaatattgttgctcctaaacaaacgaatttcctacaagacatgatgtcgggattcctgggcggatcgaagtga

SEQ ID NO: 78652 - DNA, 1377 bp, Saccharomyces pastorianus
atgaccgatgagaaacgagcttttccaaaaggtaacaaccatataagatcagaaactttcaatggttcggtatctcacaaaatctccgaatcgattaaaaatatcgctagcttaagaccacacggtaaatatacggtacaagacatcgacaacatcatagcatccacatcttcacatgaaaatagaggccaatcaggcgatagtaatggctgtataaatcacgacgaagaaggcgatattccgatgtgtgacttgaatgatgaaagcgacgttgaaatgatttctgaatatctttctaaccagagggagatggaagcacaatctgtcgctcattctatgccaaaaatcaatgacgatttaccgctgttaaatccacctactttgaaaactgcctttgtagtcgacaccaactttattatttcgcatttaaacactttagaaaaattgagatcactgtccagcacttatcatcatttgattattgtaccaaccaccgtaatccaagaactggacggactaaaaaagagccctgatattgctagggacaatgacgatacaactaatcaggaacaagataggacaataggcacattggccagatgggggaacgactggatttataagaatctagccaatttagattccggtttaataggtcaaaaattgaaacaaagcttgaatccaggcagtttaaaggatgactcgatattggactgttgcttgtacttcaaagagattttaaattgttttgttattttgctttcgaatgataagaatctttgtacaaaggcattaactgaagatatattaactgtttcatttaggaagaacatggatgcgaaaataattgcaatgagagcatatgaagaaaaccaactgagatttgctaatctgcgtgactctacagtaaataatttcgatcagaatgtcacatcatatgctcatattcctggaatagaaatgccccctttgcaattcgataaagtctcacaaaatgtgtttgagcaagtaaaagaaactattttctttgctattgaccacactttaagaaaggaatatggtgaagatattggattcatagattacaacccagataaattaactaccatagaaaacgcttcgaattacatttatttgttttgggtgtctgtattttcggaacttttcacttgttcaaagataaagaagaatgagtggaagagcttaccaacagttttgaaatcaaaaccgacaaatctgaatgacttaaaaacatttgaacaattttgggagactgtattgcattttttattcagcaaatttacaaatgaggagaaacaatctttagagaaacagattcatgaatggaaaacatctatcaatgctatatcaacctga

SEQ ID NO: 78653 - DNA, 204 bp, Saccharomyces pastorianus
atggataacaaaaccccagtcactttagccaaggtcatcaaagttttaggaagaaccggttctcgtggtggtgtcacccaagtccgtgtcgaattcttggaagacacttccagaactattgtcagaaacgtgaagggcccagttagagaaaacgacattttggttctaatggaatctgaacgtgaagctcgtcgtttgcgttag

SEQ ID NO: 78654 - DNA, 2430 bp, Saccharomyces pastorianus
atgtcttctgtagaagaattgactcagctgttttcacaggttgggtttgaagataaaaaggtgaaggagattgtcaagaataaaaaggtttctgattcactttacaaattgattaaggagactccttcggactatcaatggaacaaatctactagagcgctagtacacaacctggcatcttttgtcaaaggtacagatctacccaagtctgaattaattgttaacggcatcattaatggtgatttgaagacatctctgcaagtcgatgccgcatttaaatatgtaaaggctaatggcgaggcatccaccaaaatgggtatgaatgaaaactctggtgttggtattgagattacagaggatcaggttagaaattacgtcatgcagtacattcaagaaaacaaggaaagaattttaactgaacgctataaactggtgccaggtatttttgccgatgttaaaaacttaaaggagctgaagtgggccgatccacgtagtttcaagccaattatcgaccaagaagtcttaaaacttttgggtccaaaggatgagagagacttaatcaagaagaagaccaagaataatgaaaagaagaaaaccaattctgccaagaagagttctgataattctgcatcatccggtccaaagaggactatgttcaatgaaggtttcctaggtgatttgcataaagtgggtgaaaacccacaagcttacccagaattaatgaaggaacaccttgaggttactggtggcaaagttcgtacaaggttccctccggagcccaatggatatttgcatattggtcattctaaagctattatggttaattttggctatgctaaatatcacaatggtacctgttatttaagatttgacgataccaaccccgaaaaggaagctcctgaatattttgaatccattaagagaatggtttcttggttaggttttaaaccatggaaaattacttactcaagtgattattttgacgagctttatcgcctcgctgaagtgttgatcaaaaacggcaaagcttacgtttgtcattgtaccgccgaagaaattaaaagaggtcgtggtattaaagaagacggtactccaggtggggagagatatgcttgtaagcatcgtgatcagtcgatagaacaaaacctgcaagaattcagagatatgagagatggcaagtacaaacctggtgaagctatcttaagaatgaaacaggatctaaattcaccaagcccacaaatgtgggacttgattgcgtatagagttttaaatgctccacatccaagaacgggaacaaaatggagaatttatcctacttacgattttacacattgtttggtcgattcaatggaaaatattacacattctttatgtactactgaattctacctatctagagaaagctatgaatggttatgtgatcaggttcatgtgttcagacccgctcaaagagaatatggtcgtttgaatatcaccggtacagttttatccaaaagaaaaattgcgcaattggtggatgaaaaattcgttagaggctgggacgatcctagactattcacgcttgaagctatacgcagacgcggtgttcctcctggtgccattttatcctttatcaacacattaggtgttaccacaagtaccacaaacattcaagttgtgaggtttgagagcgctgttagaaagtacctagaagataccacaccgagattaatgtttgtgttggatcctgttgaagttgttgtcgataatttatctgacgattatgaagaattggcaactattccttacagacctggtactccagaatttggtgaaagaactgtaccatttacaaacaaattctacattgaaaggtcagatttctcagaaaacgttgatgataaggaatttttcagattaacaccaaaccaaccagttggtttaattaaagtctcacacacagtttctttcaaaagtttggaaaaagatgaagctggtaaaattataagaattcatgtcaactatgataacaaggttgaagaaggttcgaaaccaaagaaaccaaaaacttatattcaatgggttcctatctcttcaaaatataattctccattgagagttactgaaactagggtttacaaccaattgttcaaatctgaaaatccatcttctcatcctgaaggcttcttgaaggacatcaacccagaaagtgaagtcgtttataaagaatctgtcatggaacataacttcggggacgttgtcaagaacagtccatgggtcgttgattctgttaaaaactcggaattttatgttgaagaagataaggattccaaagaagtgtgtagattccaagctatgagagtaggttatttcactctggataaagagagtacgacttctaaggttattttgaatagaatagttagcttgaaggacgcaacttccaagtga

SEQ ID NO: 78655 - DNA, 306 bp, Saccharomyces pastorianus
atgatatataactggggatgtataattataatgaaaacaaaaatggaatataaaccatactccgatgatagaaacattatatcgccttttcttttcgatgtagtatttctttttacaaaaaaatcatttttgaaggaaaatataacgttaatctacatggattcaaactctgtatcgatatatctaccattccttagcaacgtcttgcataacatgggcattatttccacttgcaagggttccaaaggaaacttttcaccatccactgaaaataaacctgactccacttttggtataatcttataa

SEQ ID NO: 78656 - DNA, 2361 bp, Saccharomyces pastorianus
atgagtaagcggggtagtttacaggatagagcttccccatcggaggaaactgtaaagaaggcgcagaagagacggaaaccaataaagtcatgcgctttttgtaggaaaaggaaattacgttgcgaccagcagaagccaatgtgctcgacttgtaagacgaggggtcgttctggttgcctgtatacagagaaattcacccacaaaatagaaacaaaagagttatttggcagtactccgaacattgaactgttgaaaaggattgaggatttagagaaaagactagatgacaaagagttgacggagaaggatgtagcgcttagtacgagcccatttaggaacccttacgctaatttttactatttacaatgtaaaggctcgggaagaagaatagtatatggtcctacatctttgagaacgcatctctcaaacgatgataatcggtttgtaaacacgtataatcagctctggtccaaagtgaaaatcgagagaaacagatggaaggctaggcataaatggacaatgaagccagaaactcaactcctagagggaccgccgttagaaaagacaggctctgacatcttgcaacaggtttgtaacgttttgccatcttttgaacaatcgtcaaagattataacagactttttcaatactgaactggaaactaatgaagttagtgaagtattagataaaaccaaaataataaacgatttcacttcctcgtttcttccaagtgacgaactgttacccaacggtgaaaggcggattgaaaagttattaccatcgacaaagaaaaactattataagattggagttattttgatgatactgtgtattcgccatttctacaaaaatactccggaagagatagagaaatttctcatcatgctgacgggactgtcaacagctaaagtatatttcattgaacgcgctcaatttctcttattgaaatactatcatcgagaactaatttgggtgtgtggagacgatttgcatatgattagtctagttgacttattatgcagcacggcaattatgctgggtttacacttgaatataagagaaatatacaaaaatcaagaaaatattgtggggagtatggaaagtttggaaaatttgtgggtttggattatattatcagatttcaatgtttctttaaatattgggagatgtttggcgattaactcatcctattttcaagtcgatgaatgcgagaatggtgagaggttgcctaaaaatacaaaccattattcatcgacggtttttttcgatcagtcaaattcctgcatgggcaagcttaaaaggtttttaagattagctcgaccaatgctagatcaaatttatgatagaagcgcatttccagacttagccgaaaattgtaaaaaactaagaaactttgtagagactgaattccacccaatatcatattacactgacagtgagttaatatctaaagttcctttgtgcgagattaaagtgcttgcgcaggttttgaatttgttgttgacgttttattccttgaggtatttgatttacaaggaaaaaagcgttgttttagagaacaacatcctgcaaaccattttggtctctttttcccttgtcatcaatacgaccatactgtgttttaacctagatgagaagcattttcctgagttttttgatcataattgcgttcatttaccgccatttatggccttgtctttagtatacacaaatttcctttttcctagggcctctactggcttttgtgcgtttttgtatcataagttaactctttttgagaagggctattatctatcatccaacatcaaagatcaagaagtcacagattgggatttgtcaaccttgaatatcccgttggataaagctatgaacttacttactgctttcaaaatacattcagatatatttgctaaatggtctaatgataacaacaagcagttaagaattattatggctcgctcttatacatttgttatcaacatcgccctggaaagcatatatagagctgttttggaaaaagtaatcaaatatagaaccgaggtcgaaaacacatgcttacaacaactccaagacgaattgaatgggtcctattcgctcactgacaatgtaaatactccaatcgatcccagtttaagtgacctgggcgtcacaagcgccagtccattggcgggaaattctccaggattacccccggaggaagtgcgaaataacagcgaaaacgcttcgcataacaatgaaactgggccaattgagactgaactggcacagacaatatccaacgaattttggacggcgtacaaccttggctgggaggaactaatgagtcagccagattataaatatttatttgatacgcaatag

SEQ ID NO: 78657 - DNA, 1194 bp, Saccharomyces pastorianus
atgagtataaaggcagaaagaagagaaacagaagcacgggggtttcgtttggtcttcaaatatatgttaggtcggtaccttttcattgcaaaattgaaaagatttgagcgtgtaaaagtaaaaaaatacatgatgggatcccaagatttagctagtttaattgggaggtttaaatacgtcagggtgttagattcgaaccctcatacaaaggtaatctcactactaggcagcatagatgggaaggatgccgtgttaactgctgaaaagacgcatttcatatttgatgaaacggtacgtagaccctctcaaagtggccgtagcactccgattttctttcatcgtgaaatagacgagtactcctttttaaacggtattactgatctgaaggaattaacttcgaatgacatctactactgggggttgtctgttttgaagcagcatattttgcataacccaactgcgaaggttaacttaatttggcccgcctcgcagttccacatcaagggatacgaccagcaggatttacatgtcgtcagagaaactcctgatatgtatagaaacatagttgtgccctttatccaagagatgtgtaccagcgaaagaatgaaatgggtaaacaacattctttacgagggcgccgaggatgatagagttgtttataaggaatacagtagcaggaataaagaggatggattcgtcatcttgcccgatatgaagtgggacggaatcaacattgattcgttatacctggtcgcgatcgtgtacagggacgacatcaaatctttgagagatttgaacccaaaccatagagattggttaattagactcaataagaagattaagaccatcatcccccagcactatgactataatgtaaacccggacgagctaagagttttcattcattatcaaccttcatattaccattttcatgtccatatagtgaatataaggcatccaggagtaggcgaggagagaggctccggaatgacagtactgttggaagatgttatagaagcgttgggtttcttaggtcctgaaggttatatgaagaagacgcttacttatgtcattggtgaaaatcatgatttatggaaaaagggctttaaggaagaagttgaaaagcaactgaagcatgatggtatcgcaaccagtcctgaaaaaggctctgggttcaataccaatttgggttga

SEQ ID NO: 78658 - DNA, 855 bp, Saccharomyces pastorianus
atgtctgtccaagatactaaagcggtagagttttctatgggtcacatcagatcatcctctgtatccctggtagcagaggctacttcaaacacgaatagtgaagacaaattatctaaggtccaactctacgaagatttgtgccggtacgaggatacattgagtaagttggtggaatctgtagatcgtttcaaaccaaaccttgatattgccaaggatttgatcagaactgatgaggccttgtttgaaaacgtcaaactgttagctgaatatgacaatatctaccgcaacttacagaagattgacaaagactctgaagaactagattctaaaaccaggaagatattggaaattctaaatgaatgtcatgacgagttaaaagcactaccgatgcttgaacaagtagagttcgagaaaaacacaattttacagcaaagatcgaaaatcaattcgacagagttgttggattatgccaccaaactctccaagtttaccaaaataccaccaacgttcgacaagggagctgtgggacccaacaattttatatggcccgcagaggatgccctacgaagaggaatgcttgctatggcctcattacatagtaaagagctaactagaatacccggtgaagaagtagaagaaacagaagtaccgaccgtaccgccatctcaaagtgaagaacaaaaagggcagatggccaagaaagaaggtacaccaaagacagactcgtttatatttgatggtactgctaaagaagttggtgatgaggcagacaataccaaagataaagaaaaggaagaaaataatgatgatgccctagatcttgatcttgatctgtttgatccggacgacttctag

SEQ ID NO: 78659 - DNA, 1860 bp, Saccharomyces pastorianus
atgtacaatcctgtggacgctgttttaacaaagataattaccaactatgggattgatagttttacactgcgatatgctatctgcttattgggatcgttcccactgaatgctattttgaagagaattcccgagaagcgtataggtttaaaatgttgttttatcatttctatgtcgatgttttacttattcggtgtgctgaatctagtaagtggattcaggaccctgtttattagtaccatgtttacttacttgatctcaagattttaccgttccaagtttatgccacacttgaatttcatgtttgttatgggtcatttggcaataaatcatatacacgcccaattccttaacgaacagactcaaactaccgttgacattacaagttcacaaatggttttagccatgaaactaacttcttttgcatggtcgtactatgatggttcatgcactagcgaaagcgatttcaaagatttgactgagcatcaaaaatctcgtgctgtcagaggtcatccacccttattaaagttcctggcatatgcatttttctattcaacgttgctaactggcccaagtttcgattatgccgattttgacagctggttgaattgtgagatgttgcgtgacttgcctgaaagcaaaaagcctatgagaagacaccaccctggtgaaagaagacagattccaaagaatggtaaacttgcattatggaaagttgttcaaggtcttgcttggatgattttaagtacactaggaatgaagcacttccccgtaaaatacgttttggacaaagatggcttcccaacgagatcttttatattcagaatccattacttattcttgcttggtttcatccatagattcaagtactatgctgcctggactatttcggaaggatcttgtattttgtgcggtttgggttataatggttatgattcaaagacacaaaagatcagatgggatcgtgtcagaaatattgacatttggaccgtagaaacggcgcagaatacgcgtgaaatgttggaagcatggaatatgaatactaacaagtggctaaaatactctgtttatttacgtgtcacaaagaagggcaaaaaacctggtttccgctcaactttgtttactttcctaacttccgcattttggcatggtaccagacctgggtactatctgacttttgcgacaggggctttgtaccaaacatgtggtaaaatctacagacgcaattttagaccaattttcttgcgagaagatggtgtcactcctttgccttctaaaaaaatctacgatttagttggcatatatgcaattaaactagcatttggttacatggtgcaaccatttattatccttgatttgaagccatctttaatggtatggggctctgtttatttctatgttcatattattgttgctttctcatttttcctattcagaggaccatatgctaaacaagttactgaattttttaaatccaaacaacctaaagaaatattcattagaaaacaaaagaagttggaaaaagatatttctgcaagctctccaaacttgggtggtatattgaaggcaaagattgaacatgaaaagggaaagacagcagaagaagaagaaatgaacttaggtattccaccaattgagttagaaaagtgggacaatgctaaggaagattgggaagatttctgcaaagattacaaagaatggagaaataaaaatggtcttgaaatagaagaggaaaacctttctaaagcttttgaaagattcaagcaggaattttctaacgctgcaagtggatcaggtgaacgtgtgagaaaaatgagttttagtggttactcaccaaagcctatttcaaaaaaggaagagtag

SEQ ID NO: 78660 - DNA, 567 bp, Saccharomyces pastorianus
atggatttacccaaggacaaaagtgacagaactcatcaaagaattaatctaaataacagtgggacagatcgaactaatgatttgtaccttcatattgtccaaacgttcggttgcatagaaacaactgcaacggaaaatgccacgaaactgttaatgctgggtgacgtcgaagtagaaatatctgcgagcagcgtttcaattgagtggacacagaattcaatgataagccaaacaattgccgatagtatagtaataatgatcatcggtttgtgtgcaagcgacaagaacgtgctatctgaatcagaattgaaagagagaaaccataacgttttgaagatccaagaattgcaaaatctgtttcgagaacaatttggagacagttttagcatcgatgaaggaataggaagaaaagaaaatgtaaagaatggtagcgtcaccataggcaagagtaaagccacgatcgatttctccaccatgaagctgattgattgtaattcgaacccactaaagggaagagtggagagcatactaagcattggccagaaattaacaactccattgtgctga

SEQ ID NO: 78661 - DNA, 1902 bp, Saccharomyces pastorianus
atgggactcctaaactcttcagataaggaaattatcaaaagggctctaccaaaagcgtcgaataagattattgatgttacggtggctcgactatacattgcataccctgataaaaatgaatggcagtacactggactttcaggagctcttgctctggtagacgatcttgtggggaatactttttttttaaaattagttgacatcaatggccatagaggagttatctgggaccaagaattgtatgtgaattttgaatactatcaagaccgtactttttttcatacatttgagatggaagaatgctttgcaggtttattgtttgtagatattaatgaagcatcgcactttttaaagagagttcaaaagcgtgaaagatatgccaacaggaaaactttgttgaacaaaaatgctgtagcattaaccaagaaagtaagagaagaacaaaaatctcaggtggtgcatggcccgagaggggagtcattaattgataatcaaaggaaaagatataactatgaagatgtggacacaattccaactacaaagcataaggctcctccccctcctccgccaacggccgaaacatttgattcagatcaaacaagttcattttccgatatcaattcgacaacagcatccgcaccgactaccccagcccctgctcttcctcctgcatctcctgaagtaagaaaagaagaaacgcatccaaagcatagtttaccgcctttaccaaatcagtttgcgccattaccagaccctccacaacataactctccacctcaaaataacgcgccttcgcaatcccaaagcaatccatttccattcccaattcctgaaattccctcgacacagtctgcaacaaacccatttccatttccggtacctcagcagcagtttaatcaagctccttcaatgggcataccacagcagaataggccccttccacagttgcctaacagaaataatcggcctgtgccacctcctccgccaatgcgtaccactactgaaggttcaggtgttcgcctacctgctcctccacctccgccaaggcgtgggccagcaccaccacctcctccacataggcacgtaaccagtaataccctgaattctgccggtggaaatagcctccttccacaggccactggaagaagagggccagcaccaccacctcctccaagagcatctcgccccacaccaaacgttacgatgcaacaaaatccacaacagtacaataattctaaccgcccctttggatatcagacaaatagcaacatgtcatctccaccccctcctccagtgacaactttcaataccctgacaccacaaatgactgcagcaactggacaacctgcagttccccttcctcagaatactcaagcaccttcgcaagccacaaatgtgccagtggcaccaccacctccttcggcatttttaggccagtcgcagatacctcagtcagcaccctcagcacctattccgccaacgttaccatcgacgacgagtgctgcaccacctccgccaccagcattcctaactcaacaacctcaatctggaggagctccacctccacccccacctcctcaaatgccagctacatcaacatccggaggcggttcattcgctgaaactactggagatgcaggtcgtgatgcacttttagcttcaattagaggggcaggtggcataggcgctttgagaaaagttgacaaatcgcagctagataagccctcagttttactgcaggaagcacgtggagaatctgcttcaccaccagcagcggctggaaatggaggcacacctggtggacctccggcttctttagcagatgcgttggcagcagctttaaacaaaagaaaaactaaagtgggagctcatgacgatatggacaatggtgatgattggtaa

SEQ ID NO: 78662 - DNA, 387 bp, Saccharomyces pastorianus
atgagattacttcaccatggtgaatacgggacaaaactaattggaggaaaatgcagcatagatgagaaactcggtcacccttgccctaagcagaagacgcaaaaaacatctgcgcaaaaagaaatgggtccacaatatgtacggatgtatggtcccaaaagaaaagcaataataaggacaggaaacccggatgacggcattaatttacctgacgccggccgaggcatcttaactgcagccacaatttggtcacgagcttaccattcaaattattcttaccttgtacgcccaaaagtagtgactctttctaagcatcgcgaattaatgactacttttcttttatacgttttatatgtatgtatatatataagtgccttcataaaatag

SEQ ID NO: 78663 - DNA, 1188 bp, Saccharomyces pastorianus
atgtctttggaaagagaggaaccacaacacttcggagcagggccagctcaaatgcctacaccagttttgcaacaagctgctaaagacttaatcaatttcaatgacataggtttgggtatcggtgaaatttctcaccgttcgaaggatgccaccaaagtgattgaagactctaagaagcacttaatcgaactgctaaatattcctgacactcatgaagtgttctacttgcaaggtggtggcactactggtttttcttccgttgctactaatttggcagctgcatatgtgggtaagcatgggaagattgcacctgccggttatttagtcaccggtagttggtctcagaaatcttttgaagaggcaaagagattgcacgttcctgctgaagttatcttcaacgctaaagattataacaatggcaaatttggtaaaattccagatgaatccctttgggaagataaaatcaaaggtaaggctttctcatacgtgtacctatgtgagaatgaaactgttcatggtgttgaatggccagaattaccaaaatgtttagtaaacgaccccaacatcgaaattgttgctgacttatccagcgacattttgtctcgtaagattgacgtttctcaatatggtgtcatcatggcaggcgcccaaaaaaacattggtttagcaggcttaaccctatacattatcaagaaatccatccttaagaatatttctggcgcttctgatgaaacattacatgaattgggagtaccaatcacccctattgcattcgactatccaacggtggtgaagaacaactcagcctataatacaattccaattttcactttacatgttatggatctcgtgttccaacatattttgaagaagggtggtgttgaagcgcaacaggctgaaaatgaagaaaaggccaagatattatatgaggcattggatgcaaattcagatttttacaacgttccagtggatccaaagtgtagatcaaaaatgaatgtcgttttcacccttaaaaaggacggccttgatgaccagtttctaaaagaggcagctgctcgtcatttaaccggtttgaaaggacatcgttcagttggtgggttcagagcctccatctataacgcgctttcagtgaaaactgtacaaaacttggtagattttatcaaggaatttgctgagaaaaacgcttaa

SEQ ID NO: 78664 - DNA, 663 bp, Saccharomyces pastorianus
atgtcagcacctgctcaaaacaatgccgaggttcccactttcaagttagttcttgttggtgatggaggtactggtaagactacctttgtgaagagacatctgaccggtgaatttgaaaaaaaatacattgcaactatcggagtagaagttcatcctctatctttttatactaatttcggtgaaattaagttcgatgtctgggataccgcaggccaagaaaaatttggcgggttaagggatggttattacatcaatgctcaatgtgcaattattatgttcgatgtcacatccagaatcacttacaagaacgtccctaattggcatagagacttagtccgtgtgtgtgaaaatattcccatagtgctatgtggcaataaagtcgatgtcaaagagagaaaggttaaggccaagactatcactttccatagaaaaaagaacttacaatattatgacatttctgcaaaatccaattataattttgaaaagcctttcttgtggttggctagaaaacttgccggtaacccacaattggagtttgttgcgtctcctgcattggccccacctgaggtgcaagttgacgagcaactaatgcaccaataccagcaagaaatggaccaagccactgctttaccattacctgatgaagacgatgctgatttataa

SEQ ID NO: 78665 - DNA, 435 bp, Saccharomyces pastorianus
atgactttggcttttacgaccttcgctatttccaagataaacaattcatccacgaatgaagattctaaagtcatgataatgtgcgatgagcatcaccctttcgagaagggttactttaagtccgccatacgagccttcggcaacagcattaaggtaggattaatgggtaactcgcgaccagaaggcgcagcatccatattccaagataaaaatattcctcacgatctgacgacggaagaactcaggttgcagctggtctgtatggctttttcctggttcatatttggtctcttcatcgcttgcttactactttgtatcacgcttgtgctaacatcgcgatatcctggagaaaatgaaaacaaagccacggaagttgtgccatccagtaatattgacgacgaagaaaagcaattatcgctttccgacatgatttag

SEQ ID NO: 78666 - DNA, 210 bp, Saccharomyces pastorianus
atgtcggaaagcgataattgcttttcttcgtcgtcaatattactggatggcacaacttccgtggctttgttttcattttctccaggatatcgcgatgttagcacaagcgtgatacaaagtagtaagcaagcgatgaagagaccaaatatgaaccaggaaaaagccatacagaccagctgcaacctgagttcttccgtcgtcagatcgtga

SEQ ID NO: 78667 - DNA, 1314 bp, Saccharomyces pastorianus
atgtcagctttattaccaagattactcacaagaacagcttttaaagctcctgggaaacttctgaggctctcttcagtaatttctaggaccttttctcaaactactacttcctatgcagctgcttttgatcgttccaaaccgcatgtaaatataggtacgatcggccatgttgatcatgggaagacaactttaaccgcagccattacgaaaacgttagccgcaaaaggtggtgccaacttcttggactatgctgccatcgataaggctccggaagaaagagctcgtggtattacaatttctactgcgcacgtggaatacgaaacggccaagagacattattctcacgtcgactgtccaggccacgctgattacatcaagaatatgattaccggtgctgctcaaatggatggtgctatcattgttgtagctgctaccgatggacaaatgccccaaactagagaacatttacttttggccagacaagttggtgtccaacatattgtcgtttttgttaacaaggttgataccattgatgatccagaaatgttagagttagtcgaaatggaaatgagagaacttttaaacgaatatgggtttgacggtgataatgctccaattatcatgggttctgccctttgcgctttggaaggtcgccaacctgaaattggggagcaggccatcatgaaacttttggatgcagtggatgagtatattcctacacctgaaagagatttgaacaagcctttcttgatgcccgttgaagatatcttctctatctccggtagaggtactgtggtcactggtcgtgtggaaaggggtaatttaaagaaaggtgaggaattggaaattgttggtcacaactctaccccattgaaaacaacagttactggtattgaaatgtttagaaaggaattggactctgctatggcaggtgacaatgccggtgttttacttagaggtatcaggagagatcaattgaagagaggtatggtcttagctaagccaggtaccgttaaagcccatacaaagattctagcctctttgtacattttatccaaagaggaaggtggtagacattctgggtttggtgaaaactacagaccacaaatgtttataagaacagctgatgttacagttgtgatgagatttcctaaggaggttgaagatcattctatgcaagttatgccaggtgacaatgttgaaatggaatgtgatttgatccatcctaccccattagaagttggtcaacgtttcaatatcagagagggtggaagaactgttggtaccggtctaatcacacgtattattgaatag

SEQ ID NO: 78668 - DNA, 3414 bp, Saccharomyces pastorianus
atgaacgatatggcaaaacctctcccaactccaccgactgctgagatcaggaaaagtcgatccaattcaccaaaaaaagctcagaaaacaaatctaagtccaaacaaaaatcagaataatgagaaaaatgtacctagatcaaacggaagaaccaaaaacgaacacaatagtatggatgacgaagagtttgaattcttccatcaatttagtcgggagaaagttaaaggcgtcatacacgtaatcaccgctgaacttaaggaaaaaggtccagatgttgaatttttaatgataccgttcaggccggaacagacgaacgacaaattgctgacattactaaatcagctattcccactaggaaacggtcaaccagtcaacgaaaaaaaacagctcagaattgtttccaaggccgatgtctggactttatttcaatgcttaaaatacatttggtgcagacttccaaattcagaaattataggctggaaatcttatttggagtttaaattcagggaagaagataaaaaatttcctcgaaaatcatttttggaaattatgcctcaatgtctagcttccccaaatcatgcatcaatcgtttacgatttttttgacttgattatttcaatttcatcaaattcaagagttaataaaatgagcgctagaaaaatatcgaagatgtgtgcaatctgggcgtttagtaaacagataccaaattctgatatccaagattacgattttgaatcagccgccatgaagtcttttgcccccaacaattccatacaagatgggctagatcagtggattccggcttcagatgccatgtttcacctactcttagcatttctaagaagttttgcccctcaagatcttgaatcggcaaagctgccgcgcacacttaagagtttactattcaataatcagtatcctccaagaaaatcaacagcgtacacatcagagacaatcctaaccattcctctggtaactttaaaaacagacgtcttttcgagaaaaccttggcaattattggagcgttgcaatgatcttcttgatttcagtgatcatgatgcattcgaagcaagagaggactacgctttattaaagtctttattcagaaagaaaaatacagtggagggaattagcaggaaaatgtcccaggagtcaagaaggttgatgaaagcaatgtctaccaaacattcaacatttcaaccaggttgggctcccagaaaatgtattgaaaatatttctcatttaaaagaatgtattgaggttaaaagactagatatcgatgattattttatttggacttggttatcgtccctttctttcgaacaaacatccgaaaagaaaaaaatttttggaagatctattatattggaatttgaatttgatggatttaaaaaatgggtggttttccaagaatgtgatataacgttagattataataaaaagggtcaattgaagaaaaagacttctgcacagtcaccaacgaccgaaaaggaactacctcctgatgactttgaattagaagatccacctctctccaaatctcctacactatctcagacctacaaaaaattccaagctgaggtacctcagcaaagtactgttcgaagggattcagcacccgataaccaaggaatctatcacacagtcattagtaaaaatgcattgactaaaaataagcataatgtgaatttgcattcttttgaacataaaatctccaaatggaatcctctaaacaacctgcgaaagaaaagcggtagtaactctagtagttcatcatttgaggaaaaaagtaaagacgctcccatccacgaagaataccataccaacaaaaatcacaaatcgaaaaaagaagagcgagtactatctcagtttagcacacttaatcctgatgaatatcagttaccagtaatagagaccggttcatcaaactttaagattgaaataccggaattaatgtacgaacacgatgatgacgacagtgacaaacttaaaaattcccagaaaagagctaccgactcagctattgaagaattaaacggtatggttgaagaaatgatgattaatgagccagacgatgtaaaaatctccataactgaggcagagactttcgaatcattgacaaagtttgatcaatataagccatccaatataactgacgatgacttacaaagcagccattcaagcgccgttcactcattgaagctaagtacaaatacaaatgattcttgcgctgatagttccaaatacaccgctgataggaaattagcggaacctagaaagatttctgaggaatccaaagtcaacgacgattcatcatcatattattctccaaatatcaacaacttgccggcatcaagaatgcctagtcaacccacttattcaaattcggattcgaaaaaggcatttacgaatgagtctcgcctgaacgtcttacaagatgcagtcagtccatctcaacaggtaacaccaaaaccatataaaaatgcgcctggagactgtgtatctcctgttcagcaaaaatactatcagaacgatcgtagaaatgaaatgtcgcctgcaagtgcaccagttccaccttctgcatattcacctgcgaggtctccacaattctccaccaattcggctggattcaagcagaacacgattaatgtacccgttgggtataaagatcctgctcacgttttagcaaatcaaccacatatgacatatcgggaccagcataattatccatctcaccaacaaaaacaacgtcccttccaaaacaatattgtgcccccagaactaaagtccagaaatcaacgggcagatgcttcacctattccccaacatatggtgccagtaaaacaaggtgtgcccaatcttccatctaacgttccattatatcaacaaatggaacgaatgaaccctaaccaccagcaccctgtaaatacttacaaggtaactcagccgccgcatcataataacacaacaaatgcttatgggaacagccgggcaggcaatgctcatatgttagatggaaagtggagcaataatccgccgcaaatggtaccaaagggagttcgccccaatcaatatccacagcagcacgttaataggtattcaccgcaagctcaacctgtcgtacctgcggaatactacaatggacctccacctatgcgagcacctccaatgatgtcccatatggtaccagctcaggagccgatacgttacacagccggtgctaacaggcgtagttttccccaaggcatgcagcagaatgcctattccgtacccgctcagcctatgggggctgtaaatagtgaattttacctaccagaagctcctcagggaaacaaactgcatggaaatattaacaaaagacaggagagaaagaagctatatgataacattagaagcggaaatttcggcatatag

SEQ ID NO: 78669 - DNA, 351 bp, Saccharomyces pastorianus
atgtcccaagaaagtagcgttttatcagaatcgcaagaacaactagccaataaccctaaaatagaggatacaagccctccctctgccaattcgagagataatagcaaacctgtacttccgtgggattacaagaataaagccatagagatcaagagcttcagtggttataaggtaaatttcaccggctggataagaagagacgtaagagaagaacgtcaaaggggaagcgagtttactgcatctgacgttaaaggatcagatgacaaagctacaaggaaaaaagaaccagcagatgaggatcctgaagtaaaacaacttgaaaaagaaggagaggatggactggactcataa

SEQ ID NO: 78670 - DNA, 1338 bp, Saccharomyces pastorianus
atggtttcgttcagagggctgactacactaacactactttttaccaaattagtaaactgtaatcctgtttccacaaaaaatagggactctatacagtttatttataaagaaaaggatagtatatactctgccatcaacaatcaagccatcaatgaaaaaattcatggagtcaatttgggtgggtggctagtattggagccgtatattacaccttctttattcgagactttccgtactaatccgtacaacgatgaccgtattcctgttgatgaataccatttttgtcaaaaattaggctatgaaaaggcaaaggaacgcctttatagtcattggtcgacgttctataaagaggaagacttcgcgaaaattgcttctcaaggcttcaatttggttagaattcctattgggtattgggcctttacaacgttgagtcatgatccctatgttaccgccgagcaggaatattttctagaccgggctatcgattgggctaggaaatatggtttgaaagtatggattgatcttcatggagccgctggttcacaaaacggatttgataactcagggttgagggattcatataagtttctggaagatgaaaatttaagcgccaccatgaaagctttaacgtatattttaagcaaatactcaacagacgtatacctggacaccgttattggaatcgaattgctcaatgaaccgttaggtccagttattgacatggaaagattgaaaaatttgcttttgaagccggcttatgactatttgagaaataaaattaatagcaaccagatcattgtaatacatgatgcttttcaaccttaccattattgggatgggtttttgaatgatgaaaagaacgaatatggcgtcataattgaccatcatcattatcaggtgttctcgcaggtggaattaacaagaaaaatgaatgaacgtatcaaaatcgcctgccaatgggggaaagatgccgtaagcgagaagcattggtccgtagcaggcgaattttcagcggccttaacagattgtacaaagtggttaaatggggttggtctaggtgccagatatgatggaagttggaccaaagacaatgaaaaatctcattacataaatacgtgtgcaaacaacgagaatattgccttgtggcccgaagagagaaaacagaacactagaaagtttatcgaggctcaattagatgcttttgaaatgactggtggatggataatgtggtgttacaagacagagaatagtatcgaatgggatgttgaaaaattgattcaacacaacatttttccgcaacctatcaacgataggaaatatcctaaccaatgtcattga

SEQ ID NO: 78671 - DNA, 4860 bp, Saccharomyces pastorianus
atggcagcagtacccaccatcgaccttacactagccgattcagataatgaagacatattccattctttttcgtcttcaacaagtgtggataagatagacattaggaaagaaaatgggaaattaagaatggcaggcttggaagtcgcccaatctaatgacgatgcagcacgtcaagcattccatgttttcaagacgaacatatcaaataatgaaaccttcgatactattctttcaaagagcaagacaatcacagacagtaccttcaacaatgaaaaatcttccaacgaagtaaaacagcagcaagtcttgaaggaagaaacgatgggatcttccaacgatgagaagaaaacacaagagagcagcccaagcgcagagatgataaaacttttttatgaaaacgatgatgtgccgttatccgatagttttaaacaaaaagaggaaggtaaaagaataaatcaggatgagcaagtgaaggaaaatatctgtggcatttcttcctcatacgtctccaaagactacgatggcgttgaagatgatttcgagcctaatacctgccaggacagcaatttggattttcaagaggagaagttaaacttgaataacaaaccgtcacagcaacagttcagcgacccagaaacaaaagataacagtttgaagagcgaaaacaaagaccaaataaaaggagtcacaacaacaagttatcgtgatttacctattgaatctagtgctttccaggattctgaaactcaaaataactccaaaaacactatacctaacatcgtaaatgaaaagcgaacgccagcattaccgtccaatctaagctctgttgagagttcccttaaaaacgagacggccaaagtagaggggaagacgaccgttcgtcttccaggacttcaaaataatgttgccttacttgagcaagaacaaagtgaactattcaagcactttagtgaacaacctgtcgatattagcgattttggtcgtaagattaaaaggaagcatagcggagattttgcagataacaagatacttaaaagaccgatattgcccttaaaaaatatggaccatacaacacataattcacatgattccgaacagaaaaatagctcgattattattctttcagatgaggacgaatctggtgccggtatcaatgatatagaaagtcctttgaaagtttctgaaccaaatacagctgatgcgcttaggagcagtgtaccagaagtcatatctttacttgacctacccaatattgacttgaataactcagtaataaaagaagcaagtggcagcaattcaattcctacatcagaaacagacgcacaatcctcgagttcgtcagttcttcaaggaactatcatgacagaacaagctactcaatcctctcaacacgaatgtaacagttcacttgatactctaaaaaaaaatcatcaaaaattattgaaggatttgaattctagagagtctgaactacgtaatgctctcagttgctgcaagacaaactctgaaattttaagaaggaaactaagtagaagagaaaaggaggtctctgatgctgaaaaacattggcagttattgttgacatcgatggctagagggggaagaactatcagctcaactcagcagatattagttgatgaagctgagaaccaattaaacaaactgaaggaaaaaagacagttgacaaaatcgaagctagattcaatcaatttgaaaatgtataattataacgaacaatggaagtcctttgtgcatttgaaaaatataaacctgcagaaatctttggctgcccttgagcggtcagccagggatagtaaagcttctgcgaccgtaaataaaagaaacgaatgcctggctgagaaagaaaagctagaccaaatgttaaaagaaggaaccctaagcttcagtacctacaaacaattaacaggggagatccagcagaaactgaatgagttgaaactgggagaccaacgcacaactgatatcaatagtgtatcgccaatagtacggcaacctctcgccaaaagagatttatttattaagtccattgatactgcaaaagatttattagccaagaacacatccaggacagaaatgacgaagagaattctttataaacatttggacaacttggtctcttataagaacttttttgaagacggaagatccttaatagatataaacagaagacacgttgcacatgaatcggcccaaatattgttcaccaacggtgtaaagatgcccattgtttttgaaacattacaagattacggcatcaagttttctaatccagccattgtcgatcctgacagaagagcccaatattttaaaagcatcgaagttgcacgcgatctcatatcaaagtctactagatcagaggatgctaaacgaaagattactcgatttttgaatataattgaagaatttcgtaaagatattgacaccggatttccacctactcctttaaaaagggaaggcgtcggaaaagctgttgttgggctaagacaacaaagacttaagatggacagactatatgaaaatttgagaagatataagattccaataacaagtgaagaattactgcagcaaagctatttatttccggtaaacgcagatcaacgacctccttcaaactggaacaccgtggaaaataccgaagatactagttctacagctaatgatctatcgatgcaagatgaatttcacatctctaatatgcatgcagcagaagatcaagaacagattagggctcttttggagaatgtcaaacaatctgaatccattatagacggcgaagcacttactcccgaggatatgaccgtaaacttattaaaacaccagaggctgggtctgcattggttgttacaagttgaaaactccgcaaaaaaagggggtctgcttgctgacgatatgggcctgggtaaaacaattcaagctattgcattgatgttagcaaatcgctcagaggaatccaaatgtaaaaccaatttgatcgtcgcaccagtctcagtcttgagagtttggaaaggtgaattagaaacgaaagtaaaaaaacgcgcaaaatttactacatttatttttggaggatcaggtaacggaaaagttaagcactggagggatttggcaagatatgatgctgttttggtatcttatcaaactctagcaaacgaatttaagaaacattggccgaaaaaactggatggtgaacaaaatcagctaccagctgtgcctcatatacaagctcttaataggttgaaaacctcaaatgaatactactctccatttttctgcaatgattcaacgttttacagaattttactggacgaaggccaaaacatcaagaacaaaaatacaagggcttctaaagcgtgctgtactataaatggaatgtataggtgggtcttgtctggtacgccgattcaaaatagtatggatgagctttattccttgataagatttctaagaattccaccctaccacaaggagcaacggtttaaattagacattggaaggttttttcagagaaataagcaatatcaatatgataacgaggatagaaaaaacgcattaagaaaggttagagtccttctaaatgccattatgcttcgtcggtctaaggctgataagatcgacggcaaacctttactggagctccctcctaaaattgtggaaatagatgaatcacgcctgaagggagaggaattaaaattttacacagctttggaatcaaaaaatcaagcactcgctaagaaattgttgaacaattctacgaggggcagctactctagcgttctcacattactacttcgcttaaggcaggcttgttgtcattcagaattagttgttatgggagaaaaaaaagcggaaggtacaaaggtagctaacggcaaaagctttgaagatgactggctcaggctctactataaaatcactcacatgagcggagaagcgcaggctcaggttattacttcaatgaattctatgacatgtttctggtgcatggaacaattagaaccagaagcgatgtccgttctgacaggttgtggtcatttgatttgcgacacttgtatcgagcccttcatcgaagagtcatccatgctacctcaggccaagaaaaccaaaggtggggcatttgctattccatgcaaagattgtcaacgtttgacaaacgagaaagatattgtttcgcacaagttatacgaccaggtaataaaccagggatttactgaggaagatttgcatgcagagtatttaagtgaaatggagaaacaaaaaatacagcaaaaaaatgtatatgtgccaaattttgagagtttagaaccatctacgaagatagagcaatgtatacaggttattcaaagagtttttgatgaatcagcaaccgaaaaaattattattttttcccagtttacaacattttttgagattctcgaacattttctcaaaaataaactgaattttccctacttgaaatatattggatcaatgaacgctcagagaagatcagatgttatcaacgaattttatcgtgaccctgagaaaaggatacttctgatttccatgaaagccggtaactcaggactaacattgacatgtgcgaaccatgtagttatagttgatccattttggaatccttacgtcgaagaacaagctcaagaccgttgctatagaattagtcaaacaaaaaaagtccaggtgcataaattgtttataaaggactctgttgaggatcgtatttctgaattacagaagagaaagaaggaaatggtcgattctgccatggacccaggcaagataaaggaagtgaatagtttagggcgtcgggagttaggatttttatttggtttaaacgctctttga

SEQ ID NO: 78672 - DNA, 1131 bp, Saccharomyces pastorianus
atgacatccgatcctgttaatacgaatataagtagccccactttaacggacagaaatgcagacgaatcatgggagctcttgaaaagagagtttaacacattatttagcaacctgaaaactgacagtaaagaagaaggtaatttcacagacaacaaaggagaaaccgccaagaaaccaattgttctgcaggataatgatgattcggattttacgcagaatcagggaaaagttgctactgcaaccagtacaactaatgacagaagctttaagcgaacacttggttctattgaaatgaaaaaacgttatgttaagaaaaattgccaagcaaaatttgtttttaacacgcttgaaggtaaagaagtttgttcgaaaatactacaacataccctaggcctattaagtttattgctattgacgagaaagatacgactactaaatttttcctcaaaactgcgattggtgattcaacaattgagtttatttcggtactatttgagattcggaaactttgcgatcaatttatataaaattatcaaaagatttcgctggttgagagaaatgaaaaaactacattataaagatcaatcaattttattttattttaaaaatttccggtttttcgacattattgaagctttttataatttgacagatgagttgatactgttccataagctacaatcaatgtttggtaaaaagaacacatcacatgcaaatattaatagactaatgacattcgtcaaagaacagcactatatcttatgggaagttttaaatattcttgctatcaataaaaacattgaacagtggcgacagctaataagagatgaaatttatttaagtatctataataccagtggtaatgcaataaaggaacacgagttaaagtacaaactacctaccaatgacaaagtcaatttggagttacggaaaaataatattacattggatttttataagataatactaaacttattgtctaatctaattaatattaaaggtaaaagggacaaatataactcagagctagcttacgaaataatttcagtaggttccggtgttactgaactccttaagctatggaaccaagccaaagtcacttcggctaatgaacatacaagcgctgtttga

SEQ ID NO: 78673 - DNA, 861 bp, Saccharomyces pastorianus
atgtcgaatgcagaggccagcagagtgtacgagattatcgtagagtctgtggtaaatgaagtgagagaggactttgaaaatgcgggtatcgatgaacaaactttacaagacctaaaaaatatttggcaaaaaaagctcacagagacgaaggtaactactttttcatgggacaatcagttcaatgaaggaaatatcaatggtgtacagaacgacttaaatttcaatcttgctacccccagcgtaaattctagcgagttcaatattaaggaggagaataccggtaatgaaggtctaattttgccaaatatcaattccaacaacaacataccccactctggagagaccaatattaatacgaatacggtagaagcaactaataattcaggtgctaccttgaacacaaatactagtggtaatacaaatgcggacgtaactagccagcctaaaattgaagtaaaaccggaaatagaacttactattaataatgccaatataactaccgtcgaaaacatagatgatgaaagtgagaagaaagacgacgaggaaaaggaggaggacgtggaaaaaacccgcaaggaaaaggagcagatagaacaagtaaaattacaagcgaagaaggaaaaaagaagtgcattattagatacggatgaggtcggttcagaactagatgattccgacgatgactatctaatttcggagggtgaagaggatgggccagatgagaacttaatgctgtgcttatatgataaagtcacaagaacaaaggcgagatggaaatgtagtctgaaagatggtgtggttaccatcaatagaaatgactacacattccaaaaagctcaagtggaagcggagtgggtataa

SEQ ID NO: 78674 - DNA, 2466 bp, Saccharomyces pastorianus
atgaacgaagttcctaccactccagttaggcttattttagggcaagctcagcaacgcgagcagaattcagaaaactgttcgcaagaacgtaacccacgcacgtttaattccgaaccagattccagctttaactctcctggttcctcccagttcgtgatacatcctcatgaaccactcgagaaggagaaggatgagaagcaggatttagaccgctcgattgattacggtaggtcatcagctcttaacaataagaataatgccaatccattagagaatatagacataaataaaatgtttgatgacaaaaaatcagattcaggtaccaatgatgataaaggaggcgcaagtactagtgataagcatgtccttgcattgaattattcaccgatcagagttgatatgaactcctcagagaaacgaagcgacaaaaacgtggacgtagatgaaaatgataaagaaagtagccatattaataaaaagttgaaattgcagttagaatcagtacctaatttgaaacaaagctctaccaaagatatcattaatgacaaagaagaaattatgtcgtctccaatggcgattgatatgattgagaccaacataagcccaaataaattcataataaacgacggagttgaaagaaacgatagtttcaacatcaataccgacacacttaaattagaaaatgatataaatgagaaacaacaagaggaagacttcataaaatctaacagtaacaatgtggttaacattgacaatgcttataaggaaaaggaggacgaagaaaatgatataacaaattctcatataaacaggcttactcctttgtatgagacttctgcaagggagtcgaactcaaatgaagaggggaggaatgactacgatgatgacaaccaacttgatattagacatgacaattttcagattgtagcaaaaagaaacgaggagctcactgatcagatatatcacttaaatcaaatgttaaactctttgatttctaaaaatgaatcattgtcttttcaatacgagaaattgaacaaaaatcaccaactactaatagattcgacaaatgaaaagttagataaactaaatacagaaagagagagcgatattgccaaggtggaaaaattcaaaaagaggattaaggagttgaatacagaaattaaggtattgaattccaaccaaaaaatattacaagaaaaattcgatgcctcaattactgaagtaaatcatataaggggcgaacatgaaaatactgtcaacactttgcagcaaaatgagaaaattttaaatgataaaaatgtagaactggaaaatatgaaagcagaattgaaaggcaataatgataaattatccgaatatgagaccacgttaaatgacctgaattctcgcattgtgcaactgaatgataagattgaaagcacagatattgttttgaaatctaaagagaacgaattagataatttaaaattgagtttgaaggaaactttatcgatttctaaggacttcaacgactctgaccttatagcacaaattaatgagctaatatctacaaaaaacaacttgcaacaaaaaatggatgatttgaataacctgaacgacgataatttgaaggtagtacaggataaattaattaaaaatgaggagacgctaaaactaaaagaagctgaaattgattcattgaatagtgaaatggacgagctgaaaaaacagatcactacaaaagatgatgaatttaagatgtggcaaagcaaatacgaaactgtcgaagacgaagctaagatacgcaatgccgaagttacagagttgaacggagatattgaagatctaaaggaatcaaaattgcatttggaagaaacaattacggaactagaaaacaaagttcataaactagaaaatgagtgtgaactggagaaacaaaaattcgaaaaaacttcgctagaattagaaagcttacaactaaaaaatagtaacattcaggctgaacacatcaaagaattggaaaatcttcatgaaaaccttatttctcttcaaaatgaattgaagatttcatccgacaggataacaacattaacaaaagaaaatgaagtattaatggaacaaaataataataacaataatagcgttactttaagcaatgatcaaaaggatagagatgatgaaaaaattaaatcattaggaaaacaagtacaagattggaaagaaaagtatgaggccaaagaaaaagatacaaataaaaggctaaagttattagcagaagatttgtatatccagtattcatccaaacacgaacaaaaggtcaaactgttgaaaaaaggctatgaaaacaaataccaaaataagtttgatcaattaaatttagaaaataaaactctgtcagaagaaatcgagcaattgaacaagcagctgtcttcagaaagagaagaaaagcaggagttactcaagttgttagaaaatgaaaaaaaataa

SEQ ID NO: 78675 - DNA, 1245 bp, Saccharomyces pastorianus
atgtatagacgatctgttggattactatttgttgggagaaatacaagatggatttcgtccactattaggtgtggaacgagcgcaactcggccaataagatccaatgcattgaatactgattcagataacgctagcgttagggtaccagttggaaattcaactgaggttgaaaatgcaaccagtcagttaacagggacttcggtaaaaagacgcaaggggaacagaaaaagaattacagagttcaaagatgctcttaatttgggtccatcttttgcagattttgtttcaggtaaagcttcgaaaatgatcttggaccctctggagaaggcaaggcaaaatacagaggaagctaaaaaactacctcgttggcttaaggttcctattcctaagggtaccaattaccataaattgaaaggcgacgtaaaagaattaggcctaagtactgtttgtgaggaggcaagatgtcccaatattggtgaatgttggggaggcaaagataaatctaaggcaacggcaacaattatgctgcttggtgatacttgcactcgtggatgtaggttttgttctgtgaagaccaatagaacgcctagtaagccggacccaatggagcccgaaaatactgccgaagctatcaaaagatgggggttgggttatgttgttttaactaccgttgatagggacgatttagtcgatggtggtgctaatcacctggccgagacggttcgcaaaatcaagcagaaggcaccaaatactcttgtagagactctttctggtgatttcagaggtgatttgaagatggtggacattatggcacaatgtgggcttgatgtttacgcacataatttggaaacagttgaatcactaacaccacatgtcagagacagaagagctacttatagacagtctttgagtgttttagaaagggcaaaagctacggttccgtcactgattactaaaacatcaataatgctgggtctaggagaaactgatgagcaaattactcaaactttgaaggatttgcgtaatattcaatgtgatgttgttacatttggtcaatatatgaggccaaccaagagacatatgaaagtcgtagaatatgtgaaacccgaaaagtttgactactggaaagagagagctttagagatgggattcttgtattgtgcatctggacctctagtaagatcttcatataaggctggtgaagcatttattgagaacgttttgaaaaaaagaaacatgaaataa

SEQ ID NO: 78676 - DNA, 1362 bp, Saccharomyces pastorianus
atgaagatgagcctcgaagtttatctaaattaccaccaaagaagaccgactagatttacaatcatgtatccaggtagtggacgttacacctacaacaacgctggtggtaataatggctaccaacggcccatggctcctccacctaaccagcagtatggacagcaatatggtcagcaatatgaacagcagtatggacagcaatatgggcaacaaaatgatcagcaattcagtcagcaatatgctccaccaccaggccctccccctatggcttataacaggcctgtgtatcccccccctcaattccagcaggaacaggcaaaggcacaattaagcaacggctacaacaatcctaatgtaaacgcatccaatatgtacggtccaccccagaatatgtcattacctccacctcaaacacaaactattcaaggtacagaccaaccttatcagtattctcaatgtactgggcgtagaaaggctttgattatcggtataaactacataggttcaaaaaatcaactgcgtggttgtatcaatgatgctcataacatcttcaactttttgactaatgggtacggttacagttcagatgacattgtcatattaactgatgatcagaacgatttggtcagggttcccactagggctaatatgattagggccatgcaatggttggtcaaggatgcgcaacccaatgattctttgttccttcattattctggacatggtggccaaactgaagatttggatggggacgaagaagatgggatggatgatgttatatatccggtcgatttcgaaactcaagggccaattatcgacgatgaaatgcacgatataatggtgaagcccttacaacaaggtgttagactaacagcattgtttgactcttgtcattcgggtacagtgttggatcttccatatacctattctactaagggtattattaaggaacccaatatttggaaggatgttggccaagatggcctgcaagctgctatttcatatgccacaggaaacagggctgctttgattggttctttaggttctatattcaagaccgttaagggaggtatgggcaataatgtggatagagaacgcgtgagacagatcaaattctcagcagcagatgttgttatgttatcaggttcgaaggataaccaaacttctgcagatgctgtcgaagatgggcaaaatacaggtgcaatgtcccacgccttcatcaaggttatgactttacaaccacagcaatcatatatatctcttttacagaacatgaggaaagaattggctggtaagtattctcaaaaaccacaattatcatcgtcacaccctattgacgtaaatctgcaatttattatgtag

SEQ ID NO: 78677 - DNA, 1413 bp, Saccharomyces pastorianus
atgtcctcccaacaacacaagttcaagcgcccagatgtctccgttagagacaagaaattggacactcttaacgttcaattgaaaaaaatcgacactgaaatcggtttaattagaaagcaaatcgatcaacaccaggtcaacgataccacccaacaagaacgtaagaagttacaggataagaacaaggagatcatcaagatccaagctgacttgaaaacccgtagaagcaacattcacgactctattaagcaattggatgctcaaatcaagagaaaaaacaaccaaattgaggagaagttaggcaaaaaggccaagttctcgtccactgcagaagccaagcaaagaatcaatgagattgaagagtctattgcctctggtgacctttctttggttcaagaaaaactactagtcaaagaaatgcaatctttgaacaaattgattaaggacttagttaacatcgagccaatcagaaagtctgttgatgctgacaaggctaaaatcaatcaattgaaggaagaattgaacggattgaatccaaaggatgtctccaaccaattcgaagagaaccagcaaaaattgaacgatatccattcaaaaactcaaggtgtttacgacaaaagacaaactttattcaacaaacgtgctgccttgtacaagaagcgtgacgaattatacagtcaaatcagacagatcagagctgactttgacaacgaattcaaatcattcagagccaaattggacaaagaacgtttgaaacgtgaagaagaacaaagattatccaaacttttggaacagaaagatgttgatatgggtaaattgcaagaaaagttgactcatgccaagattccagccttcacttatgaaatcggtgccattgagaattctttgcttgtcctggacccaacttatgtgaaaccaaagaaaaacatcctgcctgacttgagtagcaatgctttggagaccaagcctgccagaaaagttgttgctgatgatttggttttggtcactccaaagaaggatgattttgtcaatgttgctccatctaaatctaagaaatacaagaagaagaaccaacagaagaacactgaaaatgagcaacctgcttctattttcaacaaagtcgatggcaagtttactttagaaccaacactaattgctactttggccgaattagacgtaactgtcccaatcaacagtgatgatgtcaagatcaccgttgagcaattgaagaagaagcatgaagagcttttgtcgaaacaagaagagcaaacaaaacaaaacattgaatctgtcgaaaaggaaattgagaaattaaatttggactactctaacaaagagcaacaagtaaaaaaggaattggaagaaaaaagattgaaagaacaggaagagtctgaaaaagataaagaaaattaa

SEQ ID NO: 78678 - DNA, 399 bp, Saccharomyces pastorianus
atgtataatatatataggcttattatgtgtgtttgtgctactttatatgacggttatttacaagttagaatattatctattaacaatgcagtagccacgcttacgtttagtgagtcaacaatgggttctggggcccgattgcctttctcaatgccaccaaagggaatttcgacgaagaagtcactcctcatcttcaaattcgttcttacgccctggttttcgttccccaccactagaacaacaggcagctcgttacacaatccgttcaaatcgtgcatgctaatagtttttccaacagtgtatttttctgacgtggcattagctaagtggcttgtaataaacgtccagccacccatttcttgtgatttagtaaaaaactctagcggtttatcaacgtaa

SEQ ID NO: 78679 - DNA, 1239 bp, Saccharomyces pastorianus
atgacttccctgactaatgccgtgttcaaacgatacctggcagtgacgcctagtgctcaccaagctcttaaaacgagaattaagaaaaagtcgtcatctttcgataagtttttcccacagcaaagcaatagtagaaaaaaacaatgggaaacgttgaatgaagacaaagcgtcgtggtttaaaaggaaatacgctcacgtacatgctagggaacaggaccgtgcagcggatccatatggcaagaaaaaggcccacgtcgagaagctaaaggagatcaagaatcaggcgaaattaaaccaaaagagccataaatccaagttccagaataaggacattgcgctgaaacttatgaatgataatcctatcttcgaatatgtctacggcaccaacagcgtttatgcagcgttgctgaacccgagtagaaattgccattctcggttgctgtaccatggcactattcctagtaaaattcttcagacagtcgatgaactgaaggttacgacagagctggtggacaagcacagattaaacttgttgaccaattacggggtgcacaataacattgctcttgagacaaaacctttgcaacctgtggagattgcgtacctaggcgacatggacaccagttcagcagcattaagcattcacgagctgggcttcaataacgaaaatatacctcatgaactgccttatggtacgaaaacagacgctaagaagtttcctctcgggttatatctggatgaaataactgaccctcacaatatcggtgccattattagaagcgcctacttcttgggggttgacttcattgtgatgtcgagaagaaactgctctcctttgacgcctgtggtgtccaagacaagcagtggggccctcgaacttctgcccatattttacgttgataaaccgctagagttttttactaaatcacaagaaatgggtggctggacgtttattacaagccacttagctaatgccacgtcagaaaaatacactgttggaaaaactattagcatgcacgatttgaacggattgtgtaacgagctgcctgttgttctagtggtggggaacgaaaaccagggcgtaagaacgaatttgaagatgaggagtgacttcttcgtcgaaattccctttggtggcattgagaaaggcaatcgggccccagaacccattgttgactcactaaacgtaagcgtggctactgcattgttaatagataatattctaacttgtaaataa

SEQ ID NO: 78680 - DNA, 663 bp, Saccharomyces pastorianus
atgacagagcaaaaagccctagtaaagcgtattacaaatgaaaccaagattcagattgcgatctctttaaagggtggtcccctagcgctagagcactcgatcttcccagaaaaagaggcagaagcagtagcagaacaggccacacaatcgcaagtgattaacgtccacacaggtatagggtttctggaccatatgatacattctctggccaagcattccggctggtcgctaatcgttgagtgcattggtgacttacacatagatgaccatcacaccactgaagactgcgggattgctctcggtcaagcttttaaagaggccctaggggccgtgcgtggagtaaaaaggtttggatcaggatttgcgcctttggatgaggcactttccagagcggtggtagatctttcgaacaggccgtacgcagttgtcgaacttggtttgcaaagggagaaagtaggagatctctcttgcgagatgatcccgcattttcttgaaagctttgcagaggctagcagaattaccctccacgttgattgtctgcgaggcaagaatgatcatcaccgtagtgagagtgcgttcaaggctcttgcggttgccataagagaagctacctcgcccaatggtaccaacgatgttccctccaccaaaggtgttcttatgtag

SEQ ID NO: 78681 - DNA, 354 bp, Saccharomyces pastorianus
atggtaccaacgatgttccctccaccaaaggtgttcttatgtagtgacaccgattatttaaagctgcagcatacgatatatatacatgtgtatatatgtatacctatgaatgtcagtaagtatgtatacgaacagtatgatattgaagatgaccaggtagtgcatcattctatacgtgtcattctgaacgaggcgcgctttccttttttctttttgctttttctttttttttctcttgaactcgagaaaaaaaatataaaagagatggaggaacgggaaaaagttagttgtggtgataggtggcaagtggtattccgtaagaacaacaagaaaagcatttcatattatggctga

SEQ ID NO: 78682 - DNA, 1671 bp, Saccharomyces pastorianus
atgttgaatctgtgtcatgctcttcgaggcgtacgtcagttttcctgttctgtgattgtgaaagtgaaatgtgcgtcatgttccataaaactacaggatcaggatcctagtaaaccaggatattatacgaagccaaaaagtctacccgactcaaaactaaatcctgacctccaagatctgaagtatttgctattcagtcaagacatacagctctcgaaacaggcaattcaaaatgatcctgacctcaaaaccaaaagagatttactattgagagtgatttgcaaaaggtgcagtaatgcccttcatcataacaattataacccggaagagtttcccgaaagtacattaaatgatattctgaactacgtccccagaggctcaaatgttatgcatattgtcccctttgtagaatttcccttacatttagaccccaatgttttgaaacgaaatgatttagatactacattagtgttaacgaaaagcgatcaagtttttaaagataaaaatgctgtcagcaaaaaggttcctatattcatgaagcaatttttaaagaacactttaagaattgactcaaataaaacattcgccatatctgcgctgaaaaactggaacatatccatgttttacaactactttaaaaactacacatatttgctaggcaaccctaatgttggtaaatcaactttgatcaatactctactacagaaatatcttggatataaggttaaaattgattctactgggaaaattaactccccctctgaagaagtgatgcaagaagcttttacgaacccgaagaattttttcaagattcaagctgctggtgtatcacatattcccaatttaactagatccgtacaagcctaccaagttggaggtaaaatactttttgatcttccaggctattcaacttccacctccagattacgcctagaagaaccaatcgacgagcgttggcttcaaaggctgcgaaaaaccgatttattcaatcggaagcatataaaacagaagacttatgagtctatgaagggcacatcacagggaggctgttataccgtgggagggattttctacctggtgcctccgaaaggatccataaatcagattgtgaaatacataccaggaccatcaaaaacattcaagaacattgaaaaaggtattgatgtattcaactcgtgcaattcatcatctggcacacatccgttatcacggtattgtggaattaaaagcgttatatgcgaaaaaagccagtacaaaaggtacgcaatacctccatttattggaagtatagagatcgttctgaaagatataggatatattttattaaggacaactgggaggtatgagttcaaaggactacatgagatatggatacctaggggtatccaagtaggtataagggaaccgctagaaaacttgattgagtctggctaccggcgttacattgaaacaaatggtaaagagtcaagctgtcccagagatagaccgatcatcagttccctgtatgagatggccccggatgaagctgatactttgaacgcagtgaagaagtcgtatttagaaaaaaccgagaaagatttatctgctagaagatttgtcgacgatgatccttatgatttggttcaacacctagaaaaaaaaaagaatccctattggtactaccaatggtaa

SEQ ID NO: 78683 - DNA, 2133 bp, Saccharomyces pastorianus
atgggtaaagtttctaaatcgaccaagaagtttcaatcgaagcatttgaagcatactctagaccaaagaagaaaggaaaagatccaaaagaagagaatccaaggccgtcgtggcaacaaaactgatcaggaaaaggccgatgctgctggtactagggaacaacagcagttgaaaaaatctgcaaaggaagaggtttttaaggacatgtctgtcgaaactttttttgaaaagggcatcgaaattccaaaagagaataaaaaattgaagaaaaaaactccgaaagagcaatctgatgaagattcctcctcttccgaagaggaggaagacatgggacaaagcatggcaaagttggccgaaaaggatcccgaattttataagtatttggaggaaaatgataaagatttattggacttcgcaggtaccaatccattggatggaattgatagtcaagatgaagatgaagatgctgaaagaaacagtaatattgaagaaaaatctgaacaaatggagctggaaaaggaaaaaattgagctttctttgaaattggttaggaaatggaaaaaacaacttcatgattctccaagcttaaaattactaaggaacataatcagtgctttcaaggttgctgtaaatttgaacaaggaagaaaacatcgaagactataaatatgctatcactgatgagaaagcattccacgaattgatgttcatggtcttgaaagatgtaccacaagcgattcaaaagatggccccatacaagattgtaaaaggcgcaaggaccttaccaaatggaggtaacgtctccagggtctcgtccattgtcaagtcgcatgctggctctttgttgattttattgaatgatattactaatacggaaacagcagcattagttcttcattctgtcaacgaattgatgccttatcttttatcatacagaaggatcttaaaggagcttattaaatcaattgttggagtatggtctacaacgagagaattagaaacccagattgcttcttttgcctttttgatcaataccaccaaagagttcaagaagtctatgctagaaacaaccttaaaaacaacgtactccacttttatcaaaagttgtcgtaaaacgaatatgcgttctatgccactgattaattttcaaaaaaattcggcagctgaattgttcggtatcgatgaagttctaggttaccaagttggatttgagtatattaggcaattggcaattcatttaagaaatacaatgaacgcgacaactaaaaaatccagtaaaattaattccgcagaagcttacaagattgtatacaactggcaattctgtcactccttggatttctggtctcgtgtactatcgtttgcttgtcaaccagaaaaggaaaatggcagtgaatctcctttacgacaattaatttacccattggttcaggttactttgggtgtaatcagattaatcccaacaccacaattcttcccattaagattttatttgattaaatcacttattagactttctcaaaatagtggtgtttttattccaatatatcctttactttctgaaattttaacctcaacggctttcactaaggcacccaaaaagagccctaacttggctgctttcgattttgagcacaacatcaaatgtacgcaagcttatctgaatacaaaaatataccaagagggtttgtcagaacagtttgtggacttattgggcgattattttgctctgtactgtaaaaacattgcatttcctgaacttgtaacaccggttattatctctttacgccgttacatcaagacttcaactaatgtcaaacttaacaaacgtttatcaactgttgtagaaaaattgaaccaaaacagcactttcatccaagaaaagagatcagatgttgaatttgggccaacaaacaaatctgaagtttcaagatttttgaatgatgtagcttggaataaaacacctttaggttcttatgttgcagtacaacgtgaagttaaggaagaaaaggccagattaatgagagaaagtatggaagaacaagacaaagaaagagaaacagaagaagcaaaactattaaacagtctggaaggtgatgatgacaacgaagatgttgaaatgtcagacgcttaa

SEQ ID NO: 78684 - DNA, 3450 bp, Saccharomyces pastorianus
atggttgctgcgacaaaaagacggaaaactcatatacataagcatgtgaaagacgaggcctttgatgatttactgaaaccagtatataaaggtaagaaactaactgatgagatcaatactgctcaggataagtggcaccttttaccagcattcttgaaggttaagggtttggtgaagcaacatcttgactcatttaactacttcgttgatacagatttaaaaaaaattataaaggcaaatcaattaattttgagtgatgttgatccagaattctacctgaagtacgtcgatattagagtgggtaagaagtcctcttcttcgacaaaagattatttgactccgcctcatgagtgtaggcttagagatatgacatactctgcaccaatctacgtggatatagaatacactagaggtagaaacattattatgcataaagacgtagaaattggtaggatgccgatcatgctgagatctaataaatgtatcctatatgatgctgatgaatcgaaaatggctaaattaaacgagtgtccgttggatcctggtggttactttattgttaacggtaccgaaaaagtaattcttgttcaagaacaattatccaagaatcgtattattgtggaggcagatgagaagaaaggcattgttcaggcctccgttacttcatctacccatgaaagaaaatctaagacttatgtcattaccaaaaatggcaagatctatttgaagcacaattccatcgctgaagaaattcctattgctattgttctcaaagcctgtggtattttatcagatttagaaattatgcaattggtttgcggtaatgatagtagctaccaagatattttcgcagtcaatttggaagaatcttcgaaattagatatttacacacaacagcaagctttagagtatattggtgcaaaagtaaagacaatgagaaggcaaaaactgactatcctgcaagagggtatagaggccatcgctaccacggttattgcacatttgactgtggaagcccttgactttagagaaaaggctttatatattgccatgatgacgcgcagagtggtgatggcaatgtataaccctaagatgattgatgatagagattatgttggtaataaacgtcttgaattagcaggccaattgatttctttattgttcgaagatttgttcaaaaagtttaataatgattttaaactaagcattgataaggtcttgaaaaaaccaaatagggctatggaatacgatgcattattgtcaattaacgtccattcaaacaacatcaccagcggactgaacagagctatctcaaccggtaattggtctcttaaaagatttaagatggaaagagcgggtgttacacatgttctttccagactatcttatatttccgcattgggtatgatgacaagaatttcttctcagtttgaaaaatcaagaaaagtttccggtccaagagcattacaaccttctcaatttggtatgctttgtactgcagatactccagaaggtgaggcgtgtggtctagtgaaaaatttagcattaatgactcatattactacagatgacgaagaggaaccaataaagaaattatgttatgttcttggtgtagaagacataacattgattgacagtgcatccttgcatttaaactatggtgtttatttgaatggtactttaattggttcaatcagattcccaacaaaattcgttactcagttcagacatctgagaagaacaggtaaagtgtcggagtttatctcaatttattcaaattctcaccaaatggcagttcatattgcaacagatggtggtagaatttgtaggccattaatcattgtttctgacggtcaatctcgcgtgaaagatattcatttacgcaaattattagatggtgagttagatttcgatgattttttgaaactcggattggtggaatatttagatgtcaatgaagaaaacgattcttacattgcattgtatgaaaaagatatagttccctcgatgacacatttagaaatcgagccattcacaattttaggtgctgttgctggtttaattccatatccacatcataaccaatcccctcgtaacacatatcaatgtgcgatgggtaagcaagcgattggtgcaatcgcctacaatcaattcaagagaatagatacattattatacttgatgacttatccacaacagccaatggtgaaaaccaaaacaattgaattgatcgattatgataaattacctgctggtcaaaatgctacggttgctgtcatgtcctattctggttatgatattgaagatgctttggttttgaataagtcatccatcgatagaggtttcggccgttgcgaaacacgtagaaagacaaccactgttttgaaaagatatgcgaaccatacccaagatatcatcggtggtatgagagttgatgaaaatggagatcctatctggcaacatcaatctcttggtcctgatggtctaggtgaggtgggtatgaaggtccaaagtggacaaatttatataaataagtcagttccaactaactcagcagacgccccaaacccaaacaacgtaaacgtccaaactcaatatagggaagctccggtaatatatagaggtccagaaccttcccacattgaccaagttatgatgtctgtttcggataacgatcaagctttaatcaaagttttgctaagacaaaacagaaggccagaattaggtgacaaattttcttctagacatggtcaaaaaggtgtttgtggtattattgtaaagcaagaagacatgcccttcaacgatcaaggtatagttccagacattatcatgaaccctcacggttttccatctcgtatgactgtgggtaaaatgatcgaactgatatcgggtaaagctggtgtattgaatggtacattggaatatggtacttgttttggtggttctaaacttgaagatatgtctaagattttggtagatcaaggtttcaactattccggtaaggatatgttatattcaggtataacaggtgagtgtttacaggcttacatcttttttggccccatttactatcaaaagttaaagcatatggtcttagataagatgcatgcaagagctcgtggtccaagggctgttttgacacgtcaaccaactgagggtagatctagagatggtggtctgaggttgggtgagatggagagggattgtgtaatcgcgtatggtgcttcacaattgctgttagaaaggttgatgattagttcagatgcttttgaagttgatgtctgcgataaatgtggattaatgggctatagtggttggtgtactacctgcaaaagtgctgagaatattattaagatgactattccatatgcagcaaaactgttattccaggaattattatccatgaacatagccccaagattaagattggaagatatcttccagcaataa

SEQ ID NO: 78685 - DNA, 1290 bp, Saccharomyces pastorianus
atgtcagaaccagtgataaagtctcttttggacacagacatgtacaagattacgatgcatgctgctgtcttcactaattttccagatgttacagttacttataaatataccaacaggtcgtcccaattgaccttcaataaggaagccattaattggttgaaagagcaattttcgtatttgggaaatttgaggttcacagaagaggaaattgaatacttaaaacaggaaatcccatatttgccatcggcatatattaagtatattagcagttctaattacaaactacaccctgaagagcagatttccttcacttcagaagaaatcgagggcaagcccacccactacaaattgaaaattttagtcagtggtagttggaaggatactatcctttatgagatccccttactgtccctaatatcagaagcgtattttaaatttgttgacatcgactgggactacgaaaaccaattagaacaagctgagaagaaggcggaaactttgtttgataatggtattagattcagtgaatttggtacaagacgtcgtagatctctgaaggctcaagatctaattatgcaaggaatcatgaaagctgtgaacggtaacccagacagaaacaaatcgctattattaggcacatcaaatattttatttgccaagaaatatggagtcaagccaatcggtactgtggctcacgagtgggttatgggagtcgcttctattagtgaagattatttgcatgccaataaaaatgcaatggattgttggatcaatacttttggtgcaaaaaatgctggtttagcattaacggatacttttggaactgatgactttttaaaatcattccgtccaccatattctgatgcttacgtcggtgttagacaagattctggagaccctgttgagtataccaaaaagatttcccaccattaccatgacgtgttgaaattgcctaaattctcgaagattatctgttattccgattctttgaacgtcgaaaaggcaataacttactcccatgcagctaaagagaatggaatgctagccacattcggtattggcacaaactttactaatgattttcgtaagaagtcagaaccccaggttaaaagtgagccgttaaacatcgttatcaaactattagaagtaaatggtaatcacgctatcaaaatttctgataacttaggtaaaaatatgggagatcctgccactgtgaagagagtgaaagaggaattgggatatactgaacgaagttggagtggtgataacgaagcgcacagatggacctaa

SEQ ID NO: 78686 - DNA, 213 bp, Saccharomyces pastorianus
atgattgtcccagtcagatgtttctcatgcggtaaagttgttggtgacaagtgggaaagctacttaaacttgttgcaagaagatgagttggatgaaggtactgcattgtcaagattaggtctaaaaagatactgctgtagaagaatgattctaacccacgtcgatcttattgaaaagtttttaagatacaacccattagaaaaaagagattaa

SEQ ID NO: 78687 - DNA, 2709 bp, Saccharomyces pastorianus
atgagtaattctacttcattaagggccatcccaagagtggcaaactataacacattagtaagggtgaatgcgagcccagtacggcttttaattctgagaagacagcttgctacgcatccggcgatactatatagctctccttacatcaaaagtccgttggtgcacttacacagccgcataagcaatgttcacggatcagcacatgccaatgctttgagttttgttatcaccaggagatcgatatcacattttcctaaaattatatctaaaattattaggttacccatatatgtgggtggcgggatggctgctgcagggagttatatagcttataagatggaagaagctagctcttttactaaggacaaactagatcgaatcaaggatttaggtgaatcgatgaaggaaaagtttaataaaatgttttccggtgataagtcacaagacggtggtcatggaaacgatggaacggtgccaactgctactctaatagccgctacatcactcgacgatgacgaaagtaagaggcaaggagatcctaaagatgatgacgacgaagatgatgatgacgaggatgatgaaaacgattctgtagatacaacgcaagacgaaatgttaaacttaaccaaacaaatgattgaaattagaactattttgaataaagtggactcttcttctgcacatttaactttaccatctattgtcgtgataggttcacaatcgtctggtaaatcctcagtactagaatccattgttgggagggaattcttaccaaaaggttccaacatggtcacaagaagacccattgaattgactttggtcaatacacctaactcgaataatgtaacagctgattttccaagcatgcgtctatacaatatcaaggactttaaagaggtgaaaagaatgctaatggaactgaacatggccgttccgacttcagaggctgtttcagaggagcctattcaattgacaatcaaatcgtcccgcgttccagatttatcattggtggatctacctggctatatacaagtggaagcggcagaccagccaatagaactgaaaacaaaaatccgtgacctctgcgaaaaatatttgactgcacctaatattattttagcaatttctgctgcggatgttgacctggctaatagttctgctttaaaagcttctaaagcggcagatcctaaaggcttgagaacgataggtgtcattaccaaactggatttggtggatcctgaaaaagcaagaagcatcttgaataataaaaaatatcctctcagtatgggctatgtaggagtgattactaagacaccaagtagtataaacagaaaacacctaggtcttttcggtgaagcaccttcttcgtcattaagtgggatattttcaaaaggccagcacggccaaagtagcggagaagaaaataccaatggtttaaaacaaattgtgtctcatcaatttgaaaaagcttatttcaaagaaaacaaaaagtattttaccaattgccaagtttccactaagaaattgagagaaaagttgatcaaaatcttggagatttccatgtcaaatgcgctggagccgacttcaacacttattcaacaagagttggatgatacttcttatttgtttaaagtagagtttaacgacaggcatctaactcctaaatcataccttttgaataatatagatgtactaaagttgggtattaaagagtttcaggaaaaatttcatagaaatgaactgaaatcaatcttgagagcagaattggatcagaaagttttagatgttttggctacacggtattggaaggatgataatcttcaggatctatcttcctctaagctggaaagtgataccgatatgctatattggcataaaaaattggaactcgcatcatccggcttaactaaaatgggcattggtagattatctacaatgcttactaccaatgcaattttaaaggagctagataacattctggagtctactcaactaaaaaaccatgaactgatcaaagaccttgttagcaatacagccattaacgttctaaacagtaaatactattcaacggctgatcaagttgagaactgtatcaaacccttcaagtatgaaattgatttggaagaaagagactggagtcttgctcgtcaacattccattaatttaataaaggaagaattacgtcaatgtaactcaaggtaccaggcaatcaaaaatgccgttggcagtaagaaattagcaaatgtaatggggtatttagaaaatgaatcaaatttgcaaaaagagacactcggcatgtccaaattactattggaaagaggctctgaagctattttcctggataaaaggtgcaaagtgttatcgttcagattaaaaatgttgaaaaacaaatgtcattcgacaattgagaaggatcgttgtccagaggtatttctatctgcagttagtgataaattgacctccacagctgttttattccttaacgttgaattattaagtgattttttttataacttccctattgaattagacagaaggttaacattgttgggagatgaacaagtggaaatgtttgctaaggaagatccgaagatttcaaggcatattgaattgcaaaagagaaaggagctgttagaattagccttggagaaaatagattcaatcttggttttcaagaaaagctacaagggcgtctccaaaaatttatga

SEQ ID NO: 78688 - DNA, 1272 bp, Saccharomyces pastorianus
atggcagcacatcagatggactcgataacgtattctaataatgtcacccaacagtatatacaaccacaaagtctacaggatatctctgcagtggaggatgaaattcaaaataaaatagaggccgccagacaagagagtaaacagcttcatgctcaaataaataaagcaaaacacaagatacaagatgcaagcttattccagatggccaacaaagttacttcgttgacgaaaaataagatcaacttaaagccaaatatcgtgttgaaaggccataataataaaatctcagattttcgctggagtcgagattcaaaacgtattttgagtgcaagtcaagatggcttcatgcttatatgggacagtgcttcaggtttaaaacagaacgctattccattagattctcaatgggttctttcctgcgctatttcaccatcgagtactttggtagcaagcgcaggattaaacaataactgtaccatttatagagtttcgaaagaaaacagagtagcgcaaaacgttgcgtcaattttcaaaggacatacttgctatatttctgacattgaatttacagataacgcacatatattgacagcaagtggggatatgacatgtgccttgtgggatataccgaaagcaaagagggtgagagaatattctgaccatttaggtgatgttttggcattagctattcctgaagagccaaactcagaaaattcttcgaacacattcgctagctgtggatcagatgggtatacttacatatgggatagcagatctccgtccgctgtacaaagcttttacgttaacgatagtgatattaatgcacttcgttttttcaaagacgggatgtcgattgttgcaggaagtgacaatggtgcgataaatatgtatgatttaaggtcggactgttctattgctactttttctctttttcgaggttatgaagaacgtacccctacccctacttatatggcagctaacatggagtacaataccgcgcaatcgccacaaactttaaaatcaacaagctcaagctatctagacaaccaaggcgttgtttctttagattttagtgcatctggaagattgatgtactcatgctatacagacattggttgtgttgtgtgggatgtattaaaaggagagattgttggaaaattagaaggtcatggtggcagagtcactggtgtgcgctcgagtccagatgggttagctgtatgtacaggttcatgggactcaaccatgaaaatatggtctccaggttatcaatag

SEQ ID NO: 78689 - DNA, 558 bp, Saccharomyces pastorianus
atgttcagacaatcaattaggccacttgtttcaaatagactaaccttcattcgttataacagttctccagcctacacggctgcagtcagcctattgaaaggagatttgaaaaaggctatgattgccaaggatgagatgaagaagacagcaatcagaagtatgttgtctgccataaaaaacaaagaaattgccttaaaagggaagagcgctgatgagtactccctgtacgacatgtactccaagttaatatctcaaagaaaggactcgatcaatgagttccttgctaacaagagggacgatctggtggccaaagagcaaggtgaaatggacattataaagaaatatatggaccaattgccagtgtcttcagagcttgatattgatcaaaatgtgaagaaattactggacgccctcaaaacaaaggcaggtgaaaaaaaggttcaaattaaggaaatcatgggagaaatcgactggaagtcattgccaacagaatggaagacatctccaactgccatcaaaaatagcattgttaagcaattcaaggaaattttcaaatga

SEQ ID NO: 78690 - DNA, 1455 bp, Saccharomyces pastorianus
atgggtaaaaataagaagaaaacaggtaagaaggccaagagtcatcctcatgtggaggacgttgatgaaaccgtcaataaacctgaagaaatcatcaattctgtaaacgtcacagttcctccaaaaatgtccacagatccagaggctgatggtatcgtggcaagcccggacgatgaggggaaagatctctccgaaggagtagacaaacaaaaagtaaatgacggcctgactgtagacaccataaatcctttagaggacaaaaaggctggtgatgagatgaaggaactaagggaagaaattgaacgtttaaaattggaactaagccacaagaaggatcaagaaacgcctaatgaagacttcaaaaatgaactagcaaatgttattaaggaaagagacgaattcaaaacacagtatgacacattattgagcaagatatcttctatgaaatcaatttttaataagatgaaagaagcacaaaaacaattagaggaagtgcaggagcagcttactgaatatgaatcacaaaatctgaaactgaagaagaaacttgaagctaccaagaccgaaaactctgaattacaatccacgattgtgaccctaaatacagaattagaaaacctagaaaaggagcaagaaagtacagaagaggtttttttggaatacgaatcaaggatagaagctttggaagatgaaaaacacgacataattgaaaaacatagtaaggaacttaacacttacaggaaagaaaaagatcaattaaatctccaagttcaggaactcatgataatcttagaaaataataaacaagatatatctgacttgagaacagaaagagatgaattgagacaggctttggaatcccatgaaaaggagaaagcagtattaaagaattctctaaatgatctggaattgaagatagaagaagttgacaacaaaagggaagaagaggctagagagagggaccaggaagtcaaagctttacgatcccaacttgacacggagatagaaacgcacaacaatgacacagaagctttggaaagcatgaaaaaacagctagaagccatgaaagaggacgtctctatgaaggaaaaatatgaggaagaatctaagcagcacatcttacagatcggaaaactacgtcacgaagccattatactaaatgagcatttaacaaaggcactggccatgttgaagaaatcaagcgattctgaatccgttgataaagaactgatatccaacctattgatatctttcgtgtccatacccagagcagacccaagaaagtttgaagttcttgaattactgtccaatttcttaaactgggatgaagacaagaaacaacaggccggcttgatctcgaataatgactctaagaattcaagcgctgtatcgagaacggaaagctttgtatcgctttggaccaactacctcgagaaagagagtgagaaagactaa

SEQ ID NO: 78691 - DNA, 2595 bp, Saccharomyces pastorianus
atggtcaatatttctgatttctttggtaaaaataagaaatccgtaagatcgtcaacatccagacctacgagacaggtgtgttcgtctaaaccagaagttatcgacttagatactgaatctgaccaagaatcaaccaataaaacaccaaagaagatgcctgtaagtaatgtaattgatgtaattgatgtatcagagacacctgaaggagaaaaaaagctacctcttcccgctaagaggaaggcctcttcaccaactgtaaagccagcaagttcaaaaaaaaccaaaccctcctctaaaagttcagactcagcttcgaatattacggctcaagatgtactagataaaattccatccttggatctgtcaaatgttcatgtgaaagagaatgctaaatttgatttcaaaagcgcaaattcaaatgcggatccagatgaaattgcttctgaaataggtagttttccagaaggaaagccaaattgtttattaggtctaacaattgtcttcacaggtgttctgccaaccttggagcgtggtgcatcggaagctttagcgaaaagatacggagcaagggttactaaatcaatttcaagcaaaacttctgtagtagtcttaggtgatgaagcagggccaaagaaactagaaaaaatcaagcaattgaaaatcaaagccatagacgaagaaggctttaagcaattaattgctgggatgcctgctgaaggtggtgacggggaagctgccgaaaaagcacgtcgaaaattagaagaacagcataatattgctaccaaagaagcagaattgcttgttaagaaagaagaggaaaggtcgaagaagcttgcagccactagagtttctggtggccatctggagagagacaatgtggttagggaagaagataaattgtggacagtaaagtacgcaccaacgaatctacaacaggtctgtggtaacaaaggaagtgtaatgaaattaaaaaactggttggctaattgggaaaattcaaagaaaaatggttttaaacatgctggtaaagatggctctggtgttttcagggctgcaatgttatacggtcctcctggtattgggaagacaactgctgctcatttagttgcacaagagcttgggtatgacattcttgaacaaaacgcttctgatgttcgctctaaaactttacttaatgccggtgttaaaaacgctcttgataacatgtctgtagtgggatatttcaaacacaacgaagaagctcaaaatttgaacgggaaacattttgtcattatcatggatgaagttgatggtatgagcggaggcgatagggggggagttggccagctggcacagttttgtcgtaagacgtcaactccattgattctaatttgtaatgaacgtaatttaccaaaaatgagaccattcgatagagtatgtcttgatatccaatttagaagacctgatgctaacagtatcaaatcaagattaatgacaattgcgatcagagaaaagttcaaacttgatccaaatgtcattgataggttgatacagactacaagaggtgatatccgccaggttattaatctactttcaacgatatctacgactactaaaaccataaaccatgaaaatatcaacgagatctcaaaggcatgggaaaagaatattgccctaaaaccctttgacattgcccataaaatgttggatggacaaatatactcagacataggttcaaggaactttacactgaatgataagatcgcattatattttgatgactttgatttcacacccctaatgattcaggaaaactatttatctacaagaccaagcgttttgaaacccggccagtcacatttggaagcagttgctgaggcggctaactgtatttcattaggtgatattgtcgaaaagaagattcgtagtagtgagcaattatggagtcttttgcctttgcatgctgttctttcatctgtttatccagcatcaaaagttgccggccatatggcgggaagaatcaatttcacagcttggttgggccaaaattctaaatctggcaaatattataggttactgcaagagatacattatcatacaagattaggtacatctactgataaaattggactaaggctggattacctaccaacttttagaaagagattattagatccatttttgaagcaaggtgctgatgcaattgcatctgtcatagaggtaatggacgattactatttaaccaaagaagattgggattctattatggagtttttcgtaggtcctgatgtgaccacagcaattatcaaaaagataccagctacggttaaaagtggattcacgcggaaatacaacagtatgacacatccagtcgcaatttacagaacaggtagtactattggtggtggtggtggtggcaccagtactagcacccccgatttcgaagatgtcgttgatgcagatgacaatccagttcccgcagatgatgaagaaacacaagatagtagcacagacttgaagaaggataaacttatcaagcagaaagccaaacctacgaagaggaagactgccaccagtaaacctggtggtagcaaaaaaaggaaaacgaaagcatga

SEQ ID NO: 78692 - DNA, 798 bp, Saccharomyces pastorianus
atggcaaaccaaaagcaaatgagaactcaaatactaatcacggacattcctagtggcaaatttactagtaaatggcctacacaactggaaaaaactttattcaaggagcaatttccaaatttacaaagtcacttgcagtattacacgccgttgccatttttaaacagaattataatcatatttgataatgaagatgacacgctgcaagtgtttaagttcttacaggaattgttggctaaggagaatagcggtccgatgaagttatttgtaactgagtcccttttaaataatcaacatccgcgatctcgttccacggatgatgctgtttcgttgcaagataataacttggcacttttggaggatcatcgcaacaaaccgctcttatctattaatacagatccaggagtcactggagtagacagttcatccctcaataagggaggctcttcattatctccggataaatcatctctagaatcgcccacaatgttgaagctttcgacggattcaaagccatttagttaccaagaaccgctaccaaagctttctaggtcgtcttcttcaacttcgaacctctcattgaacagaagttcacagacatcattaccttcacaactagaaaataaggataagtcagcatctggcaccaaatgccttttcgcctctaagccactaggattgaccattgatacttctactagaagtaatgctgcatcgtgtaccgaaaatgatgtaaacgctactgcctcaaatcctccaaaaagtccaagcataacggttaacgagtttttccattag

SEQ ID NO: 78693 - DNA, 924 bp, Saccharomyces pastorianus
atgtcatcagactcaaacgcaaagccattgccttttatatatcagttcatatcaggtgccgtcgccggtatttctgagttaactgttatgtatccgcttgatgttgttaagacaagatttcaactggaggtgacgacgcctactgccgctgcagtaggaaagcaagtagagagatataatggtgtcatcgattgtttgaaaaaaattgtaaagaaggaagggtttagcagactttacagaggtattagttcaccaatgttgatggaagcaccaaagagagccaccaaatttgcatgtaacgatcaatatcaaaaaatcttcaaaaacctattcaacacgaatgaaactacgcagaagatctccattgcggctggtgcatctgctggtatgacagaagctgcagttattgttccatttgaattgatcaaaatcaggatgcaagacgtcaagtccagctatcttggaccaatggactgtttgaaaaaaacaatcaaaaacgaaggtattatggggctatacaagggtatcgaatctaccatgtggagaaacgctctttggaatggtggctacttcggtgttatctaccaagtgagaaattccatgcccgtagcaaagacaaagggacaaaagaccagaaatgaccttattgcaggtgcgatcggtggtacggtcgggaccatgcttaacactccctttgacgtggtaaaatccagaatccaaagtgtggacgcagtcagcagtgctgttaaaaaatacaactggtgcctaccttcgctattggtcatataccgtgaagaaggcttcagagcattgtacaaaggtttcgtccccaaagtatgtagactagcacccggtggttcattaatgttggtggtttttaccggcatgatgaactttttcagggatctgaagtacggacactga

SEQ ID NO: 78694 - DNA, 879 bp, Saccharomyces pastorianus
atgtccgcagaaccattattacccacacataacggatcgcagggaggggaagtgaggtccccagatcagaagttcattgtgatacggttttccgacgtatcagtaagggatctgcagttgaatatatcaaatgtaccattttcgaatataaatacccactggctacgtcggatgtgtagagaattgaggccccaacaaacacaaaaaagaagactgaagtttataaggaacgggagtattctgaatacgcattccaagattgctgaggaactgacgcattacttcgatactgctaataactctaacgtcgcaacaggcaccagcgtggcaccagagcagaacaactactatattcattgtataattggtacagaggagctgacacaagcagagttagccaacgaagatctaaaggacgatgcaactccgtccaatgactccatgaccacgcaggccatcgggtttgataggctacgatccgtgggatttactgagcaagaaatcgaactgctgaggcaacagtttcgggccacgtatggagatttggaggaggaggaggagagacttgctcaaaatggcaacagagatgatgagggccatgacattagacagttggaggaacagtggatggaaagcgggagtgggaccgctcaggggaatggggccggaggcggcaatgaagacaggtttaactctgtgccgatcgctaacataaagcacaacaaagacttgcttttaggtatatgtgtcggattcttcttcggcgtctttggtatactattaatgaagtttgatggattgttcaacagacggcaaaaaatggcgatttttgccggtgtgattgttaatgttatgttttgtcttgtgagaggtttttag

SEQ ID NO: 78695 - DNA, 441 bp, Saccharomyces pastorianus
atgtctaacactctatttgatgatatattccaagtctcggaagttgatcccggtcgttataacaaagtctgccgtatcgaagccgcatctaccactcaggaccaatgcaaactaaccttggatataaatgttgaattgtttcccgtcgccgcacaagattctttgacagtgactattgcatcctctttaaacctcgaagacaccccagctaacgactcttctgcgacaagaagctggagacctccacaggctggtgacagatcccttgcagatgattatgattacgtcatgtatggtaccgcttacaagtttgaggaagtaagcaaggatctaattgccgtttactactcattcggtggcctcttaatgagattagaaggtaactatagaaatttgaataacttgaagcaagagaacgcttatcttttgattcgtcgttag

SEQ ID NO: 78696 - DNA, 3741 bp, Saccharomyces pastorianus
atgagctccaagttgaagtacactgatatagatgtgccattggactggttgtataaggggaaacgaaggaataggaccaaaagtgcggcttccacgcgcacttcagaagctaccaccacctctgtaaagaaaactgctactttgccatcaaccgcagctgttcctacgaaaactatagcttctcctcaaaggcccctgagcggccagaatgtatataacgaattatccaactctaaaccagcagtatccgccgagaaggtttcgcagcaaggacaagtgcccactaggaggactcgttctcactcagtatcgtacggcctactccagaagaagaataataacgatgacaccacagattctcctaaaatatctcgaattagaacggcacaggatcaacctgttaaggaaacaaaaaccagcacccttgcgggacccatcgtttcaaagaaggggagaagtcgttcttcttctatatcaacttctttgaatgaacgatctaagaaatctctgttcggttctttattcgggagaaggccttcgaccactccctcgcacgttgttgaaagaccgttgtcttctcagaatgaccataaaaaaagcacagaactccctcctatagataccagacagtcaaagatctccaccccaactagtactcctaccactgcatcttccaaacccagtagttctggtgggaatagacattctgatggatctcttacttcaaaacttctaagtattcctcataacatcttggaaatctcttctacgaattttaatgcccaccatcatatccagtcacatcatagtagtggtcgtgaacaagactcgccccattctgaatcaccagacctgcctcccattttagaaaaagaaactacgcaaaaacaattacagaaggtgtcaaaggtaaatttgaaaagggttactattgcagttcaagaatttaactcagatcctccacaacaactaccttcaaggaagcctaaaaggggtaatgttctcataccagaagatatgattagtgcccccccactaatctctctgggaattacaaacagcagcgatcaaagcagttttcagtccaataactctccctcatattcaaaagattctaaagaatataaactagctttggaaaatttcaagaaagcagctaaagaagccgaaaaacatcaaaaggatgcgtattatgttgcagaacgaatggctcaagaagtggcaaactataaggccaagcaattgaagacatcgccgttaactggagcaactaattcagcagcagattcagcgacggatcaagaatcctcctccctagatgctagagcttctaagcttcatatcgataagccgatcaatgcaggtgcacatcctttcgaaacacatcaggatgataacactaaatactcttctcaccttgaacaaacattggacgtagcttacactagatgctgtcatttgagagaaattttaccaataccgtccactttgagacaggtcaaaggtaaaaccgcacctttgcaaactttgaaatttttgaatccaaaaccaaccttggtggatatattatcattttgtgattttattgccataactccgatccataacatcattttcgataatgtgtctttaacccatgatatgttcaagattgtcatttgttctttggtaacctctccggtagtggagaaattggggttaagaaatgttgtgataaacgaacaaagttggaaactactttgcaagtttttattacaaaataagacattgatcaagctggatatttctcagactaaagcaaggacagatttaaatgattctaactacagagaccaaatggactgggaactattttgcgaagttcttagaaataaagaaggtagacctttggaagaattgcttttgaatggtttaaggtttgacaaaatgtcattcagtcatttcaaaaatatcctacttactttcgcacaaatgaaccctaaaaaccctattcgtctcgggatggctaacgtagaattctcaaccgagtgttttgattttctctttaattggatgtctgaatataacgttcaaggtgtggatttggcctataataatttagaaagtttggcaaaacgaatgatcaaaaaactagctaggcttccttataagcatttggaatattttacccttaacagcactaatatcacctctgttgatgatatgtcctacatactaaaatatctttcacgtttgccaagcataaaatttctagatttgagcaacttgcctcagttattcccggggattttaacatccggctataagtattttccccaatttccacaactgaaacgtattcattttgatttcgacgatctttctataaaagaaacaaccatgcttgtcagcatattagctaagtgtgaaaccctctctcatgtttcattgataggacaaagtcccatgcccgatgcaagtaaaatatccgacagtactgatgaacccgataagtcgaaagatgaaaagaaagaacaaatcgtatttatgagaaatacgctttgggcctcattgtatgcatttgttagggactctcacaatttagttagtttagacgttgactatgatcaagtaccagacgaaattcaatcaagaattgcgttatgcttaatgcataatatgaagagaattatggactctagctttaaattagatgaattgactgtacaagatgatttaatatttgatggttccttgataactgagacagcagaagaagttttgaaaagattaaatgacaaatctttacttcaaaatgatgttgggaagaaatatcttttaaagaaatattttgagaaaatggaaaaggtacatcataatgttcaacatacaattgattctatgtttgagaaaagaaaatccggcgaactgccactgcaggaaaaggaaaacctactaaggttattgcttcttgagaaaaatttatcaaatattcttgatatttttgcttctatgcccaatatagcagatgtcgtaccattttcaaaagccgataatagttttcctaatattggggatagcacggttagcgcaaactataatgatggtattcgtctatctctaaaacacttagattctgacaggttaatcaacgatgtttcaattcctgaaaacgattcattaattagaccacacttaatggccaccgactcgggacgaatcatcgatgtgaccactggtaaagctcttcttttcaagagttcgtctaatacctcactggccggcaagagacaggaagaagaggaaggtgaattacataaatggggtgtgtttgtacagcaccaaagctcaagacataactctgggcttccttcatccgccaattcttcgagaattagcgggtcattaacaccagatagcagtgtcgccggaggaaagaaaggggagtcctctcgcacatctggtacaaggccaaaaatcttaccaaagatacctaccggtgccgaattaagggatgccattattaaagctaagggtattgattctgtagatgatctgattaaaaatgttacctctgaaaaggttggattggaatcattatatggagatgaattgaactctagaagcccgagtaatgacagtttacaagaatcacaacaaaaggcgcctttgcagaggccccttgttgaagatgaaacagtgacaaaaaaatacgacaaactattgaacgatctgtctaatgttcgtcacagtaaaacctaa

SEQ ID NO: 78697 - DNA, 909 bp, Saccharomyces pastorianus
atgataaagttgcatgaagtgcctccagaaccagtagaccctgctagtctccctcatgatgttaatgcacatagccccgacggagatggtaatcctgataagaggaaaaaaatatttggcattccgtatcctttttccaggagttcatgtcggagattcctttggaactgtcaaaagatttcggtactgcccatggcattgtatttcccactacatgcagcaaatacattaatcacgccggcagtatcacctgattctgctcctgacgacgttttaatgatggtgagagagattttaccgtccataactaccaagctgttagttgcgggtattactcttcatgtttctgctggtgtcttgctccgaatcgtgaacaactggaacaagccaagaagaaatagacatcgacatttaaagatatcggccgaacaagatctatcccaagattcgattggtttaactggtggaatttctggctatttatttggattgtataagaccttccgcattcctccacaagtgattagtggatacatccttgttcccgtcctgatataccacttattaattatgaaatggctgccgaattccatctctactgaggtggatttcgcctctataaagcaattactatctagcaagaacaggtggtggaaatggcttggaggcctggtgccgttagctattctcctcgagtcaggtgtatatcatataggttcggggctctgccgttatttcggtgttagaaaaatgactagcaggaaaaaatggtccacagctatcaatctattgacactcgttgggttcgtttctctgattagattgatgaaagaggattctacgaaactgggtcccaaccaattcgaaggcattttcaaaaagatccggttgctgttgcacgtgaattag

SEQ ID NO: 78698 - DNA, 1314 bp, Saccharomyces pastorianus
atgccaaaaaaggtttggaaatcatctacgccttccacttatgaacatatctccagcttaagaccaaaatttgtgtctcgtgtggacaatgttctgcaccaaaggaagtccttgacgttcagcaacgttgttgttccagataaaaaaaataacactctaacctcaagtgttatatactctcaaggtagtgatatctacgaaattgacttcgctgtaccactacaagaagccgcttcagaaccggtgaaagactatggtgacgcctttgaaggtattgaaaacacctcgttgagcccaaaattcgtgtaccagggtgaaactgtctccaaaatggcctacttagataagactggagaaactacattattgtcgatgtctaagaacgggtcgttggcttggttcaaagagggtataaaggtccctattcacattgtacaggaattgatgggtccagcaaccagctatgccagcatccattctttaaccagacctggtgatctacctgaaaaggatttctcattagccatctctgacttcggcatttccaatgataccgaaaccattgtgaagtctcagagtaatggtgatgaagaagacagtattttgaaaatcattgacaatgccggtaagcctggtgagattctacgtactgttcatgtgcctggtaccactgtgactcacaccgtaagatttttcgacaatcatatctttgcgtcttgttcagatgacaatattctgaggttctgggacactagaacttccgacaagcctatatgggtgttgggagaaccaaagaacggaaaattgacctcgtttgattgctctcaggtttccaacaacttgtttgttaccggtttcagtacgggtattatcaagttatgggatgccagagcggctgaagctgccaccactgatttgacttatagacaaaacggtgaagatccaattcagaatgaaatcgctaatttctatcatgccggcggtgattctgttgtcgacgtccaattttctgccacttcaagctctgaattctttactgtgggcggcactggtaatatttaccactggaacactgactattccttgtcaaagtacaatcctgacgataccattgctcctcctcaagatgccactgaagaatcacaaacaaaatctctgagattcttgcacaagggtggaagcagaagatctccaaaacagattggaagaagaaacaccgccgcttggcatccagttattgaaaacttggttggtactgtcgatgacgatagtttagtcagcatctacaagccctataccgaggaaagcgaatag

SEQ ID NO: 78699 - DNA, 1527 bp, Saccharomyces pastorianus
atggcttcactgttcagacccccagaatctgcgaaatgcaacccaaactctcctagacttaaactgcccctcttacgaaataatcaggtagatgaaaataatatatacttgacgtcgaatgggagttccaccacagcttacagtagccacaccccagaaccactgacctcttccacatcgacacttttctcccaaactcgacttcatcctagcgactcttcaatgactttaaatacaatgaagaagaggcctgcaccgccatctttaccttcgctcagcataaattcacagtctaagtgcaaaacactacccgaactcgtacccatcgccgatgtgtctgatggtaaacatgatttaggattgaaacagcgtgtgatagccgaaaatgagttgtctggtaatagtgacttaaccccttcatcgatggcaagccccttttcacatacaaacacctcttctccctacctcagaaatgatctgagcaattcagtgggatctgacttttcaaatttgatatcggcatatgaacaaagttcaagtcccatcaagtcatcgtcccagcctaaatcatcttctgaatcgtacatagacttaaacagtgtacgagatgttgatcaattggatgaaaatggttggaaatatgcaaatttaaaagataggatcgagacattaggcattctaggagaaggagccggtggctctgtttccaagtgtaaattgaaaaatggatcaaaaatattcgctttaaaagtgataaacacattaaatacagatcccgagtatcagaagcaaatattcagagaattacagtttaataggagtttccaatccgaatatatcgtacgatattatggaatgtttacggatgacgaaaactcttcaatttatattgctatggagtacatgggtgggcgatcgttggatgctatttataaaaatttgttagagcgtggtggtaggatcagtgaaaaagtcctggggaagattgcagaagcggtactaagaggactatcatatttgcatgaaaaaaaagttattcatagagatattaagccccagaatattttactgaatgaaaatggtcaggtgaaactttgtgattttggggtcagtggagaagccgttaactcgctagccacaacattcacggggacgtcattctatatggctccagaaaggattcaaggtcaaccatacagtgtcacatctgatgtatggtcacttggattaacgattttggaagtggcgaacgggaaatttccatgctcttccgagaagatggcagccaatatagctccctttgaattgttaatgtggattttaacatttactcctgaattaaaggatgaacccgaatccaatatcatatggagtccgtcattcaaatcctttatcgactactgtctgaaaaaagatagtcgtgaacggccatctccaagacaaatgatcaatcatccttggataaagggtcaaatgaaaaaaaaggtcaatatggaaaaattcgtgaggaagtgctggaaagattaa

SEQ ID NO: 78700 - DNA, 201 bp, Saccharomyces pastorianus
atgtgtttatcacttttaaagcgaatatttttgatccatttttcaatttacacttggaaacagagccaccggctccttctcctagaatgcctaatgtctcgatcctatcttttaaatttgcatatttccaaccattttcatccaattgatcaacatctcgtacactgtttaagtctatgtacgattcagaagatgatttag

SEQ ID NO: 78701 - DNA, 2403 bp, Saccharomyces pastorianus
atggcttctgtacctaaacgccatacatacggtggcaacgttgtcactgatagggaccgtcattctcttcaaagaaacaatgagattttgcatcctatacataaaaatcagcgaaaacatgctaccttcggaccatacataatcggttccactttgggtgagggagaatttggtaaagttaagctgggttggaccaaggcttcctcctcgaacgaggttcctaagcaagtggcaatcaaattaattagaagagatacaatcaagaaagatgccgataaagaaattaaaatataccgcgaaattaacgcactgaagcatttaactcatcctaacattatctatttggaagaggtcctgcagaattcgaaatacattggaatagtgctagagtttgtatctgggggagaattctataagtatattcaacgtaagaggagattaaaggaatcttctgcatgcagattgtttgcccaattaattagtggggtcaattatatgcactacaaaggacttgttcatagggacttaaaactggaaaatttattattagataagcacgaaaatttagtcatcacggattttggttttgtgaatgaattttttgaagataacgaattaatgaaaacttcttgtggttcgccctgttatgcagcaccagaactagttgttagtaccaaggcatatgaagcaagaaaggcagatgtttggtcgtgtggtgttattctttatgcaatgctcgctggatatttgccgtgggatgacgatcatgaaaatccaacgggtgacgatattgctagactgtacaaatacatcacgcaaacacctcttaaatttcccgaatatataacccctattccaagagatttgctgaggcgaatactggtacccaatccaagaagaagaataaacttaaaaacaataaaaaggcatgtgtggttgaagcctcatgaagcgtttttgagcattcagccgaactattgggatgaacacttacagaaggaacgtccgaaaccgccaaacaaaggtgacgttggtcgccactcaacttattcttcatcagcatcttcgtactcaaaaagtagggatagaaactctttaattatagagtcgactctagagcaacatcgaatgtctccacagcttgcgaccagcagaccagcatcaccaacattctctactggttccaaagtggtgttaaacgatacgaaaaatgacatgaaagaatctaatataaatggcgagcgtactagtgcatcatgcaggtacacacgtgattcgaagggcaacggccagacccaaatagaacaagtatcagctagacactcatccagaggcaataagcacacatcggtcgcgggactcgtaacaatccctggctcccccacaactgcaagaacaaggaatgcaccatcatcaaagcttactgagcatgtaaaagattctagtcagacaagctttactcaggaggaattccaccgtattggtaattatcacgtgcctcgcagtagacctaggccaacttcatattatcctggactcagtcgtaacaccgcggataatagtttagcggatattccagtaaataagttgggttcgaatggtaggttgacagatgccaaagacccggtaccgttgaacgcaatacacgataccaccaaagctacaatctccaacaattccattatgctattatcagaaggtccggctgcaaagacttccccagtagattaccattatgctattggcgacttaaaccatggtgacaaacccataactgaggttatcgacaaaattaataaggaccttactcataaagcagctgaaaatggttttcctcgagagagcatcgacccagagagtacctcaacgatattagttacgaaagaacccactaactccaccgatgaagatcatgtagaatctcagctggagaatgttggccactcttctaataaatcagacgcttcttctgataaagatagtaaaaagatctacgaaaaaaaaaggttcagcttcatgtcgttgtactcatccttaaatggttcaagatccactgttgaatctcgtacctcaaaagggaatgcacctcctgtttcatctagaaatccatcaggacaatcgaatagaagtaacattaaaataactcagcagcaaccacgtaacctttccgacagagttccaaatcccgataagaaaattaatgataatagaataagagacaacgcacctagctatgctgaaagcgagaatccgggaaggtctgtacgggcttctgttatggtgtcaacactacgagaagaaaatcgatcggaattgtcgaatgaagggaataatgtcgaggcacagacttcaacagcaagaaaggttctgaattttttcaaaagaaggagcatgagggtttga

SEQ ID NO: 78702 - DNA, 636 bp, Saccharomyces pastorianus
atggctggaggaaagattcctattgtaggaattgtggcatgtttacagccggagatggggataggatttcgtggaggtctaccatggaggttgcccagtgaaatgaagtatttcagacaggtcacttcattgacgaaagatccaaacaaaaaaaatgctttgataatgggaaggaagacatgggaatccataccgcccaagtttcgcccactgcccaatagaatgaatgtcattatatcgagaagcttcaaggacgattttgtccacgataaagagagatcaatagtccaaagtaattcattggcaaacgcaataatgaacctagaaagcaattttaaggagcatctggaaagaatctacgtgattgggggtggcgaagtttatagtcaaatcttctccattacagatcattggctcatcacgaaaataaatccattagataaaaacgcaactcctgcaatggacactttccttgatgcgaagaaattggaagaagtatttagcgagcaagatccggcccagctgaaagaatttcttccccctaaagtagagttgcccgaaacagactgtgatcaacgctactcgctggaagaaaaaggttattgcttcgaattcactctatacaatcgtaaatga

SEQ ID NO: 78703 - DNA, 921 bp, Saccharomyces pastorianus
atgtactcaatggacgaaaaagtcgaacttattttagtgccatgccactcaatatggaagtcctcatcgcatcctagtgataattcagttaatttgggtcaattacctgaatactggcatttagctccgtttcagtatgagggtaatgatcatttagcattcatcaaacatggcctaactgctattaaactactcctacaaagattcgacaccgctaccgttatcttcagtggatcccaaacgaaaaaagaggcaggcgctatatctgaggcacaaagctactattctttatttgaaaagttgattagatatgtgatgagcaatgataacatcgatgttccaaactttgataacgagctgcgtcttttattaaaagaggtcaaaaacttgctatcaagtcaaaatgtaaatgttgatgaattgttctatggtggttcaatcactactgaagagttctcgctggactcatttgataatttaatttattctatatatagatttgaggaagtgaataaaaaattcccacagaaaataactataatagggtttgcgtttaagatgccaagattcatcagctgtcatgccaaggccattgattacccacaatcaaacataacctacataggaattgaccctaaaccagcaaactacaaccaaacacaactttcaaaatactatgatgatctagtacaaatggaagataaaaatgcactaagcttattttcttcagattggtacgctacaaaggatagattactcaccaagaaaagatctcgcaacccatttaacagaactgcaccgtacgctcagaatattttctgcaaagaaaacggcaagaggatcgagggaatcgaggatgacgaggaatattttgaaacaaaaattaagtgtaaaatgccatggtcgtcgccaagacaataa

SEQ ID NO: 78704 - DNA, 1647 bp, Saccharomyces pastorianus
atgcataaaggaaaaaaaaattaccctaatttgattacttcgtttcggatgaatttgaaaaaaatcatattgaaccatgaccgatttagccatccagaaagatggaaaacaaacgcactcttaaggttcaccttcgtgtatataaaatttctcttcgacttgatgataatcaaaaatccattaaggatggttggaaaaacttatcgagacgctgttactgcgctaaactctttgcagtccaattatgccaacatcatggctatccgtcaaactggtgatcgtaaaaacactatgacattattggaaatgcatgaatggtctcgaagaattggttactctgcatcggatttcaataaattaaatattgttcatatcactggaacaaaaggtaaaggttctactgccgcatttacttcatcaattctaggacaatataaagaacaattaccacgtatcgggctatatacgtctccacatcttaagtcagtgagagaaagaataagaataaatggggagccaatttctgaagaaaaatttgcgaagtacttctttgaggtttgggaccgtctagatagtacaacctcttctttggataaattcccgcatatgatcccgggaagtaagcctggctatttcaagttcctcacattgctttcatttcacacttttatacaagaggactgcaaaagctgtgtctacgaagtcggcgtcggaggtgaattggatagcactaatataattgaaaagccaattgtctgcggtgttacactattaggaatagaccatactttcatgcttggtgatactattgaagaaattgcttggaataagggaggaattttcaaatctggagcaccagcattcaccgttgagaaacaacctcctcagggattaacaatattgaaagaaagagctgaggagcgcaaaacaacgctaacagaagtacccccatttaaacagttggaaaatgtcaagcttggaattgctggcgagtttcaaaaaagtaacgcctcccttgccgttatgctggcttctgagatcttgcatacgtccaatatattggaggagaagatcaaatgcagttcgaatgcatcgattccagaaaaattcataatcggtctacaaaatactaagtgggaaggcagatgtcaagtactagaaaagggaaaaaacgtttggtacattgatggtgctcacaccaaagatagtatggtagctgcatcaacatggttcagagatacggttcgattgtcgaagagaaagaagatcttgctcttcaatcaacaaagcagagatgccaacgctcttgtgaataacctgtactcatctgtttcgccagaaataacgttcgatgatgtgatatttactactaatgtcacttggaaatcaggctcatacagcgctgacctcgtttccatgaacacttctcaagaagatgtagaaaaattgaaagtccaggagtcattagtcaagaattggaacaaaatagacgataatcgtgctaaaacgcatgtaacggctagtatagaggaagcaaatgaattgattgaaacgctatacgatgaacctgctgatatatttgtaactggttcattacatcttgttggcggattattggtcgtttttgatagaatagatgtaaagtaa

SEQ ID NO: 78705 - DNA, 1116 bp, Saccharomyces pastorianus
  modified_base (1037)..(1059): a, c, g, t, unknown, or other
atgtacaagaactattattcaaacacagaagtttataaaaagcataaagactctggaagtttgaggaagaaagctttgagatcgagaagatcatcttttttttcatttttcaatgactcgtctagttcgaatggaaacgaattcataggttttagacgatttgcaaaagcatatctgtttggtcacgagataggttcatgtggtacagattcatatacaccagttggggcaaatgtaaacaaaagacgtttaaaaaaagaaggtaaaaacgatcaacagctttggaaaaggcagcaccattcacagggttgtttttttcccatagataatgacagtaataagcaaacagaagcagccgtcaacaaattttatgagaatggagaatacgttaatcaggatttaattttcaagggaaaagtatatccagaagaatcagaggttgttgatgagaaaacggcaggttctcagaatcccgctcttctcaaaacaagatcaatttcattaaacgatataccgcgcggcacaggcatctctagtgtattgtctcaagtacgcggaggttccttagaaagaattattgtctataggtacgatactccggaacgttctttgcataaagttgatcttttcttcttaaattacgagggagctcaatcttttatgagatacgcaaaaacaaatatttttaaagttaatggagttcaattaaaaccagaatggatattcctcgagagcacatatgaaaacataatgaaagagcaatctgtcaacagaataatagaagaggaaaagttcatatcaagatgtttgatagtgaaaaaaagctcgacaacagcaatgcctaacaaatcaaatctgaataaagggcaaactttagaaaacattgatattcaagaattagaaaaagattttcagaattttggagaggttctagaaattacgcctattgtatcaagaaaattatgcgtatctatattcttttacgatatttccagtgctatgagagctatggaagaatacgaacaaaagggctcatnnnnnnnnnnnnnnnnnnnnnnnacatggacaatatggtacgggaaagatattacagaccagccttgcattgacttgtag

SEQ ID NO: 78706 - DNA, 1338 bp, Saccharomyces pastorianus
atgtcccatgacgaaaaacaagaacctggtattgccaaaaagataaactcagtagatgatattattatcaaatgtcaatgctgggtccaaaaaaatgatgaagaacgattagctgaaattttatccataaacacaagaaaagcaccaccaaaattctatgttcactatgttaattacaacaagcgtttagatgagtggattaccactgacagaataaacctggataaagaagtactatatccgaaactaaaggctactgatgaagataataagaaacaaaaaaagaagaaggcaacaaatactagtgaaacgccacaagactctctgcaagatggtgtagatggtttctcaagagaaaatacggatgttatggacttagataatctaaatgtacagggaataaaagatgagaacataccacacgaggatgagataaaaaagcttagaacctccggctctatgacacaaaatccacatgaggtggctcgagttagaaatctcaatcggatcattatggggaaatatgaaatagaaccatggtacttttctccatatcctattgaattaactgatgaagattttatatatatcgacgatttcacgttgcagtattttggatctaagaaacaatacgaacgctacaggaagaaatgtacattaagacatccgccaggaaatgaaatctacagagacgattatgtttcattctttgaaatcgatggtagaaagcaaaggacttggtgtcgaaacttgtgtttactttccaaacttttcctagatcacaaaacattatactatgacgttgatccgtttttgttttattgcatgacgagacgagatgagttgggtcaccatctggtgggatatttttccaaggaaaaagaatccgcggatggttacaatgttgcatgtatcttaacactaccacaataccaaaggatgggatatggtaagttattgattgaattttcgtatgaattgtcgaaaaaggaaaacaaagttggttctcccgagaaacctttgtctgatttgggtctcttatcctatagagcctattggtcggacactctcataacgctattagtggaacaccagaaggaaattactatagacgaaataagctccatgacttcgatgaccactacagatatattacacacagcaaagacactgaatatcctgcgatattacaagggtcagcatattattttcctgaatgaagatattttagataggtacaatcgacttaaagccaaaaagagaaggacaatagaccctaatagactcatatggaaaccaccggtatttactgcctctcagttacgctttgcctggtaa

SEQ ID NO: 78707 - DNA, 993 bp, Saccharomyces pastorianus
atgttagacccacgaatattgccatactacgacccggctgtggagaggaagattgctgtagtaacaggcggaaatacgggtattgggtggtatactgtcttgcatttgtatttgcatgggtttgtcgtttatatttgtgggagaaactctcacaagatttcgaaagcaatccaggagatactggcagaagcaaagaagaggtgccatgaagatgacgacggttcaagcccaggcgcgggcccaggtccaagcattcagcgtctagggtcactgcactatatccatttggatttgacagatttaaaatgtgtggagagagcgtcacttaaaattctcaagctggaagaccacatagacgtgcttgttaacaatgcagggattatggcggtgcccttagaaatgacgaaggacagatttgaagtgcaattgcagactaactacatttcgcacttcctcttcacgatgagattattgcctttactgcgccattgtcgtggcaggatcatttccctgtcctcgataggccatcatctagagttcatgtactggaaactgagcaagacgtgggattacaaacctaatatgcttttcacatggtttaggtacgcgatgagtaaaaccgcgctaatccaatgcacgaagatgttggccatcaaataccctgacgttctttgtctctccgttcatccgggtctggtgatgaacacaaacttattcagttattggacaaggttacccatcgtcggtattttcttttggctgttgttccaggtcgtagggttctttttcggcgtatcgaacgaacaaggttcactagcttctttgaagtgtgcattggacccgaatttatctgtggaaaaagataacgggaagtacttcaccacggggggtaaagaatctaaatcgagctacgtttctaacgatgtcgacgaagcggcatcgacttggatctggaccgttcatcaactaagagaccgtggtttcgatatataa

SEQ ID NO: 78708 - DNA, 633 bp, Saccharomyces pastorianus
atgcttcaatccgttgtctttttcgctcttttaaccttcgcaagttctgtgtcagcgatttattcaaacaatactgtttctacaactaccactttagcgcccagctactccttggtgccccaagagactaccatatcgtacgccgacgacaccactaccttttttgtcacctcaacggtctactccacgagctggttcacctcaacttcagccaccattaccaatgcggcctcctcctccttgtccacctcttcggcctctggatctgtaaccccagaatccacccatgaaattacctccacctcgactatcacgtccactttgctgctaacccttcatgactccactactttgtctccatcatctactgcagcaagtgtcagtgacgaagattcaaacaacaaagatgcaaaggtcaagtcctttgaacaggcttcaacttccaatggttgcgtcccaatcacaaagtttgtcactgtcaccaatgagcccgttacccagtacgttacagtcaccccaaatacgactactcaatacgttactgtcaccggtgcaccttctgttaccactacctctccaggtaaagtacaatggtacaacaccacttcgattactaattcgaccagttggtga

SEQ ID NO: 78709 - DNA, 303 bp, Saccharomyces pastorianus
atgactccactactttgtctccatcatctactgcagcaagtgtcagtgacgaagattcaaacaacaaagatgcaaaggtcaagtcctttgaacaggcttcaacttccaatggttgcgtcccaatcacaaagtttgtcactgtcaccaatgagcccgttacccagtacgttacagtcaccccaaatacgactactcaatacgttactgtcaccggtgcaccttctgttaccactacctctccaggtaaagtacaatggtacaacaccacttcgattactaattcgaccagttggtgaattatga

SEQ ID NO: 78710 - DNA, 1338 bp, Saccharomyces pastorianus
atggcaagtctacctggtattgatgagcatactacctctgaagaattgataactggtgataacgaatggcacaagttggttattcccaagggcagtgattggcaaattgatcttaaagcagagggaaaactgatagtcaaggtaaactcgggcatagttgagatatttggcaccgagttggcagtagatgatgagtacacttttcagaactggaagtttcccatatacgctgtcgaagaaacagaattattatggaaatgtcctgatttaactacgaatacaataactgtcaagcctaaccatactatgaaatatatttataatctacacttcatgttggagaagatacgaatgtctaactttgaaggccctcgagtggtgattgttggtggttcgcaaaccgggaagacttccctatcgaggacactatgttcttacgctttgaaattcaacgcttaccaaccactatacatcaatcttgaccctcaacagcccatttttactgttcctggatgcatatctgccaccccaatatcagatatacttgatgcacaactacccacttggggtcagagtctcactagtggtgccacactactacataataagcagccaatggtgaaaaattttggcctggaaaggattaatgagaacaaagatctataccttgagtgtataagccagttaggtcaagtagtaggtcaaaggttacatttggatcctcaagtcaggagatcagggtgcattgtcgatacgccatcaatatcacaactggatgaaaatttggctgaactgcaccatatcattgagaaactcaatgttaacattatgctagtactatgttctgaaacggatcctctttgggaaaaagtaaaaaagacatttggtccagaattgggaaataataatatttttttcattcctaaattggatggtgtatccgcagttgatgatgtatacaaaagatccttgcagaggacatccataagagagtacttttacggctctcttgatacagccttaagtccttatgctattggtgttgattatgaggatttaactatttggaaacctagcaatgttttcgataacgaggtcggtagggtggaactgttccccgtcactataactccaagtaacctacagcacgctattatagccataacgttcgcagaaagaagggcagatcaggcaacagtaataaaatcgtctattttaggatttgctttgattacagaagttaatgaaaaaaggcgtaaattaagggttttactacctgtcccaggccgacttcccagcaaggcgatgattctaacttcatatagatatttagagtaa

SEQ ID NO: 78711 - DNA, 915 bp, Saccharomyces pastorianus
atgccattatttgatcttatttctccaaaagcgtttgttaagttagtggccagtgagaaggttcatagaatcgttccagttgatgcaacatggtacctacccagttggaagcttgataataaagtggatttcttgaccaaaccacgtataccaaactccattttctttgatattgatgcaatcagtgacaaaaaatcgccctatccacatatgttccctacaaagaaggtttttgacgacgctatgagtaatttaggagttcaaaaagatgatatattagtggtttacgatcgtgttggtaactttagctcccctagatgtgcttggacattaggagtgatgggacatcctaaggtgtacttactaaataatttcaaccagtacagagagtttaagtaccctctagattcctctaaggtggcagcgttttcaccctatccaaagagtcattatgagtcctcagaaagtttccaagacaaggagattgtagactatgaggaaatgttccaattggtaaagagtggggaactggctaagaaattcaatgctttcgatgcaaggtcgctcggtagattcgaaggtacagaaccagagcctcgttccgacattccatcggggcatattccaggtacccaaccattaccatatggaagtttacttgatccggagaccaaaacgtacccagaagctggggaggcgatacacgctactttggaaaaggcattgaaagattttcattgcactttggacccaagtaaaccaactatttgctcttgtggaactggcgtttcaggagtcattatcaagacagcattggagctagcaggagttcccaatgttagattatatgatggatcctggaccgagtgggtcttgaaatccgggcccgagtggattgctgaaaacagagattaa

SEQ ID NO: 78712 - DNA, 531 bp, Saccharomyces pastorianus
atgggccgtgatatatgcacattagacaatgtttacgctaacaatttgggcatgctaaccaaactagctcatgtgacagtaccaaacttatatcaagatgccttcttcagtgcattattcgctgaggatagcttagctgcaaaaaataaaaagccatcttcgaagaaggatgtacatttcacacagatggcttattacagtgaaataccagtgggtggtttggttgctaaattagttcctaaaaaacaaaacgaactatctctcaagggcattcaaatcgaatttttgggcgtgttgcctaattataggcacaaatcaatcggttcaaaattactgaagtttgcagaagacaaatgctcagaatgtcatcaacataacgtgtttgtctatttaccagcagtggatgatcttacaaagcaatggtttatagctcatggcttcgaacaagtgggcgaaactgtcaacaatttcattaaaggtgtaaatggcgacgaacaagatgctatcctattgaaaaaacacatttcttaa

SEQ ID NO: 78713 - DNA, 1992 bp, Saccharomyces pastorianus
atgcctacaaattacgagtatgatgaggctagtgagacgtggccgtccttcattttaacggggatcttgatggtcgtcgggcctatgacactgcttcaaatataccaaattttttttggggccaatgctgaagatgggaattcagggaagagtaaggagtttaatgaggaagttttcaagaacttgaatgaagaatacaccagtgatgaaatcaaacaatttagaaggaagtttgataaaaatagtaataagaagtccaaaatatggagcaggagaaagattataattattgtgggttggatcttagttgcaattcttctgcaaaggattaatagtaatgacgcgattaaagacgctgctacaaaattatttgatccttatgaaatccttggtatctctactagcgcttccgatagagacatcaaatctgcttatagaaaattatctgttaaatttcatccagataaattagcaaagggcctaacacctgatgagaaaagtgtgatggaagaaacttatgttcagattacgaaggcttacgaatcccttactgacgaattggttaggcaaaactatttgaaatacggtcatccagatggcccacaatctacttcacatggtatcgctctaccaagatttttggtagatggaagtgcatctccattattagtggtttgttatgttgcgttactaggtttaatcttaccatattttgttagtagatggtgggcaagaacacaatcgtataccaagaagggaatacataatgtgacggcttctaattttgttagcaacttagtcaattacaagccatctgaaattgtcaccacagatttgatcttacactggttatcatttgctcatgaatttaaacagttcttcccggatttgcaaccaacggattttgaaaaacttttgcaagatcatattaaccgcagagatagtggtaaacttaacaatgcgaaatttagaatagtggcaaaatgtcactctttgttgcacggcttattggatattgcttgtggattcagaaatttagatattgcattgggtgcaatcaatactttcaagtgtattgttcaggctgtaccattaacaccaaactgtcaaatccttcaattgccgaacgtagataaagagcactttattaccaaaaccggagatattcatacattaggtaaattgtttactttagaagatgccaagattggtgaggttcttggaataaaggatcaagcaaagttaaacgaaactttgagagttgcatcgcacattccaaatctaaagatcatcaaggcagacttccttgtcccaggtgagaaccaagtaacaccatcatctaccccatacatttctttgaaagtacttgttcgttctgctaaacagccattgataccaactagcttaattcctgaagaaaatttaacagaacctcaagattttgaatctcaaagagatccatttgctatgatgagtaaacagccactcgtcccatattcctttgcaccatttttccctacaaagagacgtgggagttggtgctgtctggtaagttctcaaaaagatggtaaaatacttcaaacgccaattatcattgaaaagctatcttacaagaacttgaacgatgacaaagatttctttgataagaggataaaaatggatttaaccaaacacgaaaaattcgatataaatgattgggaaatcgggaccataaaaattccattaggtcagcctgcacctgaaactgttggtgatttcttttttagagtaatcgttaaatccacagattatttcactacagatttggatattaccatgaatatgaaagttcgtgattcgcctgcagtggaacaagtagaggtgtattctgaggaggacgatgaatactctactgatgacgacgaaaccgaaagtgatgacgaaagtgatgctagcgattatactgatatcgatacggatacagaagctgaagatgatgaatcaccagaatag

SEQ ID NO: 78714 - DNA, 837 bp, Saccharomyces pastorianus
atgagagcaccaccgtcaccgagaaagtccaaatctggtcattttttttacctgtattttcgactgcgtcaactgttcagtggccggaaattaaagaggaggtggcatgtccacaaacttcacattcaccaatataatactcgctggaacttgagccccctctccgaaatacacattgaggatatgataaatgaaccgtctggactatgtccaggaagttccaaaaagaaaccactactgattgcaaggtttcccaagggttgccaagaatcaccaagggtatatgtactgcaaaggaacaatttgtctcgtttaaaattaagcaaaagaaaatatgccctaaggttctatcacaatgaactttttggcaataatttaaagagaaaagacggaagcatccacaaagttgaacaccaacagtgcgcagaaaccgttagaaagatcaagaaagtcacagcaaaccatgctgatgttaaaataatatttcacgataaaaatactataagaagtgacaaattagggggtagcagtaataagatgcagactaggcctagtgttcttgaagaggaagtagaagaggaagtctcttcggtatatatcagattttgtgacgaccattccctgagagttaaagattatcactctttgcacaggcattctaaaaaatcttctaaaaaaaaacaaaataatcaggagattggaaaatctaagttgcttgggaagctttttgaagaggaaacatcgcgtcaaaacaaaggtgtagagaagaaactagatacgattgtgatacagaaatttcaaaattatcctattgtctccttctctcgtgtcatttaa

SEQ ID NO: 78715 - DNA, 2421 bp, Saccharomyces pastorianus
atgaggagcagttatcaaccagtgtcaactacaaactttgaacatgaaaatgctatacctactgcgtcgtcgtcccataatctgttgatgagccagcgttttgatgattctcctcctagttctaacgacaacagtatagaaactaatataacgcctccacctgaaccaccttcttatgaatttgatatagaggaccctcacgatgatcttcacaaaagaacacatctacagagggtttcaattgggtttcaggaaaaaattttggaacccttaatggaaaacatcattcatccactcttacaaatatcaaaattcgttcaagacaaagctgactattacttaagtaaaatcggaaatccctttatacttcgaaggttcttttacatcattttcatgtcatttattgcatattatgtcttgtcaagtggctacttattcaacgaaaaggcatcaggatctaaagggatgttttctcaacacgatatactttttgaatatgccaaaaaatccgtggatttggcaaagtttgagagagatttggaatatattagtagcatgcctcatggatccggaacgaagggtgatgcagctatttctcgatacattcaggaatcttttgacaacaatgggttgaaattggttaaagaaatgggatactcagtttattctaattatccaggcaatgtatcaatttcatattatgataacaagaatgaaaagcacgatctagaactttctaaagaaaatttcaatccgttgagttctaacggaaaattatccaaagtgagtttgatttatggaggcaaaggtacaacatacgatttacaacatttaaaagattcgaaaacgatagaagatgggaaggactatgcgcttttactgcaatatgataaattagtgagtcagcaagtactaattgctgagaaattcggagctaaagctgtaatcttcatatctgaaccatatggtgagaatatagacgttgttcaatctaagcctgtaggattgccccaatattcgactggtgatgcatcaggattgaattgggatggttctcctgtagaagaaaaggatcataaattttggcgtcaaactcatattccaactatcccaatctccacgagacaaggaaaagagctactatcgcgtttatcttcaggaggagtaacggttgatgatggtaatagtgatcgtagtaaaatgggagacgtattaatcgatgtagatctgcaaactaatgttagggaaaagcattttattcctaatattgttggtaaaattgaagggagagaacaatcggacaaagctataataattgctgcatcgagaaactccatcaattttggaactacttatcccaattttggtacagctgcattattatctatagttcaattatttcaagaggtgaaatataagtttggttggaaacctttgagaaatatctatttcatctcattcggtggtaccgaatttaattatgctggatcttcggagctggttgagcaaaggataacgccattaaaagacgaaatttattctttgattgatattagtcaactgggtataccctttgccgaaaaatatgagaacggtaaaactaaaggagaattaagcgttgagacacatcccttattgaagaagtttttcaatagaaacgcgcatggaaactttgatatatctgtggataatgttcagcactatggtgactggactccatttctggcaaatggaattcctgtatctgtaatatcttctgattctacgagaaaccgtgacaccccaactgaaacatcggaggataaatttgaacgtgttgagaagattctggaagacgaacagaaccaacaatctgtcaaggatttgctagtatatcttttacatattagtatggaattgattgatgacccgctacttcattttgacataataagctatgttgaagatatcgatgaaagattgcaaaggttagagcaagcataccctgaaaaactaaatttcacatcaataatcaaaggtttgttattttggaagaaaatcggtagcgaatgggcgtcatggactcaaggttgggagaacatagtatggtcccatggggatggtatagagccctccttactttcaattaataggtggacatggaataaaaaattgactaatattggtagaagaacatgctctccggcgggtctacctaatagatcattttataagaacgttttgttcggaccaacattgatacaggaggacaaatctaaaaatggtggaaatgtagatttctggacatttccaggagtgatggatgcgatttacgatgatgactggaagagggctcaagaacaaattgaccttattggcaaagtactccatcagtctgctgcattgtttgtcgaggagactaatgacatcgggtataaataa

SEQ ID NO: 78716 - DNA, 486 bp, Saccharomyces pastorianus
atgagtaagaacaggtcatcgctacagtctggtccacttaatagcgagttattggaggagcaaaagcaagaaatatatgaggcgttttcattgttcgatatgaacaatgatgggttcctcgattaccacgagttgaaagtagcaatgaaggccctgggatttgagctacccaagagagaaatacttgacttaatagatgaatatgatagtgaggggcggcatttgatgaagtatgatgatttttatattgtaatgggggaaaaaatattgaagagagatccgttagatgaaataaaaagggcattccaattatttgatgacgaccatactgggaaaataagtattaaaaacttgaggcgtgtagctaaagaattaggagaaactttgacggatgaagagctgagagcgatgattgaagagtttgatttggatggtgatggcgagattaatgaaaacgaatttatagctatttgcaccgatagttaa

SEQ ID NO: 78717 - DNA, 654 bp, Saccharomyces pastorianus
atgtcatggaggtatgcgttaaaaaactacgttaccagcccagaaacggtaaacgatgatacagtcatatactttgatgataaagtgtccataattagagactcgtttcctaaatcagagtgccatttattgattctaccacgaactatgcagctgagtagaagtcatcctactaaagtgattgatgctaagtttaagaatgagtttgaatcatacgttaattctgcgattgaccacatctttaggcattttcaagaaaagttccgaataaagaagagtgatgatgacaaagacccctgctgggatgacatattaaaagacaaaaacaagtttgtaagaaattttgtacaagttgggatacacagcgtgccttcgatggccaacttacatatacacgtcatatccaaagatttccattcggtaagattgaagaacaaaaaacattataattcatttaatactggattcttcattagttgggacgatttaccattgaacggaaaaaaattgggcactgacaaggaaattgaaactacgtacctgaaagaacacgatttactttgctgctattgtcagcgaaattttagtaataaatttagcttattgaaaaagcatttagaactagagttcaatagccatttcgagcttaaataa

SEQ ID NO: 78718 - DNA, 1314 bp, Saccharomyces pastorianus
atgagtgaagaacaggaccctttattagcaggattgggggaaacgtccggcgacaatcacacccaacagtcacacgaacaacaaccagaacaaccacaggaaacggaagaacatcatgaagaggagccttctagagtggatcctgaacaggaggcccataacaaggccttgaatcaattcaagagaaagctgctagaacacagaaggtatgatgatcaattgaagcagcgccgtcaaaatatacgagatctagagaagttatatgacaagactgaaaacgacataaaagctttgcaaagtattggacaattgattggcgaagtcatgaaggaattatctgaagagaaatatatagtgaaggcctcttcgggcccacgttatattgtcggagttaggaattcggtagatcgctctaaattaaagaaaggggtgagagtcaccttagatatcaccactttgactataatgagaattttgcccagagagacagatccactggtgtataatatgaccagttttgaacaaggtgaaatcacttttgatggtattggtggtttgactgagcaaatcagagaattaagggaggttatagaattaccattgaagaacccagaaattttccagagggtcggtatcaaacctccaaagggtgtgctactatatggcccccctggtactggtaaaactttactagcgaaggcagttgctgctacgattggagccaacttcattttctctccagcgtctggtattgtggataaatacattggtgagtctgctcgtattattagagaaatgtttgcatatgcaaaggaacacgaaccttgcatcatttttatggatgaagtggatgctattggtggtagaagattcagtgaaggtacttcagcagaccgtgaaattcaacgtacgttgatggagttgttgacccagatggatggttttgataatcttggacagactaaaatcatcatggctacgaatagaccagatactttagatcctgctttgttgaggcccggtagactagacagaaaagttgaaattccattgccaaatgaggccggcagattagaaattttcaaaattcatactgcaaaagtcaaaaaaacaggggaatttgacttcgaggctgctgtaaaaatgagtgatggtttcaatggtgctgatattcgtaactgtgcaactgaagcaggttttttcgccataagagatgaccgtgatcacatcaaccctgatgatttaatgaaagccgtaagaaaagtagctgaagttaagaaattggaaggcactatagaataccaaaaattatga

SEQ ID NO: 78719 - DNA, 1737 bp, Saccharomyces pastorianus
atgtcaattcaggcttttgtcttttgcggtaaaggttccaatttggctcccttcacccagccagattttccattccaaacgcagaacaaagacagtacagctgccacgagcggtgacaaacttaatgagttggtcaatagcgccctcgattcaactgtcataaatgagttcatgcaacattcaacgcgcttgcccaaggctcttttgcccatcggtaatagacctatgattgaatacgtcttggattggtgtgatcaggcagatttcaaagaaatcaatgtggtcgcacccgttgacgaaatcgaattaattgaaagtggtctgacttcgtttttgtccctaagaaagcaacaatttgaactaatatacaaggctttgtcaaattccaaccacagtcatcacttgcaagatcctaagaaaattaatttcatcccttcgaaggcaaattctacaggtgagtccttgcaaaaagagcttttgcctagaatcaatggcgattttgtaatcttgccctgtgattttgtcacagatatacctccacaagtcttggtcgatcaatttaggaatagggatgataataacctagcaatgactatctactataagaactctttagatagtagtatcgataaaaagcaacagcaaaagcaaaaacaacagcaatttttcactgtttattcagaaaacgaagactcagagagacagccaatacttttggacgtttattctcaaagggacgtcacaaagacaaaatatctacagatcagatctcatttattatggaactatccaaatttaacagtatccactaagttactgaactcattcatctacttttgttcttttgaactttgccagttgttaaaattaggacctcaatcaatgtcaagacaagcttcattcaaagatccatttactggaaaccaacaacagcaaaaccctcctactactgatgatgatgaagatcgcaatcatgatgatgacgatgattacaaaccttcggctacatctatccagcccacctacttcaaaaaaaagaatgatcttatcttggacccaataaactgtaataaatcactgagtaaggtttttagagatttatctcgtcgttcgtggcaacattcgaaaccgagggaaccaataggtatttttattttaccaaacgaaaccttgttcatcagagccaataacttgaatgcttacatggacgctaatagatttgtactaaagataaaatcgcaaacgatgttcacgaaaaatatacaaattcaatctgccgctattggtgctgatgccatagtagatcccaaatgccaaatctctgctcatagtaatgtcaagatgtctgttctcggtactcagaccaatattggttccagatgtcgtgttgcagggtctctcttatttcctggagtccatcttggtgacgaagtaatcctggaaaattgtattattggacctatggcaaaaatcggttcaaagtgtaaactcagcaattgttatatcgaaggccattatgttgtggagcctaaaaataactttaaaggtgaaacactggccaacgtttatttggatgaagatgaggaggacgagttaatatatgatgatagtattattgctggagaaagtgaaatcgccgaagaaactgacagtgatgatagaagcgatgaagattctgatgatagtgaatataccgacgagtacgagtacgaagatgacggattatttgagcgttaa

SEQ ID NO: 78720 - DNA, 1044 bp, Saccharomyces pastorianus
atgcccttcgctcagattgttattggtccaccaggttcagggaagtcaacttattgcaacggctgctcacagttcttcaatgccatcggaagacattcccaggtagtgaatatggatcctgctaatgatgccttaccttacccatgcgctgtggatattcgtgattttataacattagaggagatcatgcaagagcaacagttaggccctaatggaggtttgatgtatgctgttgaatcattggataattctattgatttgttcattttacagatcaagtcacttgtagaagaagaaaaagcatatcttgtattcgactgtccgggccaagtggagctatttactcatcactcatctttgttcaacatctttaaaaaaatggaaaaggaattggacattaggttttgtgttgtaaatttgattgactgtttttacatgacatccccttcacaatatatttcgattttgttacttgcattgaggtctatgttaatgatggatctccctcacataaacgttttttctaagatagatatgctgaaatcatacggagaattaccctttagattagactattatacagaggtccaggatctggattatttggagccatatattgaaaaggaaggctctagtgtactgggaaagaaatatagcaagttaactgaaacaatcaaagagctagtctcagatttcaacttagtatcatttgaggttttgtccgtggatgacaaagaaagtatgataaatcttcaaggtgttatagataaagcaaatggctacatattcggcgcatccgaagttggtggtgataccgtgtgggctgaggcttcgcgagaaggtgcattaatagcgaattacgacattcaagacaggtggatagacaataaagagaagtatgataaagaagaagaagaaaaacgtacggcgttgttaaaagaacaagaattgcaaaataaagctgttgatgtgaatgaagaagatgagtgggaaaatgcgctgaaggagtgggaagagaaacaaggaatggattttgttaggtag

SEQ ID NO: 78721 - DNA, 408 bp, Saccharomyces pastorianus
atgtcagtaaattttttctctctaatcacctcaagttgggagcgtggcctcttcttgaaatcatgtaagaacaattctggaacagactctaaccgtttcttcagtttcagtgtacccccaaatcttttagacaacctgttaccaacgttgctggtacgtaaaaccttatcatcttcatcttcaaaatcttgtggtatcgatggaatatacttcaagtcatcagctgttaatgttagcgaagatggtctgactgcatcaacattcttttcaattttattgcccaaaaactttcttggcattactaagttattctgtaggatttttttgctatcctgccctcacaattataaatggttcattcatttaataaatccttttgaatatgaaaacttcatcaatatagagtag

SEQ ID NO: 78722 - DNA, 1293 bp, Saccharomyces pastorianus
atgccaagaaagtttttgggcaataaaattgaaaagaatgttgatgcagtcagaccatcttcgctaacattaacagctgatgacttgaagtatattccatcgataccacaagattttgaagatgaagatgataaggttttacgtaccagcaacgttggtaacaggttgtctaaaagatttgggggtacactgaaactgaagaaacggttagagtctgttccagaattgttcttacatgatttcaagaagaggccacgctcccaacttgaggtgattagagagaaaaaatttactgacatgcaagttcccaagggaccagtttgtcctcaaagcacgattctaccattacgagaaagaaagaaggtaaaatcactaccaattcaaagaaaaagtttacgtaggccgacgctgtcaaagcctgcagtagtacgatcttcagggcataagacacattcggatcatattattgataaagtgtttgtttctcgcccggccccaattgtaatgcctgtaaaagcccttactcctattaatccagtctccctaatccaaacacagacacaagattgctgtagaaaaaataagtatggcaaaagcggtagtgaaatattgtttgacgaaattctatcagcctatgaaaacgtttctacaagcaattctactgccctaaattcagaaattgacagaattatcgatatatgcgcttcaaaacaaatagctaaaaaaaatgaggcatttcaggtaccatatgtcgtctgccctgacgacacagagactttgttttcgtcaacaacaccaaagttgaaacctgtcaattctaacacattaaacgatgtcatttctagcccagaatacaccacgtctggatgcagtacatactctgaccaatcgaattcagatgaggaattgtccgaagtagaaagtatagtatggaacacgaataagaggacaatgagatcatccattgtgtctgaaagcactagtgaggaaggctattgcactgctgcggagactttgccctcaacagtatcagtggaagatctggatatacataacaagcttccaaaagttgcacaaacatcatcgtgcaatacgcttttgaataaactctctataagaaaattaaaaaaagtaattctcgatccgcctaaaataatgcatgtcatgacttttgacgatgacagtgatgatggagatgacaacgatgacgaggatagggctttgaatattcttcaaaaaaaaattgactgcattgaaatagcaagttgcagcagtagcatttacagcgaataa

SEQ ID NO: 78723 - DNA, 321 bp, Saccharomyces pastorianus
atggcacccacacaattggatataaaagtcaaggccttgaagaggctgactaaggaggaagggtactaccaacaagaactgaaagatcaggaagcacatgtggcaaaacttaaagaagacaagtcagttgacccatatgacttgaagaaacaggaggaggtccttgatgacacaaaaagattattacctactttatatgagaagattagagaatttaaagaggatttagaacaatttctaaaaacttaccagggtaccgaagatgtcagtgatgcaagatccgctattacgtctgcacaggaattactcgattctaaataa

SEQ ID NO: 78724 - DNA, 1272 bp, Saccharomyces pastorianus
atggattctcgagttgcactggtacgaaaatacatagcaccatcggtgataaaaagcgattctattcaattgcacggtttagtgaaggcaccactatttaaagcgttgaatagccgttacaaattaggttcactacagatagtacaggatgtcgattggaatgcgaagacaacaccatccgattctccagagcctctggccgctactctaaactctaatcgatccctaccaatgactaagttccccaagcaggagatcttggaacaggtaaaattggatactaaggttggcaaatggaggaaattcatgacaggttggtttagaattggattgtatcttttaaaaagctataaaacaggaattcagaacacgttaaaagtattctgggatactcgaaacgaagagcagaaattcagcataaaaaacggtgcattggctaacttagtacgggaaatagaaatgcatgaaatcaatacaagactatcgtcttcatcattgcctacaagttcttcagcaaaagccccattaaggccactttcaatcaataggaaaacactggtggaactgatcagacgagatcaaatctggaaattacctgtatttttcaccttagtattcatatttgaggaggtaagtgcattgatctttaccttttttccacgtgtctgtccgtacaattgtttaactcctggtggatacaagaagctttccaactcatatatcaagggaacaacaggcacacaaggtaactacggtctgggtcccttagagtttactaagcaaggtacaattaagtatgagccaccatatgcagttcctattgagaatttgtataattttctgacaagctttcctcaaagtatgatatcaaattggaaactgtacatttataaaaagttaaaattacagaagctactttgcaatgagatagaaaaaatttaccagtatctgtttatcgatgactggttgctgttgcagagtatactcaacactgatgttgagaaaactaaaatcgcgctaagtgatagagaattggttaactgtatacttgaaagaaaactttatcacatgggcgatgacttgaatgagatggttaatgacacgttagggaaagaaatcttactgaaaagactgtttctttattggacgttaagatataatgacactatatccttaaacggaaagcatacattcagtgagaaatggggtgtcaacaatatatcattgttaaatataattcacgaattggtagctacgaacgatattcaatag

SEQ ID NO: 78725 - DNA, 2292 bp, Saccharomyces pastorianus
atgcctaatctattgtcgagaaacccattccatggtcatcataatgaccatcatcatgaccgtgaaaattcgtctaataacccgccacagttgatcagaagttctaaatctttcttaaacttcattggtagaaaacaaagtaatgactcactaagaagcgagaaatctacagattccatgaaatctaccacaaccactacaaattatactacaacaaaccttaataacaacacccatagccattctaatgcaaccagtatctcaacaaacaactacaataataactatgaaacaaaccaccaccataatatttctcatgggctccatgactatacttctcccgcctccccaaaacaaacccactccatggcagaattgaaaaggtttttcagaccctctgtaaataaaaaactatctatgtctcaacttcgttccaagaaacatagcacccattcccccccaccttcaaaatcaacttctacagttaatttaaataatcactatcgtgcccagcatcctcatggctttacagaccactatgctcatacccagtctgctataccgccaagtaccgattctatcctatctttgtccaataatattaatatatatcacgatgattgtattctggctcaaaaatacgggaaattgggtaagttattgggttccggtgccggtgggtcagttaaagttcttgtgagaccaactgatggtgctacttttgccgtcaaagaattcagaccaaggaaaccgaatgagagtgtgaaagaatatgccaagaagtgcaccgcagaattttgtattggttcgactttacatcacccaaatgttatcgaaactgttgacgttttctctgattctaaacaaaataaatactatgaagtcatggagtactgtccgattgatttttttgctgttgttatgacaggtaagatgtctcgtggcgagatcaactgttgcttgaaacaattgactgaaggtgttaaatatttacattctatgggattggcacatagagatttgaaattggataattgtgtcatgacttcccagggtattttgaaagtaattgattttggtagtgctgttgtgttcagatatccttttgaagatggcgtaacgatggctcatggaatcgtgggtagtgacccttacttagcgccggaagtgattacctccaccaaatcttatgatcctcagtgcgtcgatatatggtctattgggatcatatactgttgtatgatgcttaaaaggtttccatggaaagcccctagagattctgacgataattttagattatattgtatgccggatgatatagaacacgactatgttgaatctgccaggcatcacgaagagttactgaaggaaagaaaagaaaagggtcaaaggtttttaaatcacagtgactgttccgccatcaatcagcaacaaccagctcatgaatcaaacttgaaaacagttcaaaatcaagttccaaatactccagcatctatacagggtaaaagcgataacaaaccagacattgtggaagaagaaaccgaagaaaataaagaagatgatagcaataatgataaagaaagcacgccagataatgacaaggaaagtaccatcgatattaaaataagcaaaaatgagaataaaagcacggtagttacagctaacccaaagaaagtagatgccgatgccgacgctgattgcgatgctaatggtgactctaacggcagagtggattgcaaggctaacagtgactgcaatgacaaaacggattgtaatgccaatggcaacaacaaaccggattgtaatgctaacaatgactgcagtaatgaatcggattgtaacgctaaagttgataccaacgtcaacactgctgccaacgctaaccctgatatggttccccaaaacaatccactacaacagcaacaacaacaacaacaacaacaacaacaacaacaccatcatcaccagcatcaaaatcaagacaaagcccatagtatcgcttccgataataaatcgagtcaacagcacagaggacctcaccataaaaaaattattcacggcccataccgtctattacgtctactaccacatgcttcaagacctatcatgtcccgtatactgcaagtagatccaaagaaaagagcaaccttagatgatatttttaatgatgaatggtttgccgccattgctgcctgtaccatggattcaaaaaataaagttattagagcgcctggccatcaccatacattggttagggaggaaaatgctcacttagagacctacaaggtttaa

SEQ ID NO: 78726 - DNA, 399 bp, Saccharomyces pastorianus
atggtttttgttttccccttcccatttttttcttatggtttttccagttttctagaagccggaaaaaaggcaagctacaaaatgtactacgcggagccagaattaaaaaccacgcggacgggacgggccgtggcttgtgacgccggatccccgcgtataatccgtgtcacgctaaaggacaaaatcggtttatccgagcggtttacgggaagggtcttttgctatctcgcagtagcgtgtgcctggttatcccaatactaccaccacacctgtgctttttttatcttgtacgtgcatgtatgcgtatgttttctttttttccgttggtgcttattcgctaccgtctcgttgatccatgaatcacaaacacaagccggttctgcttactatacaaaatag

SEQ ID NO: 78727 - DNA, 1485 bp, Saccharomyces pastorianus
atgactaactggcagcaacagcttcctttaacagatacacagaaaaatgaactcgataaaagtgtcctccgatatttgaattggaattacaaacaaactgtacgacatgagcatgctcaagattacgaaagtgttcgacatgcaattgtaactctatcaggttttctgttgcaagaatcagtggaccggcaagaattcatcagtaacaatgacaccagtaacgaaagtatggtagacattgatgaattactgctaccgaagaagtggaactcaattgttagactacaaaaaaaaatcattgaattggagcagaatacagagacccttgtatctcagattaaagatttgaacactcaagtgtcagaactagcacaattcaaacctaccaccagtaacggcaccagcgcacataatgttttgaaatggataccgagaaatctaccaagctgtttaattaatgttgaatcatctgtcacttccgtcaaactacatcccaatttgcctatagtgtttgtggccacagatcatggcaaattatacgcatttgatttatttaactacaccatccctctggcatccttgcaaagtcataccaaggcaattacctccatggatgttttatttaccaattttacgaactccagcaagaagaactatttggtggtcgttaccgcgtctaaagatttgcagattcatgttttcaagtgggtctccgaggaatgcaagttccaacaaattaggtctttattgggccatgagcatattgtctctgcggtaaaaatctggcagaaaaataatgatgtccatattgcgtcctgttccagagatcaaactgttaaaatttgggacttccacaatggttggtcgttgaaaacatttcagcctcattcccaatgggtacgttccatagacgttctaggcgattacatcatctctggttcacatgacactacattaaggttaacacattggccatcaggtaatggtcttagtgttggcacgggtcatgaatttcccatagagaaagttaaatttattcatttcatcgaagactctccggagataaggtttagaacaccatcaacggatcgatataagaattgggggatgcaatattgtgtctcagcgtcaagagatagaacgataaaaatctgggagatacctctacctacgttaatggcccatagagcacccataccgaatcctacagattcaaatttcagatgtgttcttacgttgaaggggcatctttcgtgggttagagatattagtattcgaggccaatacttgttttcttgtgctgatgataaatctgtcagatgttgggatctgaacacggggcagtgcttacacgtttgggaaaagttgcatacaggatttgtcaactgtttagacctggatgtggatttcgattctaacgttaccccaaggcaaatgatggtcactggtggattggattgcaagtctaacgttttcatgagataa

SEQ ID NO: 78728 - DNA, 2523 bp, Saccharomyces pastorianus
atggcagagaaggaggaagcgatttttcgctctgctgaaatggctttagtccaattctatattcctcaagaaatttcaagagactctgcttatactttaggtcaattgggtcttgttcaattccgtgacttgaactctaaggtgcgtgcgtttcaaagaactttcgtgaacgaaattagaagactggataatgtagaaagacagtatcgttacttttattctcttttgaagaaacacgatattaagctctacgaaggagacacggacaaatatttggacggctcaggtgaattgtacgttccaccaagcggttcagtgatagatgattatgtccggaacgcttcatatttggaagaaagattgattcaaatggaggatgcaaccgatcaaattgaagtccagaaaaatgacttggaacagtatcgctttattttgcagtcaggtgatgaatttttcttgaagggtgataataccgacagcacttcctatatggatgaagacatgatcgacgctaatggggaaaacattgctgctgctatcggtgcttctgtaaactatgtcactggtgtcattgctagagacaaagttgccaccttagaacaaattctttggagagtattaagaggtaaccttttcttcaaaactgttgaaattgaacaacctgtttatgatgtcaaaaccagggagtataaacataaaaatgcttttatcgtattttctcacggtgatctgattattaaaagaatcagaaagattgctgaatcattggatgccaatctatacgatgttgactcttccaacgagggtagatcacaacaattggccaaggtcaacaagaatttgagtgatttgtacacagttttgaaaaccacttctaccactttagaaagtgaattatatgccattgccaaagaattggactcttggttccaagatgttacccgtgaaaaggcgatttttgaaattttgaacaagtctaactatgataccaatagaaagattttgattgctgaaggttggataccaagagacgaattggctactttgcaagctcgtcttggtgaaatgatcgcaagattgggtattgatgtcccatccattatccaagtcctggatacaaaccacactccacctaccttccacagaactaacaagtttactgctggtttccaaagtatctgtgactgttacggtattgctcagtacagagaaatcaatgctggtttacccacaattgtcactttccctttcatgtttgccatcatgtttggtgatatgggtcacgggttcttaatgaccttagccgcattgtctcttgtattgaatgaaaagaaaatcaacaaaatgaaaagaggcgaaatttttgatatggccttcactggtagatacattattttgttgatgggtgtcttttccatgtacacaggtttcctttacaacgatatcttctctaaaactatgaccattttcaagtctggttggaaatggcctgatcattggaaaaaaggtgagagtattactgctacatcggtgggcacataccctatcggtttagattgggcttggcatggaactgaaaatgctttgttattttctaattcttacaaaatgaaactatcaattttaatggggttcatccacatgacctattcctatttcttttcgttggctaaccacctatactttaactctatgattgatatcatcggtaactttattcctggtttgctatttatgcaaggtatctttggttatctttccgtttgtattgtttacaaatgggctgttgattgggttaaggacggaaagcctgctccaggtttgttaaatatgttgatcaacatgtttttatcaccaggaactattgacgatgaattataccctcatcaagcaaaggtccaagtgtttttgttgttgatggccttggtttgtattccttggttgctattggtgaagccattacatttcaaattcactcataaaaagaaatctcacgaaccactaccatcgactgaagcagatgctagttcagaagatttggaagcgcaacaattaatttccgcgatggacgccgatgacgctgaagaagaagaagttggttctggatctcatggtgaagactttggtgatattatgattcatcaagttattcatacaattgaattctgtttgaattgtgtttcgcacactgcatcctatttacgtttatgggccttatcattggcacatgctcaattgtctagtgttttatggacaatgacaattcaaattgcctttggatttagaggatttgtgggtgtgtttatgacggttgcactttttgccatgtggttcgcactaacatgtgcagttcttgttttgatggaaggtacatctgccatgcttcattccttacgtttgcactgggttgaatctatgtccaagtttttcgtgggtgaaggtttaccatacgaaccattcgcatttgagtataaagacatggaagtcgctgttgctagtgcaagctctgccgcttcaagctaa

SEQ ID NO: 78729 - DNA, 984 bp, Saccharomyces pastorianus
atggcatcatcagtcccagggcccatcgatttgcccgaatcccgctatgacttatccacgtactggggtagaatccgccattgcgcagagatttccgaccccactatgttgttaactactgagaaggacctggcgcatgctagagaaatcatcagtgcgtatcgtcacggtgaactaaaagagactactccggagttctggcgagccaagaaacaactggactccaccgtgcatccggacacagggaagacagttcttttgcccttccgtatgtcttccaacgtgctatcaaacctagtcgttactgtaggtatgctgacgcctggtttgggtacggcagggactgtattttggcaatgggcaaatcaatcgctaaacgtcgccgttaattccgctaacgcaaacaaatctcatcctatgtccacgtcccaattgctcaccaattacgctgccgctgtaactgcgtcgtgtggtgttgcgttaggtctaaataacctagttcccaggttgaaaaacatttctccacattcaaagttgatcttgggccgtttggtgccatttgccgccgtggtcagtgccggtattgtcaacgtcttcctaatgagaggcaacgaaattagaaagggtatttctgtgtttgactctaacggtgacgaagtcggaaagtccaagaaggctgccttcatggcagttggtgaaactgcattaagtagagtgattaacgccactccaactatggtcatcccacctttgattttggttagactacaacgcggtgtcctcaaaggtaagtctctcggtgtgcaaactttggccaatttggggttgatctcagtcacaatgttctcagctttgccatttgcactcggtatcttccctcaaagacaagcaatccatttaaataaactagaacctgaactacatggcaagaaggataaggatgggaagccaattgaaaaggtctattttaacagaggtatttag

SEQ ID NO: 78730 - DNA, 1383 bp, Saccharomyces pastorianus
atgacagaagataaatcgcaggttaaaatcaggtttttcacgcgtgagaaagatgaatcactacatgtacaagatactccaatgtacgcccccatctcattaaagagatatgggttgtccgaaattgtcaatcacttgttgggctcggaaaagcctgttcctttcgatttcttgattgaaggtgaattgttgcgtacttcattgcacgactatttaaccaagaaaggtttatcgagcgaagcctcgctgaatgtagaatataccagggcagttcttccaccatcctatttgaatagtttcagcaatgaggactgggttagctcattggatgtcggcgacggttccaagcatattattagtggttcttacgatggtatagttcgcacctgggatttatcaggtaatgtgcaaaagcagtacagtggtcattctggcccaatccgtgcagtaaaatacatttccaatacaaggctagtttcggctggtaacgaccgtactttgagattatggaaaaccaaaaacgatgatttgaaattaacttcacaacaacaggcacaggaagacgatgatgacgaagtaaacatagaggacggtaagacactggctatcttggaaggtcataaggcaccagtagtctctattgatgtttcagacaactcgagaatattatctgcatcatacgacagttctattgggttctggtctactatttataaggaaatgacagttgttgatccattagaagatataaacaatccaaacaataaaatatccactgctgctagaaaaaggagaaaattgacaatgaaagatggtaccattagaagacgtgcccctctgtctctgttagaatcccatacagctcctgttgagcaagtgatcttcgattctacagataataccgttggttattcagtatcacaagatcataccatcaagacatgggatttggtcaccgcgagatgtatagatacaagaacaacatcgtactcgttgctttccattgctcaattgtcgactttgaacttgttagcatgtgggtccagcgccagacacatcacattgcatgacccacgtgtgggagcgtcttctaaagttactcagcaacaactaattggtcataagaacttcgtttcctctctggacacttgtcccgagaatgagtatatattatgctcgggttctcacgatggtaccgtgaaggtatgggacgtcaggtctacttctccgatgtacaccataacaagagaagacaaatcggtccaaaagggcgtcaatgacaaagtttttgctgtcaaatgggctgaaaaagtgggtattatcagcgctggtcaagacaaaaagattcaaataaataaaggagacaacattttcaaaaactga

SEQ ID NO: 78731 - DNA, 1980 bp, Saccharomyces pastorianus
atgccttcttctttgacaaaaaccgaatctaactcagatcctcgaacaaacatacagcaggtaccaaaagccttggacaaaaatgtaactaatagcggcaacttggattcgacttcttcttcgacagggtcaataacagaggacgaaaaaagatcagaatcgaatgcagattccaatagcatgacagggggcgagccaattgacccaagagatctcgattgggacgggcccgatgacccagacaatccgcataattggtcctctttgaagaaatggtatactactatgacttcagcttttctttgtttggtcgtcacaatgggtagttccctatatgtttcttccgtaccagaattggtagaaagatatcacgttagtcagactttggcgcttgctggtttaactttctatcttctgggtttatcgactgtcatcggcgctccattaagtgaagtgtttggtcgtaagcctgtctatttattttccctacctgtgtcaatgcttttcaccatgggtgttgggttatccaatggccacatgagaataattctacccctaaggtttttatcaggtgtctttgcatcccccgccttatccgttggatcaggtaccatcctggatatctttgacgtggaccaggtctccgtcgcaatgacatactttgttctatctccattcttagggcctgttttatctcctattatggcaggatttgctactgaagccaaaggctggcgttggtctgaatggatccaattgattgcgggcggtctaatcttgccatttattgcgctcatgccagagacccataaaggtattattttaagaaagcgtgccaagaagagaaatatagccttgaagaagttcagcagggaagctcagaaagaatttttaaaaaccactgtcactattacaatcttaaggcctttaaaaatgcttgtcgttgaacctattgtatttgttttcagtgtttatgtcgctttcatcttcgccattttatttggatttttcgaagcatacgctgtcatttatcgtggtgtttaccacatgtctatggggatatctggcttgccatttattggtattggtgtcgggttatggataggtgctttcttttacctttacatcgacagaaaatatctcttccctaaaccaccagctggcactcaaccactcaccgaaaaagagagaacttctaaaaggactaccccttacagaggtgcaagagacactgaaacaggtgagttgctacccgttgttccagaaaaatttttaattgcctgtaaatttggttctgtagctttgcctatcggcctgttttggcaagcctggactgctagatcagatgtccactggatggctcctgtggctgccggtgtgccatttggttttggtttaattttgatttttttcagcgttttaatgtacttctctacatgctatccgccattaactatggcatcctgtttggctgccaataatctattaagatacgttatgagtagtgtattcccattgtttaccatccaaatgtacacaaagatgaaaatcaaatgggcaagcactttatttgcattagtttgcgttgtgatgattccaattccatgggtttttgaaaaatgggggagcaaattaagacacaagtcacaattcggttatgccgccatggaaaaggaggctgagactgaaggtgatatagatgacgtaaatgctgtcgatggtgaattgaatctaacaaggatgaccacgttaaggaccatggaaacagacccttcgactagagaaaaaccaagtgaaaggctatctctgcgcaggacccatacgcagcccgttcctgcctcgtttgatcgcgaggacgggcaacatgcgcaaaatcgtaatgaacccatttccaatagtttatactcagctatcaaggataatgaagacggttattcgtatacggaaatggccaccgatgcttccgccagaatggtttga

SEQ ID NO: 78732 - DNA, 486 bp, Saccharomyces pastorianus
atgatcaagtatactatcgatgagctttttcaactgaagccaagtgtaactttggaagttaatttcgatgcggtggaatttagagccatcattgaaaaagttaagcaattgcaacacttgaaagaggaagagtttaacagtcatcatgttggtcatttcggtcgtagaagatcttcccaccatcatggtagaccaaagattaagcacaacaagcctaaggttacaaccgattcagatggttggtgcacatttgaagccaagaagaagggtagtggagaagatgatgaagaagaaacagaaaccacaccaacttctactgtgccagttgctaccattgcccaagaaactttaaaagtcaagccaaataacaaaaatatttcttccaacagacctgctgataccagagatattgttgcggacaagccaattcttggtttcaacgcatttgctgctttggaaagtgaagacgaagacgacgaagcataa

SEQ ID NO: 78733 - DNA, 309 bp, Saccharomyces pastorianus
atgacttatgcttcgtcgtcttcgtcttcactttccaaagcagcaaatgcgttgaaaccaagaattggcttgtccgcaacaatatctctggtatcagcaggtctgttggaagaaatatttttgttatttggcttgacttttaaagtttcttgggcaatggtagcaactggcacagtagaagttggtgtggtttctgtttcttcttcatcatcttctccactacccttcttcttggcttcaaatgtgcaccaaccatctgaatcggttgtaaccttaggcttgttgtgcttaatctttggtctaccatga

SEQ ID NO: 78734 - DNA, 828 bp, Saccharomyces pastorianus
atgtctagtcgtaaaaaagtcagagtattactgctcaagaataaaactgtccccattgataaatatgaattggagtgtaggagtaaggcgtttgaacccatattcgtaccgcttattaaacatacacatgtaattcaagattttagaaatgttttgaataccatcccaaactatttgaatactatcaattacattattattacctctcaaaggactgtagagtcattgaatgaagcgatcattcccacattgacaagtgaacaaaaagctgcattgctcagtaaaacagtttatactgtaggccctgctactgctaacttcatcagaagatcaggtttcattaatgttaaaggtggagaagacgctggtaatggttcaatccttgctgatataattattgatgacttgagtacggatattaaggcatgcccaccaagtgaactattatttctcgtgggtgaaattagaagagatatcatcccaaagaaactccatagcaagggaataaaagtaagagaagtggttacttataaaactgaagaattaagcgacggttttaaaagattcatacacgccatgaaagaatgcgatgaggatgaagtattctcggactgggtggtagttttcagtccccagggaacgaaagaaattactcagtatttgggtgacagtaaccgcctaccaggttcccatctacgggttgcgtccatcggacctaccactaaaaaatatctggatgataatgatgtaacctctgatgtggtcagtccaaaaccggaccccaagtcgctattagatgctattgaattataccagcgccataaataa

SEQ ID NO: 78735 - DNA, 801 bp, Saccharomyces pastorianus
atgagtgaaaagaagaaagttctaatgctacatggttttgtccaatccgataagatattttctgcgaagactggaggattacgaaagaatttgaagaagttaggttacgatttatactatccttgcgccccacattcaattgataaaaaagcgttattccaatcagagtcagaaaagggtagagatgctgcgaaggaattcaacacttcagcgactagtgatgaagtatacggatggttctttagaaatcccgaatctttcaattcctttcaaatagatcaaaaggtgtttaactatttacgtaactacgtgctagaaaatggaccatttgatggtgtcattggatttagccaaggtgcaggtcttgggggctacttagtaactgactttaacagaatattaaatcttactgatgaacaacagcccgctttgaaattttttatttcatttagtggattcaaattagaagatcaatcctaccagaaagaatatcataggattatccaggtaccctctctacatgtaaggggggagttagatgaggttgtagcagaatctagaataatggcattgtacgagtcatggcccgataataaaaggacattgttggttcatcctggagcccattttgtcccaaactcgaaaccattcgtatcccaagtttgcaattggatccaaggaattactagcaaagagggtcaagagcataatacccaacctgaagtagatcggaaacaatttgacaaacctcaattggaagatgatttgttagatatgatcgattccttgggtaaattgtaa

SEQ ID NO: 78736 - DNA, 861 bp, Saccharomyces pastorianus
atgcagaatgaaccaatgtttcaggtccaggtggacgaatctgaagacagtgaatggaacgatattttaagagcgaagggtgtaataccagaacgtgcaccttcgcccactgcaaagttagaagaagcattagaagaagcaattgccaagcagcatgaaaatagactagaagataaagacttgtcggatttggaagaactagaagacgatgaagatgaagatttcttggaagcttacaagatcaaaagattaaatgaaatccgcaaattacaggaacgttccaaatttggagaagttttccacattaacaaacctgaatacaacaaagaggttactttggccagtcagggaaagaaatatgaaggtacacaaaccaatgacaatggtgaagaggatgagggtggtgtctacgtattcgttcatctctcgcttcaaagtaaactacaaagcagagttctgtctcatcttttccaatctgctgcatgcaaattcagagaaataaaatttgtagaaatacctgccaatagagccattgaaaactatcccgaatccaattgcccgacattaattgtatattaccgaggtgaggtaatcaaaaacatgataacactactagaactgggtggtaataattccaaaatggaagactttgaagattttatggtaaaagttggcgctgttgcggaaggagacaacagactgataatgaaccgagacgatgaagaatccagggaagagagaaaattgcattacggtgaaaaaaaatcgatcaggtcaggtattagaggaaaatttaatgtcggcataggtggaaatgatgatggcaacattaatgatgatgatgatggattttttgactaa

SEQ ID NO: 78737 - DNA, 321 bp, Saccharomyces pastorianus
atgcttcttctaactttgcagtgggcgaaggtgcacgttctggtattacacccttcgctcttaaaatatcgttccattcactgtcttcagattcgtccacctggacctgaaacattggttcattctgcattatgtctgctgaatatgcctttcttctcagtgatgtttactcgaaggcgttatcttgtactgcagatttcttcaggtcgatcatataaccttttctttttttcctctagcgggatttcctcttttttcagtaattttttttccagcgatattaatacaatgggaaaatcaggtcgtcacaatattacttaa

SEQ ID NO: 78738 - DNA, 732 bp, Saccharomyces pastorianus
atgcaacaaacaaaatttggcaagatgtatttggaccacgattcggtagttgagtactcagaagatgaaattgtcgaagccgatcgtattacattgggctataaaaagagattgtcaatgattgaaaatcaaatgcaacatcttttggaggattttactttggacgttcagcagattgaatccattcttgccgacttgcagaagtactacgacgcgtttctacaacttttacagaaaaggaacaaatcattacaatgtaagaggtccactcaccagccggtcccatccccaatgaatagccacacatcaacaaatgcaaaggttaatttgagcggaaagcttatgaagtttcagctaaatagtgtacaaaagttcgacgaagaaaatatactaaggattctgcaaaataaaagagaattcgaacattatttccaaattgataaaggtaagaagcaaaaggtgctattacttgccgtatatcaatgtctcaatgggccaacacgtttgcataaagtgcttaatattgagggaattatacataataatagtatcagaactatactgggcaaacaagtgtccagttctaagtggacagtgtttctgtacgatgtaaaactagttttattggcgcatagacaagatgttccgaacttagaaactagcaagatgatcgtcagatatggtgatttatttccctgtgcattgtacttcaaagatcatacagcatactaa

SEQ ID NO: 78739 - DNA, 420 bp, Saccharomyces pastorianus
atgtggaaggccgtgatgaatgcttggaatggaaccgagagtcaaagtaagaatgtttcaaatattcaatcttacagttttgaagacatgaaaagaatcgttggaaagcatgatcctaatgtggttttggtagatgttagagaaccatctgagtactcgattgttcatattcctgcttccatcaatgtgccatatagatcgcaccccgacgcgtttgccttagatcctttagaatttgagaaacagattggcatcccaaaacctgacagtgccaaggagctaatattttattgtgcttctggcaaacgcgggggagaagctcaaaaagtcgcctcctcacatggatattcaaacacctcactatatcctggctctatgaatgattgggtttctcatgggggtgataaacttgacttatag

SEQ ID NO: 78740 - DNA, 450 bp, Saccharomyces pastorianus
atgttcaagcatagtacaggtattctctcgaggacagtttctgcaagatcgcctacattggtcctgagaacatttacaacgaaggctccaaagatctatacttttgaccaggtcaggaacctagtcgaacaccccaatgataaaaaactattggtggatgtaagggaacccaaggaagtaaaggattaccagatgccaactacaataaatattccggtgaatagtgcccctggcgctcttggattgcccgaaaaggagtttcacaaagttttccaatttgctaaaccacctcacgataaagaattgatttttctttgtgcgaaaggagtaagagccaaaactgccgaagagttggctcgatcttatgggtacgaaaacactggtatctatcctggttctattactgagtggttagctaaaggtggtgctgacgttaagcccaaaaaataa

SEQ ID NO: 78741 - DNA, 903 bp, Saccharomyces pastorianus
atgtcgtattactttaaaaatctgaagccagacttgaactccgacgtagaagaagatgacggaaacttattggagagcataatggcgaacaaaagtaagcgagaaattgacgaacaagaatcaagtgacgatgagttgaaaaccttgtcttttggttctttgaagaaggctgaaacggtaatagatgaagaagatttcaaagatacgaaacccgttcacaaaaaaccgatcacaactacatacagagaagaaagttttgatgaagatgaggacagtgaggaccaatcagacgaggatgctggattctttgaagaagatagtgaggatgaaactcatcatggtcagaaagtaccaaaaaagaagagcaaacacgctccagtagaacaatcatccaagaaaagggtaccacgagtccgaaatatccctgggctggaaataccgaggaataaaaagtctaacctctatcaggacatcagatttgataagtccaccggtaaagcccttgatagttctatcataagaaaacgttaccagttcttggacgaatatagagaaaaagaaattgatgaactgcagaaactgttacaagatagaaaatttctatcaaaaatagaccagggagaacgtgaagaaatggaacaaagactgaaaagtatgaaatcgagattgcaatcaatgaaaaacaaagatctcgagcgtgaaattctcaaggaatacgaaaatgatatgaataaaaacaataatacgagataccatttgaaaaagtctgagaaacgtaaagtggtgcaaaagtggaaatttgatcacatgaaggccaagcaacgtgaaaaggtcatggaaaggaaaaggaagaagagattgggtaaagagtttaaacaatttgaatttcataatcgtaggtag

SEQ ID NO: 78742 - DNA, 957 bp, Saccharomyces pastorianus
atgttatttcttaatattattaagctccttttgggactttttattatgaatgaagtaaaggcgcaaaacttttacgattccgatcctcatatatcagagttaacgccaaaaagcttcgataaagcgatccataacacaaattacacatcattagtggaattttatgctccgtggtgcggccattgtaagaagctctctagtacgttccgcaaggcagcaaaaagattggatggtgtagtccaagttgctgctgtaaactgtgaccttaacaagaataaggctttgtgtgctaaatacgacgtaaacggatttcccacgttaatggtatttaggcccccaaaaattgacctatctaagccaatagataacgccaaaaaaagtttcagcgctcatgccaatgaagtgtactcaggtgcaagaactctcgcgcctattgttgatttttctctttcaagaataaggtcatatgtcaaaaagtttgtccgtatagatacacttggctctttacttagaaagtcacccaaactttccgtggtgttattttccaaacaagacaaaatttcaccggtttataaaagcattgcccttgattggttaggaaagttcgatttttattcaatttcaaataaaaaactcaagcaactaaccgatatgaacccaacatatgaaaaaactcctgagattttcaaatatttgcagaaggtcattcctgaacagcgacagagcgataaaagtaagcttgtcgtttttgatgcagacaaagataaattttgggagtatgaagggaactcaatcaacaaaaatgacatttccaaatttctgcgggacacttttagtattacccccaatgagggtccttttagtagacgctctgaatatattgcttacttaaaaactggcaagaagccaattaaaaagaaccattcctcctcaggaaacaagcacgacgaattgtag

SEQ ID NO: 78743 - DNA, 756 bp, Saccharomyces pastorianus
atggctttaaggctatttcgaaaatccagtttttttgcaaagatatcaatggaaggccctaaaggttcatcgccatttgcgttttacgcattttatcaactttattcgcacttgaatccggggaaatcgagcagcctttctttagaagatattagaagaaggctataccccgactttaaaatagattacaatgagaaaacttcgttgttcataacttggaagaaaaagtctaataaacatcacacaatagacactaacgaagagaattatatacttagaggatgtatcggtacatttgctaagatgccgattgcacatggtattgagaaatattccttgattgctgctttagaggataggagattttctccgatccagaaaagggaattggtggacctgaaatgcagttgcaacatcttaggcaacttcaaaactatttttcgaggtggtggtaatccaaatggggacattttcgattgggaactcggaaagcacggtattgaactgtattttaagcatcccaaaacaggcaccacatgtagcgcaacctttttacctgatgttatgcctgagcaacattggaataaagaagatacctttgccaatttaatcgagaaggcgggttactggggcaatattagtgaagtaatggataattttgaaacttatttcattgaagtaataaggtacgagggcaaaaaaagttccataacttatgaggaatttaacaaacagttaaaagatatagaggcttag

SEQ ID NO: 78744 - DNA, 930 bp, Saccharomyces pastorianus
atgcctcttcaactttttggcagggatcagatcgttgtacattatgataacggcaacatgagtaacgatgaccagaatcaccaaagtgttctcggatcttggacaagaagtgcagcagcagcattaagaacgttaatgaacaagcgaatacaacgtataacacttacgcactggttgctgttagtcatatgggttactagcctatggaaatttaccagtcattatagacagctgtatgctaattctgctgtttttgcaactttatgcacgaacattcttttatttgggatatctgacatactagcacaaagtatagcctgcttttattcatatcacgtggaccctataccgcaaatacttaacgatacctttcatcatgttcagaacaaccgtgatgtagaaaatggaggaggttatgaaagtgatgagctatctatcttcaatgattttacctcggaacatagctcctacacggataacgacgactatcctgaacttgataggccattagctactttcaaaacggacacatttgacttcttcaggtgggggtgttttatgttctggggattttttatatcatttttccaggctccttggtacaagttcttgaatttcttttacactgaagatccgacagtggtacaggtttttgaaagggttctttcggatcagctcctttattcgccaatctctctctattgtttctttatgttctcaaactatgtgatggaaggtggagataaggacacccttggcaagaaaatccaaaggctatatatatctacgcttggctgtaactatctggtgtggccaatggtacaattcattaatttccttataatgcctagagatttccaagcaccttttagctcttcagttggagtggtatggaattgcttcctttcgatgagaaatgcgtctaaatag

SEQ ID NO: 78745 - DNA, 612 bp, Saccharomyces pastorianus
atgtcagcagaagattacaagaacttaccagtcaccgttgaaaagcctatcccagtggtatacgatttgggtaacttggcagcattcgatagtaatgtcttggataaaaacgatttagattcttcgaatgctaggcgtgaagaaaagataaagagtcttactcgtgataatgttcagttactaatcaatcaactattatcactacctatgaaaacaacaacggagtctgtaggtggcaccggcggtcaaagttccgtgatgaccttgttgcagcttcctgaccctaccactgacttaccaagagaaaagccactgccaaaggctaaggctatgaccaaatgggagaagtttgcagctaagaagggtattaaaccaaaggaaagggcaggaaagatgatttatgatgaggcatccggtgaatgggttccaaagtggggctacaagggcgcaaataagaagttagatgatcaatggttggtggaagttgatgataaagtaaaaggcactgacaatgaattgatcgatccaagaactttgaatagggcagaaagaaaacgtttagtcaagaagaacgaaaaacaacaaaggagaaatatgaagaatgccttatga

SEQ ID NO: 78746 - DNA, 579 bp, Saccharomyces pastorianus
atgctattgtttcctggcttgaagcctgttcttaatgcttccactgtcattgtaaatcctgtacgagctgtttttccaggattagtactttcaaccaaaagatccttttatagcattaatcgtttaaatgctgaaaataaaataaacgatattgcaaatacgtcaaaagaggcatcctcttcagtgcagatgtttaagcccccagagttctctcaatttaaggactcttatcaaaaagactatgagagaatagcaaaatatactttgattccattaacaatggtacctttttatgcctcctttaccggcggggttatgaatcctttactcgatgcgtctttatcgtccatttttttgatatatttacagtatggcttcacaagttgtattattgactatataccgaaggaaaagtatccaagatggcataagctcgccctttattgcctctatggaggatccatgttgtccctgtacggtatctacgaattggaaacgaaaaataatggttttgttgacctggtaaagaaactttggaatgaaaatgatgaccatttgtatatatttggaagaaactga

SEQ ID NO: 78747 - DNA, 1440 bp, Saccharomyces pastorianus
atgggttttgttgatttcttcgaaacatatatggtcggttctagggtccagtttaaacagttagatatttctgattggttgagtctgaccccaaggttgcttattctttttggctatttttaccttcattctttttttactgcaatcaatcaattcctacagttcattaacacgaattccttctgtcttagactgcatttactatatgacagattttggtcgcatgtgcccataataggtgagtacaaaattcggctgctctcgagggcactgacatatagtaaactaaaaataataccaactttagacaaggtgctggaggcgattgaaatttggtttcagctacatttagttgaaatgaccttcgaaaaaaaaaaaaacgtccaaattttcatacccgagggaagtgatgacctaaacttttttaaagatagcaaattccaaaccacattaatgatatgtaatcatcgatcagtgaatgactacacattgattaattacctttttctcaaaagttgtcccaccaagttttatactaaatgggaatttctacaaaagctgaggaagggggaagatctacctgaatggcctcagttaaaatttcttggttggggaaaaatgtttaactttcctcgattggatctactaaagaacatattcttcaaagatgaaacactcgcactctcatcgaatgagttaagagatattttagaaagacaaaacaatcaagctattactatttttcccgaagtcaatatcatgagtttggaactatcaattattcaaagaaaattacaccaagattttccctttgttataaacttctataatttattatacccaagatttaaaaactttaccactttgatggctgctttttcatcaattaaaaacatcaaaagaaagaaaaaccgtaacaatataatcaaagaggcccgatacctgtttcacagagaactcgacaaattagttcacaagagcataaaaatggagtcttccaaggtatccgataagacgacgccgcccatgatcgtagataattcatacttacttaaaaaaaaggaagaaatcagcagcggcaagcccaaggtggtacgaatcaatccatacatatatgatgtcaccataatttattaccgagtcaaatatactgatagtgggcatgatcataccaacggagatttgagacttcataaaggttatcaattagagcaaatatctccgacaatctttgagatgattcaaccagaaatggagtctgaaaacaacataaaggataaggaccccattgtcgtgatggtaaatgtaaaaaagcatcaaattcaaccattactcgcatacaatgatgagagtttagaaaagtggcttgaaaataggtggatagaaaaagatagattaatcgagtccttgcaaaaaaatattaaaattgagaccaaataa

SEQ ID NO: 78748 - DNA, 309 bp, Saccharomyces pastorianus
atgaaatctcgtcaagatatccagaaactgttctcaacttggtgcaggagaatttgctcaatttcttcactacttgcaccattggatgctacgatgcataaatacgataaaaagacattaatacgtatatataatccaaaaaaaattggcgatacgcttcaacgttgtgtcaaactcttgggtcactttaaagaaaacccagcatacattaatatagagcaatgctggttatgtaacttcgccgcccgccgccattcgaggaaaaatattcgtgtttcgagaatgcgggcaaaacgaaaatatcaataa

SEQ ID NO: 78749 - DNA, 1308 bp, Saccharomyces pastorianus
atgaaggaagagctcagcaaagtgagcagtatgcaaaatttcgagatgatccagcgtgaacgattgccaacattgtatgaagtgttaatacagaggacatcgcagccagttgatctctggactttttatacatttctttcacaattcccatatgccatcaactatctggacttttgggttgaccttatgacacatacacgactttgcaaaaactacatagagttggtaagaaaatcattaatcaactttccacaagaacaacagcagaatggaagtacatctacggctacattagacttgctgaacgcactgataaaagaagggcacctagacccggaagcacctgataaactcttagaaaatagcggcccagacgtgcccttttcaccaaaattaaacgaattgctgggtgattggaagcaccaatcgggtatcggtcaagaagccctgagaaacgaagacgtagcgctgatcgtcgacgagataatgaaaaggcgctcccaacaagacggaaaaccgcagataactacaaaacaactgctgcacagcgcagttggtctctgcaacacctatttagtatcgcccgaacaaagcgaacggtacctgagcaacatccccatggaaacgcggaaccgcataatagaaagcgtacaaatcgagcgaaagtacgacattgagatttttgacgacctaaaaaacctaacttaccaattcctagaaatggattgtttcccaaaatttctaagccgcgtcgcactacataacatccacgatgaaatatctgattggagattccactcagtgggcgtcaccaacgaaaaaagcaatcgctctcgaggccagacgcacatttctcgctcgccattctccaatcacacgtcaatcagtcgtattggctttggtttgctctggctaggcatcggcttttggatcggatatgttctaatcttcctggcgtatagtcgcgcaatccgtgtcgttacggtcgtgccattcacactgggatgctactgcattgtgtgtggcatgtatcaagtggacattgtgtattcctggtttggcgtcacacagagacttctccacagacacaaaaacgctggcaatgacgaaggagatgcttctagtggtaccgatcacgtgccaatgatacttgcggtgttcggcggcaggcgccgtcttacccgcatagagcacccatttactcggcagcttctacgtaagcgtggactgtggtgtctgcttctcgtagtgggtgccactgccgcattcacagttattttcagctgtgttcccggccgtcgtgtatga

SEQ ID NO: 78750 - DNA, 78 bp, Saccharomyces pastorianus
atgtttagcttatcgaactctcaatacacctgccaagactacatatctgaccacatctggaaaactagctcccactaa

SEQ ID NO: 78751 - DNA, 1236 bp, Saccharomyces pastorianus
atgtcctccgctccaacaaaagctactttctgtatccaaaatggtccttcctttgaaggtatatcttttggtgcaaacaaatctgttgctggtgaaacagttttcactacttctctggttggttacccagagtccatgactgatccttcctaccgtggtcagatattagtcttcacgcaacccttgattggtaactacggtgtcccatccggcgaagcccgcgatgaatacaatttgctgaagtattttgaatctccgcatatacatgtggtcggcatcgttgtcgctgaatatgcttatcaatattcgcattggaccgctgttgaatctctggcacaatggtgtcagagagaaggtgttgctgctattactggcgtagacacccgtgaactagtgcaatacttgagggaacaaggctcttctttgggccgtattacgttggctgatcatgaccctgtcccctacgtgaatcccatgaaaactaacttggttgctcaagtcaccacaaaaaagcctttccacgtctctgccttgcctgggaaggctaaggcaaatgtggctcttattgactgtggtgttaaagaaaacattatcagatgcctagtcaaaagaggtgccaatgtaactgttttcccctatgattacagaattcaagatgttgcttctgaattcgacggtattttcttatccaatggaccaggcaacccagaactatgccaagctacaatttccaacgtcagggaattactaaataaccctgtttatgactgtatccctatttttgggatttgtctaggccatcaactcttggctctggcctccggtgcctctactcacaaattgaaatatggtaatagggctcacaacatccctgccatggatttgactaccggccagtgccacattacatctcaaaatcatggctatgcagttgatcctgagaccctaccaaaggaccaatggaaaccttattttgttaatttaaacgacaaatcaaacgaaggcatgatacaccttcaaagacccatattttctacccaatttcacccagaggcaaaaggtggtcctttagacacagctattctttttgacaaattcttcgataatatagaaaaataccaattacaatctcaggcaaaaagttcaatctcactaaaagtaacatacagtaccgataaatcgagattgcagagtataaatgttactaagttggcaaaggaaagagtgttgttctaa

SEQ ID NO: 78752 - DNA, 231 bp, Saccharomyces pastorianus
atgagtactgaaaaactggaagcttcggaggaaccacaggctcccttggccaatacatctgagactaactcaataaagggagatacagaaaatattgtaaccgtgtttgacctggcaaatgaaatagaaaaatcactaaaggatgttcagaggcaaatgaaggaaaatgatgatgagttttcacgcagtatacaagcaattgaagacaagcttaacaaaatgagtcggtga

SEQ ID NO: 78753 - DNA, 729 bp, Saccharomyces pastorianus
atgataaaaaactatttgggacgaagatggctcaataatcctgcaattcaagcatatgtgaaacaaaatgctgctgtcgcccattctacggtgtttcaaggaaatctttatgaatatacggtgatgagggagttatctgagaaactacgaatgacaaagttgagaaaaaccggtggcgcccatgatggtggcgtagacataaagggaagctggccagtagatgatatttattggaaattttcatcgttaatgcccaatttggaaatggctagtaacataaaaagaacgaactcgcaaaatggcttcgtattgaaacctttaaagtataggataatcgaccatacttttgaaccattgaaagtactagtccaatgtaaggctttcactaaatcaaaattatctcctagagaattccgtgagttagtaggaacattcacctcactagtatcacatagtcaacgcaacaaaacagtatgcattatgtgttcccctcatatgttaacaaaagataccttaaatcttatcaataacatcacgcttcctctgatatatttacgtgttgagatgctgaaagagaagactgacgggcactttgacttaatcaattcaggaaaactaatcaattattacgagaattcatacgcctctacgttaatgcaagattgcaagatttctgaatggctgaagttgaagttgtacaaaaatagtgactttaattcagaaaaataa

SEQ ID NO: 78754 - DNA, 1566 bp, Saccharomyces pastorianus
atgagctcagacagtttaacgcctaaagacactatagttccagaagaacaaaccaaccaactgcggcaacctgatttagatgaggatagcatacattatgatccagaagctgatgatttagagtcattagagactactgcctcttacgcgtcaacgttggtgtcggcaaaggtgtataccaagaaggaagtaaataaaggaactgacattgaaagccaaccacattggggtgaaaatacctcgagcacgcacgacagtgacaaagaagaagattccaatgaagaaattgaaagcttcccggagggtggattcaaggcttgggttgtgacatttggttgcttcttgggtctaattgcatgctttggtttattaaactcaacgggggtcatagaaagtcatctacaggacaatcaattatccagtgaaagtgtttctaccattggttggctgttttctttgtttctttttgtttgctttgcctcatgtatcattagtggtacttactttgatagaaatggatttaggacaattatgattgtgggcacggtttttcatgtagccggtctgttcgctaccgccaactctactaaatattggcacttcatactgtcctttgccattgtctgcgggttcggtaatggtattgtactgagtcccctagtaagtgttcccgcccactatttttttaagagacgtggtactgcattggcaatggccactattggtggtagtgtgggtggcgtcgttttcccaattatgttgcgtagtttcttctctatgaagtcagacactgatccaacttatggatttgtttggggcattagaactttaggatttttagatttggctttgctaactctgtcaatcattttagtcaaagagaggttaccacatgttatcgaaaattccaaagatggtgagtcacgttggagatacatactcagagtttatattctgcaatgttttgatgcgaaggctttcctggatatgaaatatcttttttgtgtcctgggaacggtatttggtgagttatccattaattcagctcttacttattatggatcatacgccaccagccatggaatttctgctaatgacgcctacaccttgattatgattataaatgtctgcggcatacccgggagatgggttcctggctatttgagcgataagttcggtaggtttaacgtcgcaattgcaactctactcactctatttatcgtcatgtttgttggttggttaccatttggtaccaatttgacaaatatgtacgttattagtgccctatatggattttgttctggaagcgttttctccttacttcctgtttgctgtggccagatatctaaaacggaagagttcggtaaacgttactctacaatgtacttcgttgtcgctttcggtactttagtcggcattccgataacaggtgccattatctctaacaagacaacggccgattaccaacactatattattttttgcggtttggcaacttttgtaagcgctgtttgctacataatttcgagagcatactgtgttggcttcaagtgggtcagattttaa

SEQ ID NO: 78755 - DNA, 1761 bp, Saccharomyces pastorianus
atgaacaaaaccgaaaacctttctattgaggagacaaatgaaataagggaaaagctgggtatgaaacctattccagtttttcaagaaaagaatacagaccataaagagtctttgtcaatcgaagagacgaatgagttgagggcgtcccttggcctaaaacttatcccaccccaacaaaatttcaattcttctccccctaatgtacataacacatccaaaatcgatgaacttcgagagaagataacaaagtttcaaaaaaaggtgaacgctcctttacgaatggcgcaccttctcgaagaaactgatgtaaatgacgacagttcatggctagaaaacatgaatgcaattccttcctcacatgaatccaaacgttccagcacattgccaagaaaaggcgccacgaaggaagacgaaaatattgatctgcataatgttcaagtatcatataatatcgaggcgcttagtccaaagaaagatacgattctaactttgaaagagagcagtatttttgatgatactgattctaccgaagtgttagagaatgtgaaagctgccgaggaaaacgctgatagagagaaactacgattacgacaaatgaataaagatagaagacaaaaaaaaaaatttttaaatgtatctagcttagatattgaagaagaagaaggagagaaacactcacttacaactacacatctaatcatcggagcagaacagggtattatgaaggcaccgaatactatatcagcaaaaccaccaacgggaaaagttaaagtgaatttcgatagcgcaaataatatgtcagatgaagatggtggagactttaaacctttaaaaattaaaaaacgtaagatcaaggacccaagatctactaaagctaggaagtcaaaaattactgataagatggaaattgttaagttagtagatgaagatgaaagtttatcctggatggaagaagaacagccagtcaccataataaatcccagaacaagctcaaacaatgaattgaaagggccagaggacctcgctagagaaattgaaaaggcaagagacgaagagaagcgacgcactgaaagcattttgaaaatgcgtgaaatttccaacagtattgtcgtcgacgaaaaggtaacttttttaaatactttggataccagtctctccgaacgaagtgctactgagaataaagtgaaagtgcatggtgaaggagagaaaaatatcggagatattactaatgggcatactaaggaagggagtggaaacaatacactgactgaagcagttaataatgaaccaaactacgagggagatgctgaaaatgcaccgaattttttttctggtcttgcatcaacactaggatatcttcggaaaaagagtgttttcaccacaggagacgtcgatttgaaaccaggaaaggatgttaataatagtgaatcacttcgaagggatgtccgaaataaagagcatacgggcactggcacttatacaaaagataagctacaaggactggaacaattcacatctaatgactcttccaatgcaaatactcattcaaaaagacaagatcattatgatcctgacataaaactggtttacagagacgaaaagggaaatcgactgactactaaggaggcatataaaaaactgtcacagaaatttcatggtacaaaaagcaacaagaaaaagagagcaaaaatgaaatccagaattgaagcaaggaaaaatacccctgaaaatggtagtttgtttgaatttgatgacaattaa

SEQ ID NO: 78756 - DNA, 384 bp, Saccharomyces pastorianus
atgcagatgctgataccgcaaaggctgcttctgattctgaatccgattctgatgatgaagaggaagaaaagaaagaaaagaaagaaaagaagagaaagagagacgatgatgaagattccaaggattctaaaaaagctaagaaggaaaagaagaaggaaaagaaggaaaagaaggaaaagaaggaaaagaaggaaaagaaagagaagaaagagaagaaggaaaagaagtccaagaaagagaagaaagagaagaaataaggatgcattttacattttaataattggtgacccctcgcgttcccttttatttggatttagaaaattttctataattatccaatgcttaacctatttctcatttcatattttattccataatctgtaa

SEQ ID NO: 78757 - DNA, 1017 bp, Saccharomyces pastorianus
atgccatcaaatttgaatatagtgaaggttacaaaaccacaagaagaaaataagaattttttacacaaaaacacgaatgaacccaatgaaatggaacaatcgcagacacaagaagcagttacagaaaattttaccgaaaacagtaatctcagtgcaaatgaacatgcagctaggaggggtagattaaatttgaaaacagttgatcacatagaaacttatccaatagtgcaagaaacagaagagattgcaaagaagattgctctaacgagaattattttagcacaaacaaagcctagaatcgataaagtggtagtgtcacgtcccgttcaagccgtagcaccagtggtcaatttttttgacaagatggccaattcgactttaagtacagtagagcgcgttgtcccttctttgaaaacaaaaacttataaaagattaggtgaggaaattgcacttccgtatactttgtcgaaaaagtatggaaagcagctcagggatacgacagcaagaaatggagacaactatgtttaccaacctgtccatggaaggttgatgaaatttaggaagtactataatgaaaaattcatagacacaaagggcaagcctttgataagggggcaacttgaccctgttttgttaccagtcaataatacattcgaaaaggtaacggtaaagtatttgcccaaaggtaagaaagttccaaatgattccttttcttgtgagtttaatagggggctagctttagaatacaattttatgacaagagcagtttctgcagttagtcatcaagttgttggtattgcaaagcttcccattgcctatggatatcatacaaactctgtttataataaaaacttagacaaacaggccgatttaaaaatgaaaaatgtattgagaggtacttgggataccataactgatttagaacgcgaaatttgggcctctgtcaccgatagaagtttgtttagattttttggcaacaaatctgagggaggagatttaccacatctagtacaataa

SEQ ID NO: 78758 - DNA, 330 bp, Saccharomyces pastorianus
atgacaatgatacgtttttgtggcgcgcgtcaatcggcgataatcagcaacgcgtctgacgctgctgcaggaaccaacaaaaaaaggatactaaaccctcttgagtccttgtgtcttaacgaccgcatagacgaacaccgttgcaaagaagtccagttatcttcattacgaagtctattgtatgctatgattttaaatagaaccataggcagcgagaccggcgttttttcttttctgctcttttcttttcgttacttcggagaggaaagagacttattttactgcttcttctccgtctttttacttaacattacatatttattggattag

SEQ ID NO: 78759 - DNA, 111 bp, Saccharomyces pastorianus
atgcatgcccatttcgataggaaaatcttgaattttaagcccgttaccgtaaatgtcattcgatactgtttacagtttagttttaaagcggtaacattcttgttaatttaa

SEQ ID NO: 78760 - DNA, 1041 bp, Saccharomyces pastorianus
atggatgaaatgcattcttcagacacatttttgttgcgaacaccgaaatcaaaaaaaaaaaatgggcttgtaatacccagtacaccaagtaaaaaatgtaaatattcatcaggctttatagcagaagacactacgccctccaaacggtttcgtttataccaagccaaatttaagacaagttcaaagaatgtcaaagcccaaactcttagtgtatcaataaaaaaaaatcaaggtgaaatcaccaatccatttatgaccgaaggatataatgattaccggaatattgtcagtcctggattgagttttgataacgactgcttttcagaacatgaattagttagtccattgagtgatatatcttcgataaactcgacatcgcctgatgttgaaaagattgattctttagatccttttggcgttgattcttttgtctggaactgtaagccgcttgttaataaagaagcactggagctccaccgaatgattcattcttcgtttccgatgagcccactggaatccaacagtgatgtgccacttttattgcctaaactcaaaaaaaggttatctccagtaaacagatcgaccttcaagccaacaaggtacgaaccctctcaccgtctattgaagcccaaaaaatcaattctaacagtaccagccaaatctctgaatctcatagtcagttcgtcgcgaggctcattaaatgacgctaccatctttgccactgaaataaattctactttgagcaatgaagaaaacaaattaccagcaatttctagtatttgggagaagctcacaattccagtaaactcttcaattaaggagaaatacaagaagcttaaagaccaaatatatgggcaagctagtaattttggcgaagatgaagataatgaagaagacaatgaagacgaccttcccgacgcggcagtaataagaggttacgaatttcagtcaggaatgcgcgatgagctgacgcaatgtaatgaactacagaatacgaaggactacaaaaaagttcagtgggcaaaggttttagaacaataa

SEQ ID NO: 78761 - DNA, 210 bp, Saccharomyces pastorianus
atgctggttcccatgcataactcacccacggccgccaacggccgcttatcacttactgtcgccagctccggtcttagaaagggtaaaaaaaaccgggtgtatactatacactcatacatccgctcacccgtttccagtagtgaattttcattttctgtacgaaggcaatataagctgacgatccgcataaagcagaagactcatttgtaa

SEQ ID NO: 78762 - DNA, 2103 bp, Saccharomyces pastorianus
atggttgctcaatataccgttccagttgggaaagccgccaatgagcatgaaactgctccaagaagaaattatcaatgccgcgagaagccgctcgtcagaccgcctaacacaaagtgttccactgtttatgagtttgttctagagtgctttcagaagaacaaaaattcaaatgctatgggttggagggatgttaaggaaattcatgaagaatccaaatcggttatgaaaaaagttgatggcaaggagacttcagtggaaaagaaatggatgtattatgaactatcgcattatcattataattcatttgaccaattgaccgatatcatgcatgaaattggtcgtgggttggtgaaaataggattaaagcctaatgatgatgacaaattacatctttacgcagccacttctcacaagtggatgaagatgttcttaggagcgcagtctcaaggtattcctgtcgtcactgcctacgatactttgggagagaaagggctaattcattctttggtgcaaacggggtctaaggccatttttaccgataactctttattaccatccttgatcaaaccagtgcaagccgctcaagacgtaaaatacataattcatttcgattccatcagttctgaggacaggaggcaaagtggtaagatctatcaatctgctcatgatgccatcaacagaattaaagaagttagacctgatatcaagacctttagctttgacgacatcttgaagctaggtaaagaatcctgtaacgaaatcgatgttcatccacctggcaaggatgatctttgttgcatcatgtatacgtctggttctacaggtgagccaaagggtgttgtcttgaaacattcaaatgttgtcgcaggtgttggtggtgcaagtttgaatgttttgaagtttgtgggcaataccgaccgtgttatctgttttttgccactagctcatatttttgaattggttttcgaactattgtccttttattggggggcctgcattggttatgccaccgtaaaaactttaactagcagctctgtgagaaattgtcaaggtgatttgcaagaattcaagcccacaatcatggttggtgtcgccgctgtttgggaaacagtgagaaaagggatcttaaaccaaattgataatttgcccttcctcaccaagaaaatcttctggaccgcgtataataccaagttgaacatgcaacgtctccacatccctggtggcggcgccttaggaaacttggttttcaaaaaaatcagaactgccacaggtggccaattaagatatttgttaaacggtggttctccaatcagtcgggatgctcaggaattcatcacaaatttaatctgccttatgcttattggttacggtttaaccgagacatgcgctagtaccaccatcttggatcctgctaattttgaactcggcgtcgctggtgacctaacaggttgtgttaccgtcaaactagttgatgttgaagaattagattattttgctaaaaacaaccaaggtgaagtttggatcacaggtgccaatgtcacgcctgaatattataagaatgaggaagaaacttctcaagctttaacaagcgatggttggttcaagaccggtgacatcggtgaatgggaagcaaatggccatttgaaaataattgacaggaagaaaaacttggtcaaaacaatgaacggtgaatatatcgcactcgagaaattagagtccgtttacagatctaacgaatatgttgctaacatttgtgtttatgccgaccaatctaagactaagccagttggtattattgtaccaaatcatgctccattaacgaagcttgctaaaaagttgggaattatggaacaaaaagacagttcaattaatatcgaaaattatttggaggatgcaaaattgattaaagctgtttattctgatcttttgaagacaggtaaagaccaaggtttggttggcattgaattactagcaggcatagtgttctttgacggcgaatggactccacaaaacggttttgttacgtccgctcagaaattgaaaagaaaagacattttgaatgctgtcaaagataaagttgacaccgtttatagttcgtcttaa

SEQ ID NO: 78763 - DNA, 642 bp, Saccharomyces pastorianus
atgaactacagcgcagactctggtaatacagtttatgtggggaatatagatccaaggataacgaaagaacaactttatgaactcttcattcagatcaaccctgttttaaggattaagtatccgaaagataaagttctacaagcttaccaaggctacgcattcatcgaattttataatcaaggagatgctcaatatgcaataaaaataatgaataataccgttagattatacgaccgactgataaaggttcgtcaagtaaccaattctacaggaacaactaatttaccttcaaatatttctaaggacatgattctacctattgctaagttgttcataaaaaaccttgcagattcgatagatagcgaccaattagtgaaaattttcaataaatttggtaagctcataagggaacccgaaattttctacctatcaaacggaaaattaaagtgtgcttatgtttattttgaggactttgaaaaagcagatttggcaataaaatctttgaacaatcagttagtcgccaacaacagaattactgttgattatgccttcaaagaaaatggaaaaggtaacgcaaaatacggtgatgacgttgacaggctgttgaataaagaagcattaaagcacaacatgttgaaataa

SEQ ID NO: 78764 - DNA, 1476 bp, Saccharomyces pastorianus
atgaggttgatatccaaaagaagaatcagatttattgtgtttattttgttcggcgtcctcactgtattcgtagtatcaagacttgttgttcattttcagtataaccaagaaataaagttctataaaaagtattttcaacagaggaaggatgggcttcacgaaatttacaacccattagaaatcaagcaaatacccaaggaaacgatagatgacttatataccgcccgtttagataaagagttgaaaaacggtgaggtcatcgagtggtccaagtttgcatacgtgaattatgtgactaatgctgattatctttgtaatacgctgatcatatttaatgatctgaaacaggagtttgagacaaaggccaagttagttcttctgatatctaaagatctgctagacccaaacacttcctcaaatgtggcttacattagttcactccttaacaagattcaagctatagatgaggaccaggtagttatcaagttgatagataacattgtgaagccaaaggatactacaccttggaatgaaagtttaacaaaattactagtatttaaccaaacagaatttgaccgtgtgatttatcttgacaacgacgcaattttaagatcaagcttggacgaattatttttcctaccaaattatatcaaatttgcagctccattaacatactggtttttatctaacagtgatttggaaaaatcataccatgaaacgcgacaccgtgaaaagcaaccaatcaacctccagtcgtatacaaaagtgctgactaaaagaattgggaaaggccagatgatttataatcatttgccgagtttgccgcattcattgtacttgaattctaataacatagctcaggacattataagttctacatcatctttatcgccgttatttgatttccaaagtagtaaaaaggttggaaaattaaaatttgcttctaatttaatggttattaatccctcaaaggaggcgtttgatgaaattgtgaacgttatgctgcccaagattttaaacaagaaggaaaagtacgatatggatttgatcaatgaagaaatgtacaatttaaagaagattatttataaacagtttattttcttcagaaaagtccgaaaacttttcaaaccagaagtattggttttgccatttgcaaggtacggcttactgacgggttcattgagaaacccacggcactattctataatctataatgacgttttgggttataagacattggataatgatggcaacgatattccggtaggattaaacgacagtgtcgcatattctaagtacatacatttttcggattatccattggccaagccctggaattatccatcaatgaaggagtttgaatgtatcgttaaagaagaagacgcggaggattcaaagctagagcaccaagcttgtgacctttggaactcggtgtacgcttcttacatacagtccagggaaatctgcctcgtttga

SEQ ID NO: 78765 - DNA, 2457 bp, Saccharomyces pastorianus
atggcatttccacgtcttacatctactcatcagtccaatcataacggctacagtaatagcaacaaaaaaggacaaagtcttccactaaccctttctattgatgtagaatcaccgccatgtgttctttatgggtctgctatggaatcctcaggtgctgtgctaagtggactttttactgtgacggttgtcgatccctacagtagtgctgaagataaatctttaaagaatacagaatctaatgtgtcgacgacttctaaaagcctaaaaagaaagagtacatttggttctgcactttcatctagattgtccagcttgtcagcgtcgacgtcaaatatctctccttcaacatcttctacatccatatcgcattctcccacgcctgctaatttaagaataatggctggttataccaagatcaccattacgtcggtaacactaagtttggtacagaagatccatttccataaaccctttgtgcctaatatttcctcaatgcaaacctgtatgaactgtaaaacaaagattacaaacatgaaaagctgggaaattcagagtaatacccaggatctttctgttggaagccactcttacccattttcctatcttataccggggtctgtcccatgttcttcatcgctaggtgctacggctgaaacccaggtcaaatacgaacttatcgctgttgtgacgtatatagatcctcatagaaattccttttcttccggtcattctactcccaggaaagaaggaagctcttctaagaagcggttgttgcaactagcgatgcccatcgccgtgactcgaagtataccgcgcgggcctgataagaattctctaagagtatttcctcctacagagttaactgctgctgctgttcttcctaatgttgtatatcctaaatctacttttcctttggagatgaaattagacggtgtttcttcgggggataggagatggcgaatgcgtaaattgagttggagaattgaagaaactacaagagttaaagcacatgcttgtccagtgcacaagcatgaattgaggcagttagaagagcaggttaaaataaaagagtcagaaaaaagtaaaaagccacgcagtcatattaagcgttatggtgaactaggcccacaaatccgggttgcagtaaactctttagaaaatatgccgtcgcaaaggcttccaggcgagcccggtcgtgaacaagcacctaattcttcgggtccagcgtcaactggtaatgttggacttgatgatgaaaatcctgttaatgaagatgaggaagaccaacccggtagcgaattcatccatcccagtgacgacgctttgcgtcaggagttactaatgcagcaacaacgcgcaagacaacaacaacttcaacaagagctgaaaaacaacagtagtttatttacggaagaggttcggataatatctaagggagaaatgaagagtggatggaaaaccgattttgacgataatggaaagattgagctagttacagaaatagattgtatgggacttaattcaggcgtctctaatccggtaatgcatgcatcgacactacaaactccttccacgggcaataagaagcccagcatcaatgtggcttgcgatatacaggatccaaatttaggtttgtatgtaagccacatcttggcagtggaaatagttgttgcagaagaaacattgcaatatgccgatgggcaacctatacggaaaccaaactccaaaaacaagaaagaaactaataacaatacgatgaatgttcataatcctgatcaacgcttagctgaattatctccaatttttgcaaatagaaatacaccgaaagtacggcgcatggggcctgaagatataacaccggtgaatagtaataagtccaaccatagtactaataaggagaaggcatctaacggtgctagtagctctaatatagtgagtgttcccactggtgcagcacgtgttttaagaatgcaattcagattaacagtcactgaaagatctggacttggaatctcctgggacgaagaagttcctcccatttaccaagatgtcgagttgctctcgccaccatgttacgagctctctataaataatggaatcaaaaataaactttattcaacaatgagtactcctgttagatcagaggatgattttgtgggcggcagcgatgaagatattgggaactatgagagccaagggctcgaacctggtcctaacgtacaggaagtaacgatcacacaaaataaattaacgataccaccaaccgcacatcactaccagcctgcttcctcttcgcaaagatcccttaccacagtacagtcaccaccactggaaagtgttgttagtgtccagggtagtgtaccttttcgtggacatgtgttgacaccacatagcacaagagatatcagaatacaaaacttttccgattttctagattccaatagaataacccagtag

SEQ ID NO: 78766 - DNA, 1371 bp, Saccharomyces pastorianus
atgtccagttcacaacaaatagccaaaaatgcccgtaaagcagggaatattttgaaaaccatctcaaacgagggcagatcagatattttatacaaaattcacgatgccctgaaggctaatgcgcatgccattgaagaagcgaataaaatcgatttagctgttgccaaagagactggcctagcggattctttattgaaacgtctcgacctatttaaaggggacaaatttgaagttatgttacaaggtattaaggatgtagccgaactagaagaccctgttggcaaggttaaaatggccagggaattagatgatggcttgacgttgtaccaagtaaccgctccagtcggcgtgttgttagttatctttgaatcccgcccagaagttattgccaatattaccgcattgagtatcaagtctggtaatgctgcaattttgaagggtggtaaagagtctgtgaacacgttcagagaaatggcaaagatcgttaacgacaccattgcacaattccaaagtgagactggtgttcctgtgggctctgtgcaattgatcgaaaccagacaggatgtttccgacttgttggatcaagatgaatacatcgatttagttgttcctcgtggttccaatgccttagtcagaaaaatcaaggacactacaaaaattcccgtgttgggtcatgcggatggtatctgctcaatttacttggatgaagacgcagatttgattaaggcaaaaagaattagtttggatgcaaagactaactacccagctggttgcaacgctatggaaacgttgttgattaacccaaaattctctaaatggtgggaagttctggaaaacttaactttggaaggcggagtgactatccacgctacaaaagatttgaaaactgcgtattttgataaactgaatgagttagggaaattgacagaagcaattcaatgcaaaaccgttgatgctgatgaggagcgagattttgataaggaatttttatccttggatttggctgccaagtttgttacatctacagaatcggccattcaacatataaatacacactcttcgagacataccgacgctattgtaacggaaaataaagcaaacgctgaaaaatttatgaagggtgtcgactcctctggtgtttactggaatgcatcaactagatttgccgatggtttcaggtacggttttggtgctgaagtgggtatttctacctctaagattcacgcccgtggtccagttggcttggacggtctggtgagttatcaataccaaataagaggtgacggccaggttgctagtgactaccttggtgctggtggtaacaaagcttttgttcacaaggatttagatataaagactgtgacattataa

SEQ ID NO: 78767 - DNA, 1809 bp, Saccharomyces pastorianus
atgaacttgctaattgaccggatggagaatcccggatcgaggaactgtaccctgttacctccttcattcccaagaggcttttgtaagggaagaagggcttccagtggcgacgcagtgaagataaaagaatccggtctacagccgcagccgcagccggaacctctacaagctaaaacaaatgttgcacacttttcgaaatcatcttctagattacctgtcatagcagtgaatgataatccggtggtcccaagaccaagcactgaagtaaacttgggatcgttgttacaaaaggaaagggagaaagaaaaggaggaacagcctgcgctgcatgataggagacatttatatgtgacaaagaatagggcacatggggtacgacaacgttcattggaaatgactagcttacctgtcctgggatcgaccaaaaccgggaagtttagcgattttttgtttgaagatgacatcgataacagagtaggtcgacacagtagatcatatagtggggcatccagtttggatgatccattcagagtgtcgccgaaaaccgacttcaactctaatagggccagattgtcttgccttagtaaaggacgtcgtggttcgatgttcgttttccaaagctgtcatactgggctagctttcaatcaaatacagggttcctcctcttcgcaacgtagatcatccgctggttcttttgattatgagaggaaacgattggttaaccaatttttacagccttctttgggaaattcagacccatttgatacgttgagggagtcggtagtgtttgagccctcatccaccgctggcggcattaaattagggaatatgcattctcaatcacaaatttccgtaaactcctcccccagcacatctttgttttatcatgatttggacggttctgctgtcaacgattcttcgtcatttctgtattcccgttctaatgtaccagcatttttgtcgtcatcagccttttcgtccacgtcatccacctcatcagattcagaagatgtggatagaagaagtttaaacggtgtatatccctctttaggatatttgactaaccagaggaaaccaaggaattcatcaggctcttccactgcacctggcaccgataccttgggatttaagtatttactgaataggcagaagtcagcggattcttccactaggttcaagagtgtactgaaggtgaacaataataatggctccgcagccactcctgattctagctcaaactctatttcgaagagcaactcaaatttgaatgataacattgatgaattgaattattatcaaaatcatatttcgacacttctagtgaagatcgagaatgagatgagaagaaatttaaacgatacaataatcaagaatgaaaacaacgttcaaaaaactatccaaaagtatgatcttctatcaggagagttaacccttttattagacgaaatgaccaccttgcgaaccacggtgattgatcaattcttggtcaagttgaaatcagactttgacgaggatgacaataaggcgtttattaatgaattaaagatatcagtcgaagaaagtgtagcgcaattacaaggattggaaaggagaatggaggtttgccaagaaagattaaataaacataagtcctctctaagggaaatggatagtttgatagagctgaaaaacgtgttaaataaatcgaagaacaacacgaaatccatctacctgtataggtatttcatcattgacattattgcatttcttttgatgggcggctttatcgtttacgtcaagaatttgttaactcgtttttttactcgttaa

SEQ ID NO: 78768 - DNA, 474 bp, Saccharomyces pastorianus
atgtcatcttcaaacaaaaaatcgctaaacttcccggttttggtcgatcccaggacaggtaagctagtcatttccaatgaacgttgtcgtaccccatgtgccctattctttgtcacatataaatgtctcctatcatgcagcgcaggctgttcctccttttctttctccctttccttttgtaacaacgatcccaagtttacttcagtgcttggtcttgggaccaccggattatcattcactgctatgacaggtaatctagaagatgatttcgaaaagtgtgcaacatttgttttagcttgtagaggttccggctgcggctgcggctgtagaccggattcttttatcttcactgcgtcgccactggaagcccttcttcccttacaaaagcctcttgggaatgaaggaggtaacagggtacagttcctcgatccgggattctccatccggtcaattagcaagttcattttcacttaa

SEQ ID NO: 78769 - DNA, 4725 bp, Saccharomyces pastorianus
atgtcttttgaagtgggtacacgatgctggtatccccataaagaattgggctggattggggcggaagtaatcaaaaatgagttcaacgacggcaagtaccacctggagttacaattggaagacgatgaaatcgtgtccgtggacacaaaagacttgaataacgataaggaccaatctctaccgcttcttagaaaccctcccattttggaagcaacggaagatttgacctctttatcttacttgaatgagccagctgttttacatgccatcaaacagcgctattctcaattgaatatctacacatactcgggtattgttctgattgctacaaacccttttgatcgtgtcgaccagctttatacacaagacatgatccaagcatatgcgggaaagcgcagaggtgaattggaacctcacttgtttgccattgccgaagaagcgtataggttgatgaaaaatgacaaacaaaatcaaaccattgtggtaagtggtgaatctggtgctggaaaaacggtttctgccaagtatattatgcgttattttgcttctgtagaagaggaaaattccgctactgtacaacatcaagtggaaatgtcggaaacagaacaaaagattctagctacaaaccctatcatggaagcatttggtaatgctaagactaccagaaatgacaattcttccagatttggtaagtatctagaaattttattcgataaggacacatctattattggagcaaggatccgcacatacttgttggaacggtccagattagtttaccagccgccaattgagagaaactaccacatattttatcaattaatggctggattaccagctcaaaccaaggaggaattgcatcttaccgatgcctcagattacttctacatgaaccaaggcggtgacaccaagatcaacggtattgatgatgccaaagaatacaaaattacagtagatgcattgacattagtcggaatcaccaaggaaactcaacaccaaatatttaagatcttggccgcacttctgcatatcggtaacatagaaattaaaaaaactagaaatgatgcatcactatcagctgatgagccaaacctgaaactggcgtgcgaattgctgggaattgatgcctacaactttgccaaatgggtcaccaaaaagcaaatcattacaaggtcagagaaaattgtttcgaatctaaattataatcaagctctggttgccaaagattccgtggctaagtttatttattccgcccttttcgattggcttgtggaaaatatcaacaccgtgttatgcaacccggctgtgaacgaccaaattagctcatttattggtgttctggatatttatgggtttgaacattttgaaaaaaattcatttgaacaattttgtattaactatgccaacgaaaaactacaacaagagttcaaccaacatgttttcaaattagagcaagaagaatacgttaaagaagaaattgaatggtcttttatagagtttaatgataatcaaccttgtattgatctgattgaaaacaagttgggtattttatcactgcttgacgaagaaagtaggttacctgctggttccgacgaatcttggacccaaaaactttatcaaactttggataaatctcctacgaacaaagtattttctaaaccaagattcgggcaaactaaatttatcgtgagccattatgctctagatgtcgcttatgatgtggaaggatttattgaaaaaaatagagacaccgtatctgacggacatttggaagtgttgaaggcttctaccaacgagacactaataaatatcttagagggattagaaaaagctgccaaaaaactggaagaagcgaaaaagcttgaattagagcaggctggcagtaaaaagccaggtccgataagaacggttaacaggaaacccactttaggttccatgtttaagcaatctttgattgaactaatgaataccatcaactcaactaatgttcattatattcgttgtataaagcctaatgcagataaagaagcttggcaatttgataatttgatggtgttgtctcaactcagagcctgtggtgttttggaaactattagaatatcttgtgctgggtttccttctaggtggacttttgaagaatttgtattaagatattacatcttgataccacatgagcagtgggacctaatcttcaaaaaaaaggaaactacagaagaagatatcatatcagtggttaaaatgatcctagatgctactgtaaaggacaaatccaagtaccagattggtaatacaaaaattttcttcaaagcaggtatgcttgcatatctggaaaaacttagaagcaataagatgcataattcaattgttatgatccagaagaaaattagagctaaatattaccgtaagcaatatttgcaaatatctcaggccatcaagtatttacagaacaacatcaaaggtttcatcattcgtcaacgcgttaatgatgaaatgaaagttaactgtgcaactttattacaggccgcttacaggggtcattccatccgtgccaatgtgttcagcgtattgagaacaattacaaatttgcaaaagaaaattagaaaggaactaaaacaaagacaactgaaacaagaacatgaatataatgctgcggtaactattcaaagtaaagttaggacctttgaaccgagatcgagatttttacgcactaaaaaagacactgttgttgttcaatctttgatcagaagaagagctgctcaaagaaaattgaaacaattgaaggcagacgctaaatcagttaatcatctgaaagaagtgagctataaattagagaataaagtgattgaactaacgcagaacctagcatccaaggtcaaagaaaataaagaaatgacagaaagaattaaagaactacaggttcaagtggaagaaagtgccaagttacaagagacattagaaaatatgaaaaaagagcacttaatagatattgataatcagaaatctaaggatatggaattacaaaaaactattgagagcaatttgcaatccactgaacaaactctaaaggacgctcaattagagttggaggacatggttaaacaacatgatgaattgaaagaagaatctaaaaagcaacttgaagaattagagcaaacaaagaaaacattggttgaataccagacattaaacggagacttgcaaaacgaagttaaatctttaaaggaagaaattgctaggttacaaactgccatgtcgctgggcaccgttactactagtgtactacctcaaacaccattaaaggatgtaatgggaggcggtgcttcaaatttcaacaatatgatgcttgagaattccgacttatctcctaatgatttgaatctaaagtctagatctactccattgtccggaaacaaccacattgattcattgagtgtcgatcgcgaaaatggtgtcaatgctacacaaatcaatgaagagttatacaggttattggaggacactgaaattttgaatcaagaaatcacggaaggcctgttaaagggattcgaagtaccggatgctggtgtagctattcaactaagtaaaagagacgttgtttatccggctagaatactgattatagttttaagtgaaatgtggagatttgggctgaccaagcaaagtgaaagctttcttgcccaagtattgactacaattcaaaaagttgtcactcaattgaagggtaacgatttaattccaagcggtgtattctggttagcaaacgttagagagttatactcatttgtggtatttgctctaaactctattttaaccgaagaaacgttcaaaaacggcatgaccgatgaggagtataaggagtatgtttcattggttacagaactaaaggatgatttcgaagctctaagttataatatatataacatttggctgaagaaattgcagaagcaattgcaaaaaaaggccatcaatgctgtggtcatctccgaatcattaccaggtttcagcgcgggagaaaccagcgggtttttgaacaaaatttttgctaacactgaagaatatacaatggacgacattttgacctttttcaacagcatatactggtgcatgaaatcttttcatattgagaatgaagtgttccatgctgtagtcacaaccttattgaattatgtggatgcaatttgttttaacgaattaatcatgaaacgtaatttcttgtcgtggaaaaggggtcttcaattgaactacaacgttactagattagaggaatggtgcaagacgcatggcttgacagatggtactgagtgcctacaacatttgattcagaccgctaagctactgcaagtccgtaagtatactatcgaagacattgatatcttaagaggaatttgttattcgctgacacctgcacaattgcaaaaattgatttcacaataccaggtggcagactatgagtctccaattccacaggaaatcttaagatacgttgctgatatagttaagaaagaagctgcgttatcttcatcaggtaatgattctaagggtcacgagcatagcagcagtatatttatcactccagaaacaggtccattcactgacccattcagtttgatcaagacaagaaaatttgaccaagtagaagcctatataccagcgtggttatccttgccctcaactaagagaatagttgaccttgttgcccaacaagtcgttcaagacggccactaa

SEQ ID NO: 78770 - DNA, 348 bp, Saccharomyces pastorianus
atgtcgtcatcagtgccatacgatccatatgtgcctccagaggagagtaactcaggcgcaaacccaaattcccaaaacaagactgctgctttgagacaagagattgatgacacggtgggaataatgagagataatatcaacaaggttgctgaacgtggtgaaaggctaacatccattgaggacaaagctgataacttggctatctccgcacaaggattcaagagaggcgccaacagggtcagaaagcaaatgtggtggaaagatctaaaaatgagaatgtgtctattcttagttgttattattttactagtggtaattatcgttcctatcgtcgtccatttcagctaa

SEQ ID NO: 78771 - DNA, 2619 bp, Saccharomyces pastorianus
atgtcgtttgattggcttaatgttccgggattggacttaagcagcggggaccaagcagaaaagaggccatcgaatggattaggaccacccagtgtgtcttttgattttggtataaatactgctgctccacatgattccagcttttgggatcagggatcaagaagtcacagtgatacaactttgtcttacagaaataatcacgcaaatacagcagctgataatgccactaacgtgagctctcctcaaaaggataatccacctaatggggaggtacgaacactttctggaggcgatgtgtacgcggagtcaccagaagacatgcaagtcccattgtctttatcacaaaaccaacttacccatgaagaaataaggacatatctaagatggtaccactatatatgtttgagaacccatggaaaattagtaagattgaacgacgtgtttaggttcttgaccaattttaatttatcacaaaaagtaaaagatagaattgtggaaattttccgtagctgtaaaaatgcgttaaatattggtcaatttttcgctgttttaagattagtttctagagctattatatatggcatcttacctctaagacgcatgatcttggaaaaggcacctgttcccaaaccacgtcctatcctaagtagtgagaatcacgaagaggtgtacgaggaggtggaagacgatgatagttctgccaaaactggtgatcaaaaggtcgattttgactcatttgcttcattgctgttgactggtaagacaacgagaaaaagagtcaggagaagaatcaaaaatttgaattttaagagtaagaaggttaggttttcagagcatataacatttcaagaccctccaaacctcaatcaagaatcatctaataatagtgaagcaagaaagcaagatcctgatgcagacaatgaagatcaggattctaataatgacagtcctttggatttcacattgcccatggatcaattattaaagaggctatataagcggagaaaaaacagcggattagtttcgagtttgcccagcgaacaacaagaaactgaggaggagaagaaagttttggaggatatgaaggattccttgtcccatttcaaacaaatacagactgttgattctgcctcattaccaatttcatcggtatttttacagaatggcaatactctaccaactagcaatgtgaataacaccgctgttccacagcaaattccgttagaacctttgaagccaaccgccacaggttctgctaatcacctggtgcgagaagaatataatcaggggttgcatccaagcaacggtgccatccaaacaggtttacaacctttaaaaccaacagcaacgggatctgcaaattatttgatgcgaagtcatatggaacaacctcagtctatcaaaccttcgagtacaccagaaacagttacaaactctgggggacttcaacctttgaaacctaccgccacaggttctgcaaattacttgatgaaacagcatatctcaccttcagttaataacccagtatcttcgatgtttcaggcgcaatttacgaaccaatcttcatctccacaaagtacaggaccagcatttctgaattctccgaacattactcttcctcaaagcaatcaacagcaaccttaccaagaggttaattcgactcaagcgaaaattgaaccatctaacatatcccctcaacacacctactctaacaatgttcggattaataatggtaacatcgtatccatgccgaaagtagaaataactggtgcattcccccctcaaaacactcttcctcaacatcagcaatcgcatttgctttctcctcaaaatacgatcccgcagcaccaacggtcgcaattgatatctccacaaaataccttcactcaaaatcagcccattctttctccgcaacatacttattccaataatcaagcaacaatgatatccccccagaatacgtatactaataatcaacagcagccccaacatcttccacctcctccacctccacgcgctcagcagcagcaacaaggggccattgtgccacctcaacatatgtactctaacgtgcaaaagcagaataacttggtgccgacccaaccctcctatacaaattcaccaagcatacaatctccaaattttttgtcacctcagaatgctgctaatagttactttcaatctttactttcttcttcaccatctccaaatcctacgccatcaaatgcgtctactgttaatggcaataatgccagtaatggcataagttcattccaaaatactagtgcggcaatgaacaatactcaatctcatcagacgtatattcagcagcaacaacaacaacaaactcaacaacgaatatatggtggccaactttctcaaatgcaacaacatccggggcaacttcacttaaacaacagtgatatacatagccaacctaacaagcctaattacggaatgctagggcagcaagttcatcaacagcagcagcaacagcagcagcaatttccattcactgcagatgttaatagatccaattcaagcgatattttgggtaacttgcagtcattgcagcagcaagtcgatgctttacaaatccaatataataggagaccatag

SEQ ID NO: 78772 - DNA, 210 bp, Saccharomyces pastorianus
atgtttcgttaccatgtaaaatttatcgagcctgcaatgatctataaaatcttagctaacgagaagatgcagataatttgggttttgaattcctattttgaattctaccttttgttttgtccccgtttcctaatgttaactctttttctaataggggcaacttacttttgttttctcatttggcgaaaaaaagtaagtagaaataaataa

SEQ ID NO: 78773 - DNA, 3843 bp, Saccharomyces pastorianus
atggactacgaaagaacggttctaaagaagaggtcgagatggggattatatgtagttgttgagcaacgagggacaagtatgacgaaattgatggttagatctgaatgcatgctgcgaatggtgcggcggcggccgctgcgtgtgcagttttgtgctcgatggttctccacaaagaagaatgccgcagaagcacccaggattaatcctgtggggatacagtatttaggtgagtctttgcaaagacaggtatttggtagttgcggtggtaaagatgaggtggagcaaagcgacaaactgatggagttatcgaaaaagtcgctaaaggaccatgggttgtgggggaagaagacgctcatcacggatccaatatcgtttcctctgccgccactacaaggcaggtcgctagatgagcatttccagaagattgggcgtttcaattctgaaccgtacaagagtttttgcgaggacaagttcacggagatggtggcacgaccggcggaatggctgcggaagccaggctgggttaaatacgtacctggaatggcacccgtcgaagtggcatacccagacgaagagctggtggtgtttgatgtagaaacactctataacgtctctgactatccgactttggccacggccttgtcatcgacggcgtggtacctttggtgttcgccgttcatatgtggtggtgatgatcctgctgcgctgatacccctaaacacattgaataaagagcaagtagtaattggtcacaatgttgcgtatgatagggcacgggttctcgaagaatacaacttcagggactcgaaggcgtttttcctcgacactcaatctctgcatattgcatctttcgggctgtgttcaagacagcgtccgatgttcatgaagaataacaagaaaaaagaggcagaagtggaatcggaagtacatccagaaatttccatagaagattatgacgacccttggttaaatgtgtctgctttaaactcgctaaaggatgtagcgaaatttcactgcaagatagatcttgataagactgatagagatttctttgcttccacagataaatcaacgataatagaaaatttccaaaaactggtcaactactgcgccactgacgtaacggccacaagccaagtgtttgataagattttccctgttttcctgaaaaagtgtcctcatccagtttcgtttgcaggtttaaagtccttaagcaaatgcattctgccgacgaagctaaacgactggaatgattacttgaacagctctgaatctttgtaccaacagtccaaagtccaaatagaatccaagattgttcaaatcataaaagatatcgtcctgttgaaggacaaaccagatttttatctcaaggatccctggttatcacaattggattggaccaccaaacctttaagattgacaaagaaaggtgttcctgcaaagtgtcaaaagctgcccggctttccagaatggtatagacaactttttccctcaaaggacactgtagaacctaagatcactattaaatcaagaataattccgattttgttcaagttatcgtgggaaaattcccccgtaatatggtcgaaggagtctggatggtgcttcaacgtgccccatgaacaagtagaaacatacaaggctaaaaattatgttttggcagatagtgtatctcaagaggaagaggaaataaggatgaataacctaggattgcaatgcacaggtgttcttttcaaagtacctcatcctaatgggcccacttttaattgtactaatcttttaaccaaatcgtataaccatttttttgaaaagggcgtactaaaatctgagtcagaattggctcatcaggctttacaaattaactcttcaggttcttattggatgtcagcaagggaaagaatccaatcccaatttgtagtccccagttgtaaattccctaatgagttccagtctttgtccgcaaaatcgtcgttaaataatgagaagacaaatgatcttgccataattataccgaaaatcgtccccatgggcacaatcactagaagagctgtggaaaatacgtggttaaccgcatccaatgcaaaagcaaataggataggttccgaattgaaaactcaagtcaaagctcctccaggttattgttttgttggggcggacgtggatagtgaggaattgtggatagcatctttagtcggtgactccattttcaatgttcatggtggtaccgccattggttggatgtgtttagaaggcactaaaaatgaaggtacagatttgcacacgaagactgctcaaattttggggtgttctcgtaatgaggcgaaaatttttaattatggtagaatttacggcgctggtgctaaatttgcgagtcagttacttaaaaggtttaacccatctctaactgatgaagagacaaaaaaaattgcgaataagttatatgaaaatacgaaaggtaaaacgaaaagatcaaaattattcaaaaaattttggtatggtggatctgagtcaattctattcaataaattagaaagcatcgcggaacaagaaactccaaagacaccggtactgggatgtggtattacctattcacttatgaagaaaaatctgagggcgaattcctttttaccttcaagaatcaattgggccatccagtcatctggagtggattatctacatcttctttgttgctccatggaatatattattaagaaatataaccttgaggcaaggctttgcatttccatccatgatgagattagatttttggtgagcgaaaaggacaaatacagagctgctatggctttgcaaatcagcaacatatggacgagagcaatgttttgccagcaaatggggataaatgaattaccgcaaaactgtgcctttttctcgcaagtagatattgattctgtcatacgtaaagaagtcaatatggactgcataaccccctcgaacaaaaccgccattcctcatggggaggcgcttgatatcaatcaactgctagacaaacccaatagtaaattgggtaaaccaagtctcgatatcgacagcaaagtatcacaatatgcctataactacagagaacctgtatttgaagaatataataaatcttatactccagagttcttaaaatattttcttgcgatgcaagtccagtcagataagcgcgatgtgaatcggctagaagatgagtatctgcgggagtgtacatccaaagaatacgctagagatgggaacactgcagagtacagcctcctagactatataaaggatgtcgagaagggcaaaaggactaaagtacgtattatgggatccaattttttagatggtaccaaaaatgccaaagctgatcaacgaatcagattacctgtcaatatgccagattatcccacacttcataaaattgctaacgattcagcaatcccagaaaagcaattgctggagaacaggagaaagaaggagaacaggatagatgacgaaaataagaaaaaattaaccagaaaaaagaataccacgcctatggaaaggaagtacaaaagagtgtatggtggcaggaaggcatttgaagcgttctatgaatgtgcaaataaaccattagactatactttggagacagaaaaacaattctttaatattcctatagatggagtgattgacgacgttctgaacgacaaatctaattataaaaagaaaccatcacaagcaagaacggcatcatcatcgccaataagaaagactgcgaaagcagtacattccaaaaaattgccggcaaggaagtcaagcactacaaatagaaatttggttgagctggaaagggacattactatttctagagagtactag

SEQ ID NO: 78774 - DNA, 702 bp, Saccharomyces pastorianus
atgtcctccgctattactgctttgacaccaaatcaagtgaacgatgaattgaacaagatgcaagctttcatcagaaaggaagctgaagaaaaagcgaaggaaatccaattgaaggctgaccaagagtacgaaatcgagaagaccaacatcgtaagaaatgaaaccaacaacattgacggcaacttcaagagcaagttgaagaaggccatgctttcgcaacagattactaagtcaacgatagcaaacaaaatgaggttgaaggttctttctgctcgtgaacagtcgctagacgggatattcgaggaaaccaaggaaaagttgtcaggaattgccaacaaccgggacgagtacaagcccattttgcaatcattgatcgtggaggctcttttgaagttgttggaacctaaggcgattgtcaaggctcttgaaagagacgtcgatttaatcgagtcgatgaaggacgacattatgcgtgagtatggggaaaaggcccagcgcgcaccattggaagagattgttatctccaatgattacttgaacaaagaccttgtttccggcggtgttgtggtctccaatgcatcagacaagattgaaattaacaacactttggaggaaagattgaaattgttaagtgaagaggcattgcccgccatcagattggaattgtatggtccttccaagacaagaaagttctttgattga

SEQ ID NO: 78775 - DNA, 417 bp, Saccharomyces pastorianus
atgacaatacagtttggcttacacatgatggttggaataatatcaatagaggagttatctattttcctcaggtctctggggaaaagggaatgttcagttaaaaaggaccatttaggaaacttctcggacattgagataatatttcccttagaattgaataccgtacacgaaatgaacagtgaatcagaggcagaaatgggcttcaacgatagtaactgtttccgcaatatggtgctgttggtgtttgcagcagtggatgtgtcagcatactttctaagaaatggcgtgtttggtcttccaaaagttattctcgacaaaggttggaaacaagatatagaacgtaccaggagacgccgattcatgagatgcttgattgaaaatcactttcactacgattgcgtataccgttactgttag

SEQ ID NO: 78776 - DNA, 1413 bp, Saccharomyces pastorianus
atgaatcggcgtctcctggtacgttctatatcttgtttccaacctttgtcgagaataacttttggaagaccaaacacgccatttcttagaaagtatgctgacacatccactgctgcaaacaccaacagcaccatattgcggaaacagttactatcgttgaagcccatttctgcctctgattcactgttcatttcgtgtacggtattcaattctaagggaaatattatctcaatgtccgagaagtttcctaaatggtcctttttaactgaacattcccttttccccagagacctgaggaaaatagataactcctctattgatattattccaaccatcatgtgtaagccaaactgtattgtcatcaacttattgcatatcaaagctcttatcgaacgagataaggtctacgtcttcgatacaacaaacccttccgccgctgccaaactgagtgtacttatgtatgacttggagtctaagttgtcctccaccaagaataactctcaattttacgagcatagagccctcgagagtattttcatcaacgtaatgagcgcactggaaacagatttcaagcttcactcacaaatctgtattcaaatcttaaatgatctggaaaacgaggtcaatagacttaaactgcggcatcttttaattaagtccaaagatcttacgcttttttaccaaaaaactttattgattagagatctattagatgaactattagaaaacgacgatgatttagcaaacatgtacttgacagttaagaagtctcctaaggacaatttttcggacttggaaatgcttatagagacgtactacacccaatgtgatgaatacgttcagcaatcagaatctttgattcaggatatcaaatctactgaagaaattgtcaacatcatattggacgcaaatagaaattccttaatgttgttggagttgaaagttaccatctacacgttgggattcacagtagcatctgttctgccggcattctatggtatgaatttaaagaatttcatcgaggaaagcgaatgggggtttacttcagtggtggtattttctattgtgtctgccctttatatcaccaagaaaaattttaattctttaagatccgtgacaaagatgaccatgtatccaaactcacccgcaaactccagtgtgtatcctaaaacatcagcgtctattgccttgacaaataaactaaagcgaaggcggaagtggtggaaatcaaccaagcagcggttgggagtgctactttatggcagcagctacactaataaggctaacctgtcgaataataagattaataaaggtttttcaaaggtgaagaaatttaacatggagaatgatattaagaacaagcagaacagagatatgatttggaaatggttgatagaagacaagaaaaattga

SEQ ID NO: 78777 - DNA, 81 bp, Saccharomyces pastorianus
atggagcattctcattggtttcgaaaaatgtcttcacttcatcaagagtttgtttgttttcttttttggcccttgacttaa

SEQ ID NO: 78778 - DNA, 2280 bp, Saccharomyces pastorianus
atgacagcgccattgtggccaaacaagaatgaaaaaaaccacacagttaaaagagcgttatcaacggatatgaccagcaatattttgagtagcacaaacgcgagctcaaacgaagaaaattctaggagttcttctgcagccaatgtacgctccggaacaggtgcaaatacacttactaatggcggcagtactagaaagagacttgcgtgcactaattgtagaaatagaaggaaaaaatgtaatttaggatttccctgtggtaactgttccaggttggaattggtttgtaatgttaatgacgaggacttaagaaagaagcggtacactaataaatatgtcaagtctttggagagccatattgctcaactggagaccaacttaaaaaacctagttcagaagatctaccctgacgatgagcaaatgctgaaccgaatgatggtaggtgatgtattatcagctctaccagacagttcacaagtctcaatcaattatactgaccaaactccctctcttccaattcccgcaaccagaggtacattcattattgaaaacgataaggtcagtcaacctctatcgtcctttaaccaacaaacagagccatctactctaaactcgggtatcttcaacacccaaaaacaaaatttcgaagaatcccttgatgatcagttacttttacgaagatcgttaacaccgcaaggtgaaaaaaagaagaaaccgttggtaaaaggtagtctttatcctgaaggacctgtcagttacaaacggaagcaccccgtaaaatcggacagtttattgcctgtgtcttcgttaacagctgctacagacccatctactttttctgacggtataactgctggtaattccgtcctagttaatggtgaactgaaaaaacgtatatccgacttgaagaccaccgtaatagtaagaggactaaacgatgataatcccaactctatcaataacgatcccaggattttaaaatctctttccaatttctataagtggctgtatccaggttattttatttttgttcacagagaaagttttctttatggattcttcaatcactccaagaataactatgaagactcaagttactgttctgtcgaattgatatatgccatgtgcgctgtcggttcgaggcttacaccggatctacaagaatattcagaagtgtattatcaacgaagtaagaagactttattacagctcgtctttgatgagcaaagtacagcccgtatcaccaccgtccaagcgctattttgcttagccttttacgaactggggaagggtaataatcaattagggtggtacttctcgggcctggctatcagggtcggctacgacatgggatttcaactggaccctaaagtctggtacgttgatgataacaatctgcagctgacccaaagtgagttggaaataagatcaaggatttactggggttgctatatagcggatcattttatttgcctgatgttgggtagaacgtccacattaagcgttagtaactcaaccatgccagagtcggatgagctgccagaagtcaacggcaccgaagagttcagatttattggaagacatgttttacagatatccttgcctctgaaaaacttgataattctatcaaggcttgtacaaatcttcacctctaaaattttcatcgagtcggaagatatagcacaaaaactaaagtacttgaacactttcaattctcaggtttacaactggagacaatctctaccggaatttttgcaatggtcgaaaacactcatcgagaacgatgacgtatccacagaccccactatatcttacttctggtattgctactacatagtgcggctcacctttaacaagccatttatagaagactctcaagaatccgaaacggtagtcatagagatcatcgatgatttgaagactttgctggacaatttcgggaaaaaattcggaaactacacgaagggaaacctttaccaactttactcatgcctgttggccatcaactgtttgaagaagttgaaagagatacgttccagtgagcaagactcatggaatgcacaattggattttttcaatcacatcttctacacacaactatatcccgcatatgatctgccgaaaaagctgcaggaggatacggagctggaaacagaacaagaaaaccagatgttgaaccaagttggaaatataaactacacgcacgatttttcactctcccacgaaattgacgatcttatcagagaactgtttggggtgggcacacctcaaaaactctga

SEQ ID NO: 78779 - DNA, 471 bp, Saccharomyces pastorianus
atggcagtagaagagggtggttgcgtgacgaaacgtttacaaaatgagctgctacagctacttagttctacaacagaaagtattagtgcgtttcccgtagacgataatgatttaacatactgggtagggtatattacaggccctaaagacacaccgtatagtggacttaaattcaaggtttcattgaagtttcctcaaaactatcctttccatccgccaatgattaaatttttgagtccaatgtggcatccaaacgtggataagagtggcaacatttgtttggacatcctgaaagagaaatggtctgcagtgtataatgtagaaacaattctattgtcattgcagtcattacttggcgaaccaaataacagatctccgctgaacgctgtggcagcagaactttgggatgcagatatggaggaatacagaaaaaaggtcctgacctgttatgaagaaatcgacgattactga

SEQ ID NO: 78780 - DNA, 981 bp, Saccharomyces pastorianus
atgtcacaagtaaaaagagccaatgagaaccgcgaaaccgcaaggttcatcaagaaacacaaaaaacaggttacaaacccaattgatgagaaaaatggaacttccaactgtatagtgcgtgttcccattgctctctatgtttctttggcaccaatgtatttagaaaatcccttgcaaggtgtcatgaagcagcacttgaacccattagtaatgaaatataacaacaaagttggaggtgttgtgctaggttatgaagggttgaaaattcttgatgctgatcctttaagcaaagaagatacatcagaaaaactaataaaaatcacacccgataccccttttggatttacttggtgccatgtaaatctatacgtttggcagccacaagttggagatgttttggaaggttacattttcattcaatccgcctcacacattggtcttttgattcatgatgcgtttaatgctagtatcaaaaagaataatatccctgtggattggacctttgtccataacgacgtggaagaagatgctgacgtgataaacacggatgaaaataatggaaacaataataacgaagataacaaggatagcaatggtggaagcaatagtttgggcaaattttcctttggaaacagatctttgggccactgggtagattctaatggtgaacctattgacggtaaattgaggttcacagtgagaaatgttcatactacaggaagagttgtttctgtggacggtacattaataagtgacgccgacgaagaaggcaatggctataacagctcccgttcccaagctgaaagtttacctatagtttcaaacaaaaaaattgtatttgatgacgaagtttcaatcgaaaacaaagagagccacaaggaactagacttacctgaagtaaaagaagataatggttcagagatcgtatacgaggaaaacaccagtgaaagcgatgatggtgaatcgagtgatagtgattag

SEQ ID NO: 78781 - DNA, 4995 bp, Saccharomyces pastorianus
  modified_base (3648)..(3679): a, c, g, t, unknown, or other
atggatatttctaaaccggttggttctgaaatcacatccgttgatttcgggatcctaacagctaaagagattagaaatctatcagcaaagcaaattaccaatcctacggttttagataacttaggtcatccagtatcaggcggtttatatgacttagccttaggtgcattcttaaggaatctgtgttctacttgtggtttggatgaaaaattctgtccaggtcaccaaggtcacattgaattacctgtcccttgttataatccattgttctttaaccagctatatatttatttgagggcatcatgtttattctgtcatcatttccgtttaaagtcagtagaggttcatcgttacgcatgtaaattgagattgttacaatacggtttgatagacgaatcttacaagctagatgaaataactttgggctctcttaatagcagtatgtacactgacgacgaagctattgaagataatgaggatgaaatggatggtgaaggaagcaagcaatcaaaggatatttcctccactctcttaaatgaactgaaaagtaagcgttcagaatatgttgacatggccatcgctaaagctttgtcagacggcagaactactgagagaggctctttcacagctactgtaaatgatgaacgaaagaaattggtccatgagtttcacaaaaaactattatctagaggtaagtgtgataactgtggtatgttttcgccaaaatttagaaaggatggttttacaaaaatcttcgaaactgcgttgaatgaaaaacaaattacaaataacagagtaaaaggtttcattcgtcaagatatgattaagaagcaaaaacaggctaagaaattggacggttctaacgaagcatctgcaaatgacgaagaaagttttgacgttggtagaaatcctaccaccagaccaaaaaccggctcaacatatattttatctactgaagtgaagaatattctggacactgttttcaggaaggagcaatgtgttttacaatatgtttttcattcgagacccaatttatcaagaaaattggtcaagactgactctttttttatggatgttcttgttgtgccaccaactagattccgtttgccttccaagcttggtgaagaagttcatgaaaactctcaaaaccaattgttgtccaaggttcttactacgtcattattaattagggacttaaatgatgatttatctaagctacaaaaggacaaagtttctttggaagatagaagggtgatcttcagtaggttaatgaatgcctttgttactattcaaaatgacgtcaatgcttttatcgactctaccaaagcacaaggtagaaccagtggtaaggttccaattcctggtgttaaacaagcactggaaaagaaagaaggtttattcagaaaacatatgatgggtaagcgtgttaactatgccgctcgttctgttatttctccagacccaaatatcgaaactaatgaaattggtgtcccacctgtttttgctgttaaattgacttatccagaaccagtaacggcttataacatagcagagttgcgtcaagctgttattaatggccctgataaatggccaggtgccactcaaatacagaacgaagatggttctttggtctctttgatcggtatgtctgtagagcaacgtaaggcattagctaaccaactattgacaccatcttcaaacgtttctactcatactttgaataaaaaggtttaccgtcacatcaagaacagagatgttgttttaatgaaccgtcaaccgaccttacataaagcctccatgatgggtcacaaagttagggtgttaccaaacgaaaagactttgagattacattatgctaatacaggtgcttataatgcagatttcgatggtgatgaaatgaacatgcattttccacaaaacgaaaatgctagagcagaagcactaaacttagctaatactgattctcaatacttgacaccaacttctggttctccagttagaggtttgattcaagatcatatttctgcgggtgtttggctaacaagtaaggacagttttttcaccagagaacaataccagcaatatatttacggttgcatccgtcctgaggatggtcataccacaagatcgaagatcgttaccttacctccaactatcttcaagccatatccattatggacaggtaaacaaatcatcacaacagttttgttgaatgtcacccctccagatatgcctggtatcaatttaatttctaaaaataagattaaaaacgaatattggggcaagggatctctggaaaacgaagttctcttcaaagacggcgcattgctatgtggtattttagataagtcacaatacggtgcctctaagtatggtattgttcattcattgcatgaagtttatggcccagaagtcgctgctaaagtcttatccgtcttaggtagactatttaccaactatatcactgccacggcattcacttgtggtatggacgatttacgtctaacagcagaaggtaataaatggaggactgacatcttgaagacgtctgttgatacaggtcgtgaagccgctgcagaagttactaatttagataaagacacgccagcagatgacccagagttattaaagaggctacaagaaatactgcgtgataataataagtcaggtattcttgacgctgttacatcctccaaggtcaatgctattacttctcaagtcgtctccaaatgtgttccagatggtactatgaaaaagtttccatgcaattctatgcaagctatggcactttctggtgctaaaggttctaacgttaatgtttctcaaattatgtgtttgttgggtcaacaagctttagaaggtagaagagtgccggtaatggttagtggtaaaactctgccttctttcaaaccttatgaaacagatgccatggctggtggttatgttaagggtcgtttctactctggtataaagccacaggagtattacttccattgtatggctggtcgtgaaggtttaattgatacggccgttaaaacatctagatccggttatttgcaacgttgtctaacaaaacaattagaaggtgttcacgtatcatacgataacagtataagagatgcagatggtacgttagtgcaattcatgtatggtggtgatgccatcgatataaccaaagaatcacacatgactcaattcgagttctgtttagacaattactacgcattattgaagaaatacaacccatcagcactgattgaacatttggatgttgaatcagctttgaagtactctaaaaagactttgaaatacagaaagaagcatagcaaggagcctcattacaaacagtctgtaaaatatgatcctgttttagctaagtataatcctgccaaatacctgggttccgtttctgagaacttccaagataaactagaatctttcttagacaagaactctaaattgttcaaatcatcggatggtgttaacgaaaagaagttcagggccttgatgcaattgaagtatatgcgttctctaattaatccaggtgaagctgttggtattattgcttcacaatctgtcggtgaaccctcaacacagatgacattgaataccttccactttgctggtcacggtgccgctaatgtgacnnnnnnnnnnnnnnnnnnnnnnnnnnnnnnnntgactgcctctgctgccattaaaactccgcaaatgactttgcctatctggaatgatgtttctgatgagcaagctgacactttctgtaagtctatctcaaaagtcctattatccgaagtgatagataaagtgatagtcactgaaactaccggtacttcaaataccgctggtggaaatgcagctcgttcgtatgttatccatatgagattcttcgacaataatgaatacagtgaagaatacgatgtttctaaagaagaattacaaaacgtcatatctaatcaattcatacacttgctagaagctgctattgtaaaagaaatcaaaaaacaaaagagaactacaggaccagacattggtgttgcagtaccaaggctacagacagatgttgcaaatagttcttcgaactctaaaaggttggaagaggataatgatgaagaacaaagtcataagaaaactaaacaagcggtttcgtatgacgagccagatgaagatgaaattgaaactatgagagaagctgaaaagtcttctgacgaagaaggtatcgattccgataaagaaagtgattctgactctgaggacgaagacgttgacatgaatgaacaaattaataagagtattgtggaagctaacaataatatgaacaaagtgcagcgtgatcgtcaatcagcgattatttctcatcatagattcatcaccaaatacaatttcgatgatgaatctggtaaatggtgtgaatttaagctagaattagcagcagacacagaaaagttgttgatggttaatattgttgaagaaatctgtaggaagtctatcattagacagattcctcatattgaccgttgtgttcatccagaacctgaaaacggaaaacgtgtccttgtcacagaaggtgttaatttccaagctatgtgggatcaagaggcatttatcgacgttgatggtattacatctaatgatgttgctgctgtgttgaaaacgtacggtgtagaagctgctagaaatactattgtgaatgaaattaataacgtcttctctcgttatgctatttctgtttctttccgtcatttagaccttattgctgacatgatgaccaggcaaggtacttacttagcctttaacagacagggtatggaaacatccacttcatctttcatgaagatgtcctatgaaactacatgtcaattcttgaccaaggctgttctagataatgagcgtgaacaattggacagtccttccgctagaattgtggtgggtaaattgaacaatgttggtacgggttcatttgatgtgttagcaaaggttccaaatgcggcttag

SEQ ID NO: 78782 - DNA, 960 bp, Saccharomyces pastorianus
atgactattctagaggagcttaatgattcaagcattcctcagaggctagataatcacatatttttcggctccgtacattcactgacgcatacagatttcctagtagaaaataacgttaggtttttcataaacgttgatttatcgactgaactaatatcacatatctatcatgaggtccgctcaaagtttgcccatgaaatagtaattgtcaacatcgacaatgactctcaaataccaatagaaagcgatttggtgcgttccttccattggcacaacacttcccttttgcaacaattgatccatcatctcgattttctcagcggtattaataatcacggcgaaccattaactccaccaccagaatctcattaccgaaatgcgtatgttcaattcgaccatccaagtgactcagtatcgatattagataaacttttatatggtaataagtcagaatattcgcgtacaaatatttttcaagttaccaacgaagcgaagtttcaagtcttcaacgacctaattacaattttcaaatactctatcgctcaaggcgggaataccaatagtaacatacttgttctctcagaaaacggcagcaccgatgaaaatttgataagtttactgatgtctaccgtattgaaagaaaacccaactttcaacgtttaccaggccctccaattcgttaagtctattgcagtaattcctgatacggtaagagatgaaaaaatcttatgggccacaggatttatcaactatcaagaattaatcaagaaaaatgaaatgtattggggcctaggttcgcaaaagggtcgcaaacttacgtcctttgcgtccccaatatcgaaagtggaaagaaaacaaagaagacgtgacgaccagaatatcatgcgatcaaagctaccacaacagagacaaaaccccttctgctcaacagagagacctaaaagggctcgctgcgattag

SEQ ID NO: 78783 - DNA, 876 bp, Saccharomyces pastorianus
atgaactctattttagacagaaatgttagatctagcgaaactactttaattaaacctgaatctgaatttgataattggttgtcggatgaaaatgacggagctagtcatatcaacgtcaacaaggactcctcgtcagttctttctgcatcttcttccacatggttcgaaccattggaaaacattatctcctctgcatccagctcctcgataggctctccaatcgaagaccagtttatatcttccaacaacgaggaatctgctctttttccaacagatcagtttttcagtaatccttcctcatactcgcattctcccgaggttagcagctcgataaaaagagaagaggatgacaatgccctttcgttggcagattttgaaccggcttctttgcaattaatgcctaacatgataaatactgataataatgacgataataccccacttaagaatgaaatcgagctaaacgactcgtttataaaaacaaatctagatgctaaggaaacgaaaaagagggctccaagaaaaagactgacccccttccaaaagcaagctcacaacaagattgaaaaacgctacagaataaacatcaacacaaagattgcaagactgcagcagattatcccatgggtagcaagtgaacaaacagctttcgaagtaggtgattctgtaaaaaaacaggacgaagacggcgcagaaactgccgctactactcctcttccatctgccgctgctacaagcacgaagctaaataaaagcatgatcctagaaaaagctgttgactatattctatatctacaaaataacgaacgactatacgaaatggaagttcaaaggttgaaaagtgaaatcgacactttgaaacaagaccaaaaataa

SEQ ID NO: 78784 - DNA, 2958 bp, Saccharomyces pastorianus
atgggtgaacatggtggtcttgtagatttattagacagcgatttggaatactctataaatagggaaacacctgataaaaacaattgccttagccagcaaagtgtcaatgattcacatttaacagcaaagaccgacggcttgaatgcaaggtcttttctatctacgttaagcgatgattccttaattgaatatgtcaaccaactctcccaaactaataagaataattctaatccaactgcaggtactttaagatttactactgaaaatattagctgtgatgaattacatgctgatcttggcggtagcgaagattcacccatagctcgtagcgttatcgagatccaggaaagtgatagcaatggtgatgatgttaaaaaaaatactgtgtatactagggaggcttatttccacgagaaggcgcaaggacaaaccctgcaagatcaaatattaaaagatcaatataaagatcaaatttctagtcaaagcagtaaaatattcaaaaattgcgtcatctatataaatggctacaccaaacctggaagactgcaattacacgagatgatagttttacatggcggaaaatttttacactatttgtcttcaaagaaaacggttactcacatagtggcttccaatttaccattaaagaaaaggattgaatttgcaaattacaaagtagtcagtccggattggatagttgatagcatcaaagaagcaagattattgccctggcaaaattactcgttaacatctaaacttgatgaacagcaaaaaaaactagataattgtaaaaccgtaaattcaattccattgccctcagagactagcctgcacaaaagatctaaatgtgtagggtcggcattgttgccagtagaacagcagtcaccagtaaatctcaataatttggaggcgaaaaggatagtcgcttgtgatgatcctgatttccttacttcctattttgctcattcgagattacatcatctctccgcatggaaggccaatctgaaagataaatttctgaatgaaaacatcaacaagtacaccaaaattacggataaggatacctacattatctttcatatcgattttgactgtttttttgcaactgttgcgtatctatgtagaagttctagtttctcagcatgtgattttaaacgggatcctatagtggtatgccatggtactaaaaactccgatatagctagttgcaattatgtagcaaggtcatatgggattaaaaatggaatgtgggtgtctcaagctgaaaagatgttgccaaatgggatcaagctaatatcattaccatatacctttgagcaatttcaattaaaatcggaagccttttacagtactctcaaaagattgaacatattcaatttgattttacctatatctattgatgaagctgtttgtgtgaggataatccctgataatattcataacactaataccttaaatgcaaaactgtgcgaagaaatacgccaagaaatttttcaaggaacgaatggttgcacagtgagcattggatgttccgattctcttgtgttagcaagactagctctcaaaatggcgaaaccaaatggttacaatatcacatttaagagtaacctatctgaagaattctggtctagtttcaaactagatgatctgcctggagttgggcattctactctgtcaaggttagaatcaacgtttgatagcccacattctttaaatgacttgagaaaaagatatactttagatgctttgaaggcgagcgtcggctctaagttaggtatgaagattcatctcgcgttacaaggccaagatgatgaagaaagcttgaaaatactgtacgatcccaaagaagtcttacaaagaaaatcactatcaattgatatcaattggggaatcagatttaaaaatatcactcaggtagacttgttcatagaaagaggttgtcagtatcttttagaaaaattgaatgaaatcaacaaaacaacgtcacaaatcacattaaaactgatgagaagatgtaaagatgccccaattgaacccccaaaatatatggggatgggaaggtgcgactcattcagtcggagcagcagattaggtattccaacaaacgaattcggaattattgctaccgaaatgaaaagtttgtatcgaactttgggctgccctccaatggaattaagaggtctcgctctacaattcaacaaattggttgatgtgggtccggataacaatcagctgaaactgaggttaccgtttaaaacaatagtgacgaacagagctttcgaagccttaccggaagatgtaaaaaatgacattaacaacgagttcgagaaaagaaattatatgagaaaagaatccgggttgacttcaaactcattgagctctaaaaaaaaaggatttgccatttccagattagaagtaaatgatttgcccagtactatggaagaacagtttatgaatgaactgccaacccaagttcgagcagaagtaagacacgatttgagaattcagaaaaaaatccaacagacaaagttaggaaacctacaagaaaagataaaaaggagagaagagagcctacagaacgagaaaaatcatttcatgggccaaaatagtatattccagccgatcaaattccaaaatctgacacggttcaaaaaaatttgtcaattagtgaaacaatgggttgccgaaactttaggtgatggagggccgcatgaaaaagatgttaaattattcgtgaaatatttgattaaactttgcgattctaatagagtccatttagctcttcatttatcaaacctaatatcaagggaattaaatctctgcacctttttaaatcaggatcattcaggcttccaaacgtgggaaagaattttactcaatgatataattccacttttaaacagaaataaacatacttaccagactgtgcgtaaacttgacatggactttgaagtttga

SEQ ID NO: 78785 - DNA, 1992 bp, Saccharomyces pastorianus
atgaagttactttttaaaagatgttcgtctagtcatattggtaagctgattaaggactctttaatcactcctgaaatactaccacagctagggcgacagccatcatcgcataaacgtttaccaaataacaaaagaactaactcaataactgataaatggttgaaggatgcgctaacaagaaaagataaactgaatgaagataagctccaaaatgtaaatttacgattaaatgtggtactgactactctacagaagcttcgtacatccgataatcctgctttgtattttgcgttgttgaatcgtattggcacaggtcacataaaatggctaaataaaagtggccgacagattgatgcattcccacctgatcggctgcctttggaattttatcatgagctatctaatatgctctataaactatcgcttcggtccgcaaatgacaaaattgcactagctaaattttcattgcaattattggatcgctattattttcttaaaaccaaatctttaactgtagaaggaaaatttcgggcaaacataaaatttttgaggaattgtactcttttaattgttaaatcccaatcgaactactacttaagggcaatacagcggttgttcgcggaaaattcggagggtcaattattagccaatttatcccagctggcattttatgtggagacctcccaatggacaagtatgttggatattttatcctcatgtgtaccggattctggtttaagaggttcgaaggagcgtgaaagagctattcaattgttggagttatttagtccatgcctagtcaaaagtctaaaagtaatgatagcacaaaatatggagaatgaagcttgtcagattttaaggagcttgtctgaatggaactttcattttgatcagcatgattcctccaacttgatacaattatcccagaaccattcttgcctcaaagttattgaaaccatgaatggattatcatcaactaccgctgtcactaggcaattcggacttgaaaaattaccaactgacgtgagtttgaagcagagcatacatattttatcaaaagataatttcgaacctctcaagcaagattcatttcttcaatttctatcgtttaaattaagtgatttgcctctgaacttagaagtatggaaaaagcacattaaggaggttgatgaccaaatgcaggctgagtccaatctgcattccttaagagctttttttattgatatgctactgtgtcatttatctgtgcgcaaggatttcgattttatgctttcattggtcgagcacatagtatacgaaaaaaatttatggcagccattattactcacagataatatagttggaaacaaagaaaattccacttttcattgcctctttcatggcgcctctcaagatatttctaccaaacttactctactggcattgtataaccagttgaatgaaatcggctatcaatttacctcccacgattttctctcgatgttgaaagtctgcaaaaactactctgattctgattttttctattttgctttctataatttgttggttacacaaagtcacaaattttttcttttcgataagtttagtgataagttttcgtggaggttgccaatacaaatcggagatgcaatttctgaatggctatccagcttagaaattgatatacaagaaaacaccgatagagttttgcagataacagatgacgtcggcgaatggtatgttgagaataaaccatttaactcagaaaaagggaccattcaaccaataaacataatggaattgcgcaaaatttttggggagcgaaaaactctatttcatatggattcagaaattttccaaaaatctaaagcaaaaagagataaagaaatgcggaatgaagctttatttaccgcaaatgatgcggaatacaattttgctgcggatgtatcctatgcaaagagagtagaaaatctattttcttacataagatctaagcaaatgcaacaaaaataa

SEQ ID NO: 78786 - DNA, 1494 bp, Saccharomyces pastorianus
atgagaccgttgtatagctgcaaccttgcaaccaaagatgatattgagacggcaggtggcgtagctcctgctcacctggaagttaatgtaggcggctataatacagagcagacaatacctatagtaaagcatcagctcgtgaaagttgggagaaatgataaggaatgtcaactcgttctaacaaatccctctatctcctctgttcattgcgtgttttggtgtgtcttttttgatgaggatagtattccaatgttctacgttaaagattgttctcttaatggaacgtatttgaacggtttgcttttgaaaagggacaaaacgtatcttttaaaacattgcgacgttattgaattatcgcagggaagtgaagaaaatgacattaaagaaacacgactagtttttatgattaatgatgatttacaatcttctctggacccaaaacttttagatcaaatgggttttctgagggaagtagaccaatgggaaataacaaatagaatagtgggtaatggcactttcggtcatgttctgatcacgcataactcaaaagaacgtgatgaagatgtctgttatcaccctgaaaattatgctgtgaagatcattaaactaaaaccaaataaattcgataaagaggctcgaatccttttgagactggatcacccaaatattatcaaagtctaccatactttctgtgacaggaacaatcacctttacatattccaggatcttatccctggtggtgatttgttttcttacctagctaaaggcgactgtctaacttccatgtcagaaactgaatcgctattgatcgtctttcaaattttgcaagctttaaactaccttcatgatcaagacattgttcaccgcgatttgaaactagacaatattttgttatgtacgccagaaccgtgcactagaatcgtcttggcagactttggtatagctaaagatttaaattccaacaaagaaagaatgcatactgtcgtaggcactccggaatactgcgctccagaagttggattcagagcaaacagaaaagcatatcaaagcttctcaagagcagctacgttagagcaacgaggttatgacagtaaatgtgatctttggtctttgggtgtcattacacacattatgttaacagggatctcgcctttttatggagatggttctgagaggagtattattcaaaatgcaaaaattgggaagctgaatttcaaactgaagcagtgggatattgtttcagataatgccaagagttttgtcaaagaccttttgcaaactgacgtagttaaacgattaaatagtaagcaaggtctcaaacatatttggattgcaaaacacttaagtcaattagagagattatattacaaaaagatattgtgcaataacgaaggccctaaactagaaagtataaattcagactggaaaaggaagttacccaaaagcgttatcatttctcaggcaataccgaaaaagaagaaggttttggagtaa

SEQ ID NO: 78787 - DNA, 1032 bp, Saccharomyces pastorianus
atgtctgagccaaacacaccattacatgctcaaccgaatgagcaactggacttgaacaacttaaatgatctagatgaaaaagacattgatgatttaaacttggatccaaactcagatgtagaaattagtgcagactcaggtgatgtcgtaaattctaacatagacaacgttatatggcagcgtaattgtaataagaaaagaagatatcatacaccagaattcaatgatgtttacaatgaaactaacaacacaatcaacgacgtaactatggtcgatgatgttgacgatttccagcctagaataaacgtgtcttctcccttttcgtctgccacaaagctgagtgaattattgccaaatgatcacaatggaacgtcacacccgagaagattgtcaatgtctcaacaatccaaattcatctcttacgttgatgatcagcttttacaaattcaaagaaaatttgttcaatccaggggcctgaatatcaaaaacggctatgccagtcttactccgctgctgcaggatttaaaaactttagttgacttcgtttggtattctattgcccatgttccaaactcagactatttacttcaatcagaagaaaagagacattgcccagattcccgaaacccaaaagatacatgcggatattctagttattttggtcaagggtcctatttaataaaaattgccgacgatctcatcgattacgttgaaaaatttacattcaaaaatatggaagactcagagattaatgacactttatccaaattattcaaactcttcttcatccttgacaggatatttgtaattctaactgatgataatgataattgcaaagaagtccctaaaacgtcttcagccagcaagaacatagcaggattgaatgggactgatattgtgaggttaaaaggtatcgcggaacgaacaagagttcgcctacccatatttttggaatcccagggtatccatggttaccattatgaattaagcaagatttacgagggatttttagaccatgccaattcattttaa

SEQ ID NO: 78788 - DNA, 2376 bp, Saccharomyces pastorianus
atggtagcgacatcttcaaagaggacgttggatccgaaggaggaacatttgcctgctgacaaaacatccactaattcaagcaacactataatatctgagttggcaacacaagagaaatccagctctagtggtactacactaaaattaatagctcttaatatcaagtccatatcagatgaagatgtgggatatatccaaaatgttgaaagactgtctttaaggaaaaatcacttaacatccttaccagcgagtttcaagaggttatcaaggctgcaatatctggatttgcataataacaattttaaagaaatcccatatattttgacacaatgccctcaattagagatcttggatctgtcctccaatgagattgaagcattgccagatgaaatatcatcgttttggcaagataatattcgtgtattatcattgaaagacaacaacgttactagcatacgtaatttgaaatcgatcacaaaattaaacaagctgagcatcttggatttagaggataataaaatacccaaagaagagcttgaccaagtacagagttatactccatttcatacgggcatccccaaagaagaatattgggcaattgcgatatcacgatatctaaaagatcatcctaacctatctactccagaacctaaaatatctagagcagcgaaaagaatgggattcataaatacgaacttgtctaatggagcaatgaatgaaaacaatataatttcacttgccccaagtgcaaatacaactataagtgcatctactgcaatggtctcatctaatcaaacctctgcaacatctttcagtggtacagtcaatgcagaatcagaacaaagtggggcagtgaatggtacggaactatacaatcacaccaaatataatgactacttcaagaggttgtcgattttaccagaagagtcaatgagtaacgggcatcaaaaaatatcgcatgcagagttggttgtttcctgtcggaagctcctatttagttttacagaatgccaacaagctatcagaaaaatcgcctctttctgtaaagagaaggccgtagcggttaatgtagtatcattattatactctgtcagatcacatactgataatctggtggaggtcttgcagcaaacagagaacgaggacgaatcgcatgatcaggcgttaatcaagctgtgcctcattatcatcacaaattttaaacaaattataacattgttgagaaaaaattttgagatttttttcaaagaagacgatctatgcttcataaggatgttttatatgacattaatgtgtgcttatatggaaatgtataatgcatggtcttttatcaaagaagatgatcaagtgtccggttctgcaagtaaggcacccaagaaacattctttttcgaggcacgagacatcgtccagtagtatcacaagcggtggaggacccgcagcaagtacgaccagtacacattgtagcggaaacataaaattactgccgaaaacaaggagcacaagaacaccatctgcatctgcattgctttcaaatagtaatattctgacgggtgataccactgctgttcctcttttatcaccaaatctaaatggtgcacacacccatggtccaattttgggacaccaaaatgcaataagcaatggaagttctcaaacgaacatgaatgaagtaaaaactactagcgatactattccaaggcaacagctgcttcagcacaataaatccatcagcgattcgaaaaaagagtcacaggcgcatgaacctaaacagcatccggttatgacttcttcaataattaacgcatcaaatagtaataacgtctcgaatgttaatataaccccaccaccgatgaatggtggtggtgccgcgaacagtagtgctaatgtagtggagacaaatattgacattcaactgtatcaaacgttgtccacagtagttaaaatggtgagcgttgtatataaccagttaacttcagagatatccaagatagccattgctagcaccatgggaaagcaaattttgacggactcgctagcacctaaaattcgtgatttgacggaaacatgtcgtcaagcgatggatttatccaaacaattgaatgaaaggttaaatgtattaataccgaacgattcaaattcagagaagtatctgacatctttggagaagctgaaaacgtgggagataatgaattcgttcttaaaagtaataatatcaattctggctaatactaaaatcgtaatgagcgacgtgcctaatttgaatgagctgagacctaacctagccaacttggcgaagattaccaaggatgtcactgtgatattggacttgagttcatacaaggctgtatcagtaagcgccaactctccggagtaa

SEQ ID NO: 78789 - DNA, 2079 bp, Saccharomyces pastorianus
atgctttcccataatgctttaagggcctttgattgttcaaaggtgattatttcacgaagatgtctaacctcttcaacatcgatataccaacaaagcagcgttcacttacaagaaacagatgatggacattcaggaaatagagaaaagcacgtctcaccgtttgaaagggtacaaaatttggctgctgatttgaagaacgagttgaaagctccagattcagatatcaatgaagtttttaatgactttaaagataagattgaatcgttgaaacagaaattaaggaacccttcacctatggaaagatcacacttgttagcgaatttttcttcggatctcctacaggaattaagttacagaagcaaaaatatgacgctagatccttatcaagtattaaacacattgtgccaatacaaattggcacgctcacaacatttcacgattgttttaaagtaccttctatataatcaatcaccacaggacgttattgccttatgggtgaagtacttggaaaccatttccgaaaacccagtgatcttacttcaaaatagttcttctcgtgcacatatgcaaaatattgcaattaccaccattgcttacttatctttaccagaaaatactgtggatatcaatattctgtataagattttacagatcgatcgtaaaatgggccaggttttaccttttaacatgattagaagaatgttaaatacagaatttagctctcttgaaagaagagacgtgattatcaaaaatctaaacactttgtactatcaatacacagtacacgatagtgatcatttcttaagtcaaattgaaaatgctcctagatggatagatttaagggatctttatggccaatacaataaacttgaaggtgagaaaaatgtagagatcataagcaagttcatggacaagtttattgatttggataaacccgaccaagttgttactatttataaccagtatagcaaggttttcccaaatagtacgtcgctgaaagattgtcttttaagagctgtgtcgcacttacgagctaaatcgagtaaagagaagttggacagaattctagcagtctggaacagtgttatcaaaccaggagataatattaaaaacacatcttatgcgacgctagttaacgcactaactgattctggaaatttcaaccatttaaaggaattttgggaagaagaacttcctaaaaagttcaagaaagatcccatcgtgaaggaagcatttctcctggccttatgtcaaacttcgcctctaaagtatgaccaagtcaaaggggagttagcagagactgttaaaaccaagaagttgttcaataaagttttattgctaatgttagatgatgaaaaagtgagcgaagaacaattcaacacattttactataaccattatccatcagatggtgtgttaccccctactttggatactctaagcattaaaatgtacgctaattataaatttcaggcagaagatacacgcccacaattcgatctattgcaaagtgtttccattaatcccaccgattatgaaaaggttgaaaagattacgaaagcctttatttcagtgtgccccactgtcgagccgattcgtcaactttacaaacaattgggaactcacttaaatgctaggaattatgcagactttatttccgcagagtttaataagcctgacggcacagtggcggaggcaaagaatttgttttctgattttctctcatatcaaaagactagaaagagaaacgtggataatatgcctctaaatgctttattattggggttctgtgataaactttacaagagtaaacatagcgagtacgttccctacatcgaaaagtactacaatctagctaaggattcaagtatcagggtgtcgaacttggccgtttcgaaaattctattcaacttggccacatttgcacgcaatactcagcagttatctgacaaagaggttgcttttattaaccagtttatgcgagatttaggcactaatgagggttttcgtcccaaccctaaggatattcaaattttaaaagaatgtgatggaattactgttccagaaaagttgacttaa

SEQ ID NO: 78790 - DNA, 1569 bp, Saccharomyces pastorianus
atggcattggcaaattccagacctttgcaaataccaactttagagaatgaaattcttcataactcaaattctccagtatttcagttgaattcaatgggatttacaactagagctgacactatttcgaatccaggcacggatcttatcggcaaccagccaggcatggcccttgatgataataatttggccggttcttcgttttcctcatctcaggaaataaaagctaccaaacctaagaaggactttggtgctcccaaaaaagacaatccattattagaaatttctaagctaatacctgttactggtgagaggccaaaacccgaaaatagagactcccctctggatgatgacgttcttcacgcagtttttttaatattatgggaaatggatccgaatcaacaaggcatgaccgtcaaacaactgtgtgacttgcttttgcaaaaacatccagatatgtccaatttatcaaccaagttgtcaaatttaatttccgcaaaactgaacgcttatgttaaaaaaattgaaaaaggtgagaaaacgttaacttatgctttatcgagggaatggtctaattcatctcctagaaggatgctctatatatacagaggcatattatctcccgattacaaggagcatgctcaagctgttacgatgcaacttaaacaacaattggagacatccggtgatacaagcgactttaattcaaatggcaagaaaaaaagggagtccagcagtaaccagctagttaacaatgacagttattcaagttctatgacggacatgaaaaatatgtcttctaacagttccttctcaaaaaatttgaatgtagggaatctggccttttcattaagtccagaattcaacataccttattccacttctccagtgtcactaaatctttccccatcgatgagtaataatcagcaacaattactgacacctaattcggcatcgaagagtaaaaacaataataaaaaaagaaattacatggatgaagatactaacgagtcaatgaccgagccaaagaaaaccaaaactactaaacctggcaaacaaacaaaatcccaatctttatcagttttatccaccccaaaaaagggttcctctgcatctctttctacatttgcaagctccaagaatatttcgccagattcttctctgtcgcataatgcatcgtcaaatacttatgttactgccgctgccgctgcaccaaggctttctaagcttttgccgaaaaatgggtttaagaaaaattcacgtagctcttctgaactggctgctatccataaagtaatctctacacagactccaattgagagctcttcagagagctctcaatataacagtagtagtagttcaccagttaatagtgcagctgcttcttctgctgaatctttatccgacatcaattccagtcaggataacggaagagaatcaaacccaagttcccaagaatcacgaaacgaagttacgaattggatgaaaattgtgagaaatggatttttgacacatgatattgaatctcctgaatcaatcacattagatgacctagaaaatatattcaattga

SEQ ID NO: 78791 - DNA, 1896 bp, Saccharomyces pastorianus
atgattaagttcactaacgagaacttaattagagggatccgaatgacgatttccgcaaaatctcatcatttggctctagggacagatatgacgagaaagtttagcttgtcgtgtaggtttttgaacaaagcaaatcttactgaagaagagaaagagttgttaaatgaaccaagggcgcgcgactatgtggatgtttgtatagttggaggagggcctgcgggattagcaacagcaatcaaattaaaacagttagacaattcgtcaggaacaggccaattgcgtgtcgttgttcttgaaaaatccagtgtattgggtggacaaactgtttccggcgctatattggaaccgggagtgtggaaagaactattccctgatgaaaagtctgacattggcattccgttaccaaaggagttagctacgttggtaactaaagaacatttgaaatttttaaaggggaaatgggccatcagcgttccagaaccatctcaaatgatcaataaaggacgtaattatattgtctctttgaaccaagtcgtcggatatttaggagaaaaggcagaagaagtaggagttgaagtttaccccggaatagctgtctcggatctcatatatgatgaaaacaacgccgttaagggtgtaattactaaagatgctggtatttcgaagtccggtaagcctaaggaaaccttcgaacgtgggatggaattttgggctagacaaactgtattagcagagggctgtcatggttccttaacaaaacaagccttggcaaaatatgatttaagaaaaggcagacagcaccaaacttatggattaggtattaaagaagtttgggaagtcaagccggagaattttaacaagggatttgcagctcataccatggggtacccgttgacaaatgatgtttatggcggtggtttccagtaccattttggtgatgggctggtcactgtgggccttgtcgtggggttagattataagaatccctatgtttcaccttacaaagagtttcaaaagatgaaacatcatccatactattcaaaagttttagaaggaggtaagtgtatcgcttatgctgcaagagcattgaatgaaggtggactgcaatctgtacccaagttgaatttccctggtggtgttttggtaggggctagcgcgggtttcatgaacgttccaaagatcaagggtactcatactgcgatgaagagtggattacttgccgctgaaagtatctttgagtccataaaagggttacctgtcttagaagaggttgaagacgaagacgccaaaatggctatgtttgataaggaggcaactattaacttggaatcatatgaaagtgcattcaaagaatcatcgatatataaggaactatacgaagtgcgtaatattagaccgtccttcagcgggaaacttggtggatatggtggtatgatctactctggaatcgattctttgatattgaagggaaaagttccgtggacactgaaatttgatgaaaaaaatgacggtgaaattttggaacctgcttccaagtacaaaccgatagaataccccaagcctgatggtgtgatatcctttgatatattgacctccgtgtctagaaccggaacctaccatgatgatgatgaaccatgtcacttgagggttcctggacaagatatggtaaagtacgccgagagaagctttcccgtttggaaaggtgttgaatcgaggttctgcccagcaggtgtctacgaattcgtcaaagatgaaaaatcgcctgtgggtacgagactgcaaatcaattcacaaaattgtatccattgcaagacctgtgatattaaggcgcccagacaagatattacttgggaagtacccgaaggtggagatggaccaaagtacacgctaacttaa

SEQ ID NO: 78792 - DNA, 489 bp, Saccharomyces pastorianus
atgccaagagaattcaaatcctttgggtctacagaaaagtctttgctgtcaaaaggacatggagagcctagttacagcgaaatatacgctgagcctgagaactttttagagattgaggtgcacaaccctaaaactcatataccaaatgggatggattcgaaggggatgtttacagattacgaaataatatgccgtacaaacttgccaagttttcacaagagggtatcgaaagtaaggagacgatactcagactttgaattcttccgcaaatgcttgatcaaggaaatttctatgcttaatcacccaaaagtcatggtacctcatttaccgggtaaaattctcttgagtaatagatttagtaacgaagtcattgaagagaggagacaaggtttgaatacctggatgcaatcggtagccgggcacccgcttttacaatctggttctaaagttctcgtgaggttcattgaagctgaaaagtttgtcggctga

SEQ ID NO: 78793 - DNA, 729 bp, Saccharomyces pastorianus
atgactgataggaatttctcaccacaacaaggacaaggacctcaagaatcgctcccggagggaccgcaacccagtacgatgattcagagagaggaaatgaatatgccaaggcaatattcagaacagcaacaactgcaagaaaacgaaggggaaggggaaaatacgaggctacctgtttctgaggaagagttccggatggtacaggagttgcaagctatccaggcgggccatgaccaagctaatctaccgccaagtggtcgaggatcgcttgaaggcgaagataatggaaacagcgacggcgcagacggagaaatggacgaggacgatgaagagtatgatgtgtttaggaacgttggtcagggattggtgggccactacaaggagataatgatccgttattggcaagaattaatcaacgagatcgagtctacgaatgaacctggttccgagcatcaagatgacttcaaatcacattccttaccatttgcgagaatccgcaaggtcatgaagacggatgaagatgtcaagatgattagtgcagaggcccccatcattttcgccaaagcctgtgagatctttattacagaactgactatgagagcttggtgcgtggcagaaaggaataaaagacgaactttgcagaaggcagatatcgcagaggccctgcaaaagagtgacatgtttgactttctcatcgatgttgtgcctagaagacctcttccacaatga

SEQ ID NO: 78794 - DNA, 1572 bp, Saccharomyces pastorianus
atgaaacatccgtatgaggaattccccacaggttccaagtcaccatataacatgtctagaggagctcatccaggcgccgttttgctatcaccacaatcttctgccataaacaagaacaatccgggcagcaattctggcaataaccagggcaattcatccgtgaccgcgaatgttttgtcccctcaatcccatagtatgtcactcaatgacatgcttaatcagcaatcctttatgctagacactgcgggaaccagggctcagccgctccagcaacaacagcagcagcaacaacagcaacagcaggcgtcgttgccttcccttaatattcaaacagtttcgtctacagcagctggttctgctatcgtttcccccatgatacaatctccaaaggcgttgcaatctactttatcttcaacatctatgtatttggattcatttcagagatctccaaataatattttgggtattccatcgcagagtggttcaattcctttgccgcaatcccgtcaatcgcaacaacagtctcaatcccaaaaaaacgatccgaacatgggcaccaatttcagccaagacatcaatcaattatgttcttggatatccatgctgaacagcagtcaacaaaatactgtaatggacaatatccttttcattttgaatgatgatgttttgaaatatactaagttaaaaatagagactttgacaaacactcccttcatctccccaccgctacctgcaattgcatcacctatacctaatagggatgacacacaaattttgaatattgattcagtcttttcttcaagtcctataactaatgaccctgaaaataccgataacttgttgtatcaaaattggtcccctcagccacattcaataccaattagccaacccatatatgacaacatcaccgacgctagtcaaaggtccaagtcggctgagcctcatgttaattcaagcccaaatctcattcctgtccagaaacaattcaacaacggtaacagtaccaaatataaaaagttgccatcagagaatcccaactatctttctcactctctctcaagttcccattcttttttccaaccaaagaaaaggtctaacatgggaaatgagtacaattctcatcaccatcattcattgcatcatcctctgcataataccacctcatatttttcgaatacttcaagaccatcaggaactgatttgaataagtccaaccagaacgtgttcaataataccattacgcatcctaatgctggtcctacaagtgccacatcgacatctacatcatctaacggaaacactcctttatcgagtaactcttcgatgaatccaaagagtttgacagaccccaagctactaaaaaatatacccatgtggttaaaatcgttaagactacacaagtattcagatgccttaagcggaaccccgtggatcgaattgatttacttagatgacgagactttagaaaaaaaaggcgttcttgccttgggtgcaaggagaaaattgttgaaggcttttggaatcgttattgattacaaagaacgtgatttaattgatagatctgcttattaa

SEQ ID NO: 78795 - DNA, 1581 bp, Saccharomyces pastorianus
atgtccaccctttttctgattggaatacacgagattgagaaatctcaaacaattgtacagaatgaacactattttgatagagtgattgagcttcaagatttggattctctgatggtagcattgtataaggacagagtttcgccttttccaaacgtccataactttgaaacgggcgtatctatagttctttatgacccttcaaaatttcaattatctgtgcgacaattggatgttctattcaagcgatttttcccatctttcaatatttctgcgatagatcatacacgagaggaaaacttgcaacgtcttgaatgtgtcgagcgtgaaaatagcatctgtcgtaatagaataacgagaattaaccactggatgtatcaccatcatgatgatactccagacggtattaacaaaaacagctatggtactgtaaatgggaattctgtccccactcaagcatgtgaagcaaacatttacactttattattgcatttgaatgattccaaggcacaacatttacgaaaggcatcagtgccaaggctaattcgcaacatcgagtttatgtcttttttgtcagatccaatagaaaaaatttctcaagagggatctcattattggaacattctatcaacttgggacttttgtgctttatcattaagcactcaagaattgatttggtgcggtttcacgcttatcaaaaagttatctaaggatgcaaaagtactcattgcagataataagttactgctactactatttactttagaatcatcctatcatcaagttaacaaatttcacaattttaggcatgccatcgatgtcatgcaagccacatggcgattgtgtacatatcttcttaaagataatcctgtacaaacattactgttgtgtatggctgccataggtcatgatgtcggtcatcctgggactaacaatcaactattgtgcaactgtgaatcagaggttgctcaaaatttcaaaaatgtctctatcttggagaatgttcacagggaattatttcaacaattgctatcagagcattggcctcaattgctatctatctccaaaaaaaaatttgattttatttccgaggctattctggctacagatatggcattgcattctcagtatgaggatagattaatgcatgaaaacccaatgaaacaaatcactttgatatctctaattattaaagctgcagacatctctaatgtgacgagaaccttgtcaatatcagcacgttgggcatacctcattactctcgaatttaatgattgcgctcttttggaaacatttcataaagctcaccgcccagaacaagactgttttggcgattcatacaagaatgttgattctccgaaagaagatttggaatcaattcaaaatattttggtgaacgtaacagaccctgatgatattatcaaagaccatccgcatattccaaacggtcaaatatttttcattaatacgtttgctgaagtatttttcaacgcattgagtcaaaaattctcaggattaaaatttttaagcgataatgtcaaaatcaataaagaatactggatgaaacacaagaaaccacaatag

SEQ ID NO: 78796 - DNA, 369 bp, Saccharomyces pastorianus
atggtcttacaacctttcaaattccaaaatcagaagagattttgcaggaaggcaaaccctaccggacgtattagtcacgattttatttattcacatatacagatattcacagttcgaattttgtttacaaaggtcaatcttattgatctgcggcttttgaatactgttgcattcaagaacggctttcttcatttcgtgcagttccgggaccgattcgtaaaccgcatcatcatccatttcacccttcaaaaaggatcgtctttgatcatcaataggtttgtatcttgtatcagggtgtttgtagtatattgccatcgtaaagcatatcaatatgaaaatgaagagatacaaagaaaacgctgcatttag

SEQ ID NO: 78797 - DNA, 1206 bp, Saccharomyces pastorianus
atgcgaatcaacagtgagctagcgaacaagttttctgcctcaacggtgcacttagaacatatcacaactgctttaagttgtttaacaccttttggttctaaagacgatgtgcttatattcattgatgctgatggcctgtcatttgtcagggagaataatcatgtgataaaaatccaactactgttatctcgggagctatttatgtcttattcgtatagaaatgaaactgaggatcacatgaaactttgtgtgaaaataaatcatatcttagatagcgttagcgtgatgaacaggaattcggatgacattgttgagtgtactttatcttatgatggacatggatcaccacttgtactaatatttgaagactcgttcatttctgagagagtggagtactctacctacttaattaaggattttgatactaatggactagaactcgatagagaaaggataagctttgaggcaattattaagggcgaagcccttcattcagccttaaaggatctaaaagaaatcggatgcaaagagtgctatgtatatgcaaagaccgaggcgaatgatgagaatgtatttgccctgatatctaaatctcagctaggattttctaaaataaagttacccagtaacagatccatactagagaagttacaagtatttgacggagattccacaacagtaatagatggttttgctgtaattgggttcttcgatttcacctcgtttgataaaatcagaaagagtactaaaattgcaagcaaagtccttttcaggatggatgttcatggcgtattgagtgtaaatattctaagtcaaacagacgatgtcattatcactgatactacaagaccttcaaataatcgaccaggtagtattcgccaactgcagctacccaaggattatcccggtatagtaattgaggtttgcatgctagaaaaagaatccatagatgaggcagcacagacagaaatagaactcctgatggagactaatgaacttggcaatcgtaatagttttaaaaaatcaactataagaaaaagatatggtacagataaaggcaatgaaacttcaaatgacaacttgctgcaattgaatgggaaaaaaattaaactaccatctgaagaagaaaacaataaaaacagggaaagtgaggatgaagagaatcactgcaagtatccaacaaaggatattcctatatttttttaa

SEQ ID NO: 78798 - DNA, 432 bp, Saccharomyces pastorianus
atgtctgacgttgaagaagtcgttgaagttcaagaagaaactgttgttgaacaaactgccgaagttactatcgaagatgctttgaaggttgttttgagaaccgctttggttcacgatggtctagctagaggtttgagagaatctaccaaggctttaaccagaggtgaagctttattggttgttttggtcagctctgttactgaagctaacattatcaagttggttgaaggtttggctaacgacccagaaaacaaggttccattgatcaaggttgctgatgctaagcaattaggtgaatgggctggtttgggtaagatcgaccgtgaaggtaacgccagaaaggttgtcggtgcctccgttgttgttgtcaagaactggggtgctgaaactgatgaattgtccatgatcatggaacacttctcccaacaataa

SEQ ID NO: 78799 - DNA, 1812 bp, Saccharomyces pastorianus
atgttaagtcctgaacgtagaccatccatggcagaacgccgcccatcatttttcagttttactcaaaatccaagtcctctagttgtcccgcatttagccggtattgaagaccctttgccagccactacaccagataaagttgatgttttaatcgcagggactggtatggtagagagtgtattggctgctgcattagcttggcaaggttccaatgtccttcatattgataagaatgattattacggtgacacttcagccacactaactgtagaccaaatcaaaagatgggtaaatgaagttaatgaaggctcagtaagttgctataaaaatgcgaagttgtatgtatccacgctaatcggtagtggtaaatattcttcaagagatttcggtattgatctttccccgaagatcctatttgcaaaatctgatttattatccatcttaatcaaatcaagagttcaccagtatttagaattccaatctttatctaatttccatacttatgaaaatgattgtttcgaaaaactaacaaatacaaagcaagaaatattcacggatcaaaacctaccactaatgacaaagaggaacttaatgaaatttatcaaattcgtactcaactgggaagcacaaacggaaatatggcaaccctacgcggagaggaccatgtctgattttttagtggaaaagtttaaattagaaaaaccacaagtcttcgaattaatcttctcaattgggttatgttatgatctcaatgtaaaagtaccagaagctttacaaaggattcgtcgatatctaactagtttcgatgtttatggaccattccctgcactatgctccaagtatggtgggccaggagaattgtcgcaagggttttgtagatctgccgctgtaggtggcgctacttacaaactcaatgagaaattggtatccttcaaccctacaactaaagtggccacattccaagatggatccaaagttgaagtttcagagaaagtgataatatcacctacgcaagcacctaaagacaataagcatgtccctcaacaacagtaccaggttcatcgtttgacctgtatagttgaaaacccctgtactgaatggttcaatgagggtgaatcggccgccatggtagtcttccctcctggctctttgaaatctggtaataaggaagtagtacaagcctttattctcggtgctggcagcggaatttgtccagaaggaactattgtatggtatttatcgaccacagaacaaggcccacgtgctgaaatggacattgatgccgctctagaagctatggaaatggccctgctaagggaatcgtcttcaggtttagagaacgacgaagaaattgttcaactaacgggaaatggtcatacaatagtaaattcagttaagttaggccaatcttttaaggagtatgttcctagggaaagattacagttcttatttaaactttattatacccaatacacatccacgccaccctttggtgtagttaactcctccttctttgatgtaaatcaagatttggaaaaaaagtatatttccggtgcgagtgataatggcgtcatatatacaaccatgccttctgctgagatatcgtatgatgaagtagtcaccgcagccaaagttttatacgaaaagatagttggcagtgatgatgacttcttcgatttagattttgaagatgaggatgaaatacaggctagcggcgttgctaatgcggaacaatttgaaaatgccatagacgatgacgacgatgtcaatatggaaggttccggtgaatttgtaggtgaaatggagatatga

SEQ ID NO: 78800 - DNA, 2694 bp, Saccharomyces pastorianus
atgcctcaagcaagcacattcggatcgcacagtctagaagctcatcccttacacattcagccagctgttcatatcaaactcagtaaagaggaaaggtctcactacagggagcaatacgattcattaaagtatatttcaaattatgtttctgttttcgaccaagcgttaagcgacaatattgactctaggattagaaaagaaaatgaagccttactgaaaaaatattatgaatcaagaaaaccttttacttttaccagctttaggcaaggaagtgtaattagttcttctgattcttctacaggcttcactgagagaacaaagacctactgttttttgaacgatttcgtcagtaattgcgtaaatgaggtagatccatatacgctgaaaatgacagtaagaaatagaaacactgccttgaatatggagaacctcgatgatgaacgtaagagcaaagatgatatatacgattttgaagataatactgacgacgagtgtaatgccaagtgccatggtgctttccattattcgtcagaaagattggaaattcttcgctcacgttcgacaatatcgtactttaagtattataaaaagcttttgacggtagacctaagggacagtgatgttttaaaaaggcataatttatggatgccaatgatcactagaagatttagatttttattagtatcaagttcgaaaccggaagatgtaaggttaacaacgccgattccaacattctcggaatccgatttagacattttcaagaacaagacatgtccactctttatcaatggtacagactgtgttcctagaagttatgacacattttcgggttcttctgtaatcgcttcaatattttcagaatataaacttccatccctttcatatcattgttctgtcgagttgaacgaccaattatttattgtcggtggtttgatggcatgtcatagatatgatgaggaagcgcctgatctaaaggatttttacgtggatggcataaagaatttaccgccaccactaataccagagctaattaataacccatccatgattcctaatcctcacttgtactgtttttccttgacttcttccagactaacaagacctgatatttctggttacattccgcccccactggtgtgcacccagggctgtaaattaactgaaaggcatatctttttgtatggcgggtttgaaatcaagtcggaaacccaagttgatgataagggaagatattttataagaaaaagagcttttttgaacaatactggttacattctagatacagtgacgttcaatttctcaaagattgaattagtcgctcctccgtatcagtttgcaatttacaataatttctcgccaagatttggtcacatgcaggcatcaataagtaattccaacaataatgtatccaatgaaaataccacaacaagtgcgaaaggaagaaggtcgataagcccatatcgccaaggtaatggggatcacaaaatagatgatttggttggttcaccaggaagtacggactatttagaggatgatgcaattccacctgtaacaaacccaaggtctacagatagtctctcttccaaacattgtagcacagcaacacacatttgctcatctgttaataccattctgatctttggagggtatagtcagactggtgacgacaagtatgaagctatgaatgacatgtggaagataaatatccctgtagtttctcgtgggaaacgtaattattataaatttgcagatactgtaactgctactaagatccctattattgatgatccagaattatggccgagcagaagagccttttcagcgtgctgtgtaccagattattttaccaaggatgttgaacccatagaaacgagattactgaggaacttgaaaaatgacttctccatcgatttggtaatacgcccaggaaataagccttctcaaccactttttccgaatatcccacattcaaggaaggagaagaagagtggtcgcgatagtatgcatatttccaattctaataatagtactagtgaagacacttcttcaaagtctaccaggaataccacatccagtcctcccacaagccctaagcatacaccaccattgaatccatcaaaaaaatgtgcatcaatcggaagaactattgcgttccacggaggttcagatggctatgacgtttgcagcgatatgtggtggtttgacttcgattccgaaacctggactaaaatagacctttatgccaaaacacaagaggaatctgatggtttggtacctatcaacttatgtatggtaggacactcaatgacaactgtaggccacaaggttgtgcttatcgggggtctacgacaaggtgatgttgaccgaatataccgggacgaaactcttcctgaagaagtaatatcgggtgttccactcggaagtggcgttataaatgtcgtggatttaaatacacaatgccttcaaggttgcaagctaatacgaaatgatggagatactaaagaatctgtcattatggatcctcatgtcggcacaccccaccaagtattggccgtcgcaggtactatagaactggtcaaaggaaccatgaccttaataggaggtgtagtagccggtcgcgaagacatttcgagcctttacttgagaggagctgtcttacaattcattctaccaagcatgaatctagccaactaa

SEQ ID NO: 78801 - DNA, 1671 bp, Saccharomyces pastorianus
atggacagagatataagctaccagcaaaattatacctcaactggggcaactgcaacttcctcaagacagccctctacggacaataatgcagatacaaattttttgaaggtaatgtcagaattcaaatacaattttaacagtccgttacctacaacgactcaattccccacgccctattcttctaatcagtatcaacagactcaagatcattttgccaatacagacgctcacaacagttcgagcaacgaatcgtcgttggtagagaacagtatattaccgcatcatcagcagatacaacagcaacaacagcaacaacaacaacaacaacaacaacaacaacagcaagctctaggttcacttgtacctcctgctgtcacaaggacagatacaagtgaaactttggacgatatcaacgttcaaccttcttctgttttgcagttcggcaactctttacccagcgaatttttggttgcatccccagagcaagtcaaagaatttttgttggactctccgtccaccaatttcaatttctttcacaaaactccggcaaagacaccacttcgatttgtaacagattctaacggtgctcagcaaagcaccacagagaacccaggtcaacaacagaatgtttttagcaatgtcgatttgaacaatcttttgaagagtaatggaaaaacaccctcatcttcatgcaccggcgcattttcacgcactcctctgagtaagattgacatgaatctcatgttcaatcaaccgctgccgacatctccatcaaaaagattctcctccctgtcgttgacaccatatggaagaaaaattctaaatgacgtcggtacaccttatgcaaaagcattgatatcgtctaacagtgcgttagtggattttcagaaggcaagaaaggatattaccactaatgcaacatccatagggctggaaaatgccaacaacatcttacagagaacgccgctaagatctaacaataaaaaattatttattaaaaccccccaggataccatcaatagcactagcacactaactaaggacaacgaaaataaacaggacatatacggctcttcaccgactaccatccaattaaattcatcaataactaaatctatctccaaattggataactctagaattcccttgttagcttcgagatcagataacattctggattccaatgtggatgaccaattgtttgatttggggttgacaagattacctttatcaccaacaccaaattgtaattctttgcatagtacaaccacaggtacatctgccttacaaattcctgagctacccaagatggggtcttttagaagtgatacgggaatcaatccaattttaagttcaaacacagtttcttttaagagcaaatcaggcaataataattcaaagggtcgaatcaaaaaaaatgggaagaaaccttccaaatttcaaattattgtggcaaatattgatcaatttaaccaggatacatcatcgtcatctttatcatcatcattgaatgcaagttcgagtgcagggaattcaaattcaaacgtaacaaagaaaagagcaagtaaactcaaaagatcacagtctttactttctgattccggatcgaaatcacaagcaaggaaaagctgtaattctaaatctaatggaaatttattcaattcacagtaa

SEQ ID NO: 78802 - DNA, 1560 bp, Saccharomyces pastorianus
atgttcagtagatctacgctctgcttaaagacgtctgcatcctccattgggagacttcaattgagatatttctcacaccttcctatgacagtgcctatcaagctgcccaatgggttggaatatgagcaaccaacggggttgttcatcaacaacaagtttgttccttctaaacagaacaagaccttcgaagtcattaacccttccacggaagaagaaatatgtcatatttatgaaggtagagaggacgatgtggaagaggccgtgcaggccgccgaccgtgctttctctaatgggtcttggaacggtatcgaccctattgacaggggtaaggctttgtacaggttagccgaattaattgaacaggacaaggatgtcattgcttccatcgagactttggataacggtaaagctatctcttcctcgagaggagatgttgatttagtcatcaactatttgaaatcttctgctggctttgctgataaaattgatggtagaatgattgatactggtagaacccatttttcttacactaagagacagcctttgggtgtttgtgggcagattattccttggaatttcccactgttgatgtgggcctggaagattgcccctgctttggtcaccggtaacaccgtcgtgttgaagactgccgaatccaccccattgtccgctttgtatgcgtctaaatacatcccacaggcgggtattccacctggtgtgatcaacattgtatccgggtttggtaagattgtgggtgaggccattacaaaccatccaaaaatcaaaaaggttgccttcacagggtccacggctacgggtagacacatttaccagtccgcagccgcaggcttgaaaaaagtgactttggagctgggtggtaaatcaccaaacattgtcttcgcggacgccgagttgaaaaaagccgtgcaaaacattatccttggtatctactacaattctggtgaggtctgttgtgcgggttcaagggtgtatgttgaagaatctatttacgacaaattcattgaagagttcaaagccgcttctgaatccatcaaggtgggcgacccattcgatgaatctactttccaaggtgcacaaacctctcaaatgcaactaaacaaaatcttgaaatacgttgacattggtaagaatgaaggtgctactttgattaccggtggtgaaagattaggtagcaagggttacttcattaagccaactgtctttggtgacgttaaggaagacatgagaattgtcaaagaggaaatctttggccctgttgtcactgtaaccaaattcaaatctgccgacgaagtcattaacatggcgaacgattctgaatacgggttggctgctggtattcacacctctaatattaataccgccttaaaagtggctgatagagttaatgcgggtacggtctggataaacacttataacgatttccaccacgcagttcctttcggtgggttcaatgcatctggtttgggcagggaaatgtctgttgatgctttacaaaactacttgcaagttaaagcggtccgtgccaaattggacgagtaa

SEQ ID NO: 78803 - DNA, 1365 bp, Saccharomyces pastorianus
atgtcagagccagaatttcaacaagcttacgaagaagttgtctcctctttggaagactctactcttttcgaacaacacccagaatacagaaaggttttgccaattgtttctgttccagaaagaatcatacaattcagagtcacctgggaaaatgacaagggtgaacaagaagttgctcaaggttacagagtgcaatataactccgccaagggtccatacaagggtggtctacgtttccatccttccgtgaacttgtctatcttgaaattcttgggtttcgaacaaatcttcaagaactccttgaccggcctagacatgggtggtggtaaaggtggtctatgtgtggacttgaagggaagatctaataacgaaatcagaagaatctgttatgctttcatgagagaattgagcagacacattggtcaagacactgacgtgccagctggtgatatcggtgttggtggtcgtgaaattggttacctgttcggtgcttacagatcatacaagaactcctgggaaggtgtcttaaccggtaagggtttgaactggggtggttctttgatcagaccagaagccactggttacggtttagtttactatactcaagctatgatcgactatgccacaaacggtaaggaatctttcgaaggtaagcgcgtcaccatctctggtagtggtaacgttgctcaatacgctgccttgaaggttattgagctaggtggtactgtcgtttccctatctgactccaagggttgtatcatctctgaaactggtatcacctccgaacaagtcgctgatatttccagtgctaaggtcaacttcaagtccttggaacaaatcgtcaacgaatactctactttctccgaaaacaaagtgcaatacattgctggtgctcgtccatggacccacgtccaaaaggtcgacattgctttgccatgtgccacccaaaatgaagtcagcggtgaagaagccaaggccttggttgctcaaggtgtcaagtttattgccgaaggttccaacatgggttccactccagaagctattgccgtctttgaaactgctcgttccaccgccactggaccaagcgaagctgtttggtacggtccaccaaaggctgctaacttgggtggtgttgctgtttctggtttagaaatggcacaaaactctcaaagaatcacatggactagcgaaagagttgaccaagagttgaagagaattatgatcaactgtttcaatgaatgtatcgactatgccaagaagtacactaaggacggtaaggtcttgccatctttggtcaaaggtgctaatatcgcaagtttcatcaaggtctctgatgctatgtttgaccaaggtgatgtattttaa

SEQ ID NO: 78804 - DNA, 369 bp, Saccharomyces pastorianus
atgaaaaacagaaaattttccaatcttctcttacttagattacgtatactttgctttaacaagaagccggcctttgctgctacttcttacgctttcttcttccgcaatttttcagtgctgattttcattatggtacctgatgaaaaagaaaacggcgcagcagctgataacagcttctctctgctgattggacgtggggtcgtactatttcttttttattgccccaccgcactgaaaatgcatgggccggttccggcgcattggttctgcgataagaatatcgaggccatccaatcagatggtcagataaggttattaagatcaggcccgtttccatggagtcatggaacctgcataaggggagcctga

SEQ ID NO: 78805 - DNA, 156 bp, Saccharomyces pastorianus
atgacattccatcttgggtggacaattttatggtataatcaagcgtatttagaagtttgggcgacagtatttcaagacgagatgcataagtattctcttcatcctcaatcccgcgatgctaaaacaaagttttgttgttgcattccatttaagtag

SEQ ID NO: 78806 - DNA, 1548 bp, Saccharomyces pastorianus
atgtcaactagctcctccgtaacgcagaaaaacttggatacaaacgcggaagccttgaaaaaggagaatgaagtattatcagagtttgatattcaggatgagaggcctaaatcccttttatgggagagtgcctttgtcggagtgctgtgctctgcccagctaatgactcaggcaggacttggacaatcattagcgccgcttcacatcatcggtaacagttttggaacaacgaatgctgggcaacttagttggtttgcttccgcatattcgctaactgttggtacattcattttaattgctggaagactcggagatatcttcggacacaagaaattctttgtccttggcttcttttggtacgcactttggtccttacttgctgggtttagcgtctactctaatcagattttttttgactgctgtcgtgcatttcaaggcatgggtccggcctttttgttgccaaatgccattgcgattctcggacgcacatacaagccaggaagaagaaaaaacatggtctttagtctgtttggtgcttcagcacctggtggcttcgtccttggggctgttttctcatccatgttgggtcaactggcgtggtggccatgggcttactggataatgggtattgcatgctttgttttagctgtagcaggttactttgtaatccctcacacccccatgccaagccgcgatgcctcatctttcaagttgttggaacgaatcgattttgcagggtcagttaccggcgttgttggattaattctctttaatttcgcttggaaccaaggccccgttgtgggttggcaaactccatacacatatgctcttttgatagttggaacctttttcttggttatttttgcatatatcgagtcccgagcagctttccctctgctaccatttgctgctctttctagtgatactgcttttgtactcagctgcatagctgcgggatgggccagctttggtatttggatattctatacatggcagttcatggaagactcaaggggccaaaccccccttctttctagtgcacagttttcacctatagcaatcagtggattttgtgcagccgtgacgacaggtttccttctaagccatacacccccaagcacagttatgctttttgcgatgacagctttcacagtcggaactatattgattgctacggcccccgttcaccaaacgtattgggctcaaacgtttgtgtcaatcattgttatgccttggggaatggacatgtcctttccggccgctacaataatgcttagtgactcgatgccacacgaacaccaaggtcttgcagcctctttggttaatacggtggtaaactattcgatatcgataggtttgggtattgcaggtacaattgaatctagagtaaatgacggaggtgccaagcctttgaaaggatatcgttgttcgtggtacatgggcatcgggttgagcggacttggcatttttgtcgcagcaacgtatgcatggagcacttttatgaagtctaaaaaaaggatctccgaaaagcagcattttatagaataa

SEQ ID NO: 78807 - DNA, 339 bp, Saccharomyces pastorianus
atgaacttattctataaaatgctgcttttcggagatcctttttttagacttcataaaagtgctccatgcatacgttgctgcgacaaaaatgccaagtccgctcaacccgatgcccatgtaccacgaacaacgatatcctttcaaaggcttggcacctccgtcatttactctagattcaattgtacctgcaatacccaaacctatcgatatcgaatagtttaccaccgtattaaccaaagaggctgcaagaccttggtgttcgtgtggcatcgagtcactaagcattattgtagcggccggaaaggacatgtccattccccaaggcataacaatgattga

SEQ ID NO: 78808 - DNA, 1641 bp, Saccharomyces pastorianus
atggcatccccaggatcgacagcagtaccacacaagcgacaaagagtccgaaaggcttgcgtgccctgtagggaacgtaaaaggaaatgtaatggcaaatctccatgtgaaatgtgcgttgcctatggatatgtatgtcattatattgacagtcgtgtcccttcggcatcacctcaagtgcaacaagtaggtgaaacatctcctgatacggagagcagaccttttgttcttccgggtatacatagaaacgaacaaccgcagcctataaatacacagaacgttacaagtcaaaacattgtagatccaactaagtctagatacacgatccagcactctgcagttgctttcccccgctgtcttggtctcgaactccgatcaactaatcctccacgcctacattccttcgcttggcattgcggaatcagaccggaagaaaatccaaactcacatgcccttctttctgatttagttacaaaggaagagtattaccgtatctcaaaagtttatttttcagttgttcacccgatatttgatgttgttaatccagagcaactggcaaagaatgttgaaaaatactgggatggcgacgtaaaaaccttagagtatggggctgttattgcaggggtgatagctttaggatcattttttatgggaagtcttggccatccccgagagatggatatagtacaatatgccaaaggcatccttgatgacccgactttcagtcgcattcccacggtggagcaagtctccgcatgggttttgcgcaccatttacctgcgagccacttcgaggccccatgtagcatggttagctagctgcgtaaccatccatctttctgaggcaattggcctgcatcatgagattgacagagaggatatagcgatatcgaacaacgttccaccaaaaagaactactgtagtgagcgaacacactagaagattattttggtgtgcatggtcaatcaataccattctttcatatgactatgggcgctcaagtgttacgctgaatagaattacttgcaagccagttaaggagacggacggtaattttacagctcatttagtcgcgttagcacacctgattccccaagacagcgtgaacgcaaacgcagcgcaattgttgcaggccctggcggccgttcatgaatcaccaaacgcacatccgtttttgtcgttgaccaagggtgatatatgcctctctttgtatagaagacttcgtttgctgaatcatattcttgataaaaatgttgttttacaaataattgatatcggcaacactgcgctatcagcagcatacgctcttgtaaaactcgatcaagcatggtggaatgtgttgagcacctcattccagtacgtctgtgtccttcttgccatcgacacaccggaaagtctttcacatgttgctactgccatgaaaacgttagataatattactcaaattctcggtacacatattgcttttgaagcacaaaagaccgcaaaactgcttcttgaggattccatgaaaaaaaaaagacaagaaattcagcagcttgagcaggcaactcaccagagatctaatcttgaaactactcacctactcgatattgactgggatgctttgctagatccatcagacacgttaaactttatgtaa

SEQ ID NO: 78809 - DNA, 2136 bp, Saccharomyces pastorianus
atgtattgggtcctcctttgtggttctattttgttatgctgcttgtcaggagcaagcgcctcccctgctaagacaaaaatgtacggcaagttaccactggttttgacagatgcctgcatgggagttctcggcgaagtaacctgggagtatagtagtgacgatttatattcctcaccagcatgtacatatgaaccggcattacagtcaatgttgtattgtatttacgaatcattgaatgaaaagggttattccaatagaacctttgaaaaaacctttgctgctatcaaagaagactgcgcatattacactgataaccttcagaatatgactaatgcagatttctataatatgctgaataatggaacaacatacataatacagtattctgaaggtagcgcgaatcttacgtatccaatcgagattgatgcccaagtgagagaaaactattattattcttaccatggtttctacgccaactacgacattggtcatacttatggtggtattatttgcgcctattttgtaggtgttatgattcttgccagcatactccattatctaagttacactccgtttaaaactgccttatttaaacaaagacttgtaagatatgtgagaagatatttgacaatacctactatctggggtaaacatgcgtcgagcttttcttaccttaaaatttttacaggcttccttcccacacgatctgaaggcgtcattatacttggatacctcgtgcttcatacagtttttctggcatacgggtatcaatatgatccttacaacttaattttcgactctcgtagagaacagattgctcgatacgtggcagatagaagtggtgtcctggcatttgcacattttcccctaatagctcttttcgcaggaaggaacaattttctagaattcatttctggagtaaaatatacctctttcataatgtttcataagtggttgggaagaatgatgtttttagatgctgtgattcatggcgctgcttataccaattattccgtattctacaaagattgggcagcaagcaaggaagagacatattggcaatttggagtagctgctctttgtatagttggtgttatggtgtttttttctttggcaatgttcagaaagtttatctatgaagccttcttatttctccatattgtgcttggcgcattgttcttttatacgtgttgggagcacgtcgtagaattgagtgggattgagtggatatacgctgctattgctatctggactattgataggctaattcgaattgttagagtatcttatttcggtttccctaaggcttccttacagttagttggcgatgacatcattcgagtcacagtcaaacgaccagtaaggctatggaaagccaaaccaggacagtatgttttcgtttcattcctacaccacctgtatttttggcagtcacatcctttcacagtcttagattcaattatcaaagatggtgagctgactattatcctgaaggaaaaaaagggagtaacaaaacttgtcaaaaagtatgtgtgttgcaatggaggtaaggcatctatgagactagctatagaaggtccatatggttcttcatctccggtcaataattacaataatgtattgttactcactggaggtaccggtttgcctggacctattgcacatgcaattaaacttggaaagacgtcagcggctgctggaaaacaatctgtaaaattagtgattgcagttagaggattcgacgtactcgaggcttataagccggagttgatgtgtttagaaaatctgaatgtacagcttcacatctacaacacaatggaagtcccatcattaacccctagtgatagtttagatatttctcaacaggatgagaaggctgatgaaaaaggcactgttgtggcaactactttagaaaagtctgccaatccacttggttttgatggtgttgttttccattgcgggcggccaaatgttaaggaacttctacatgaagcggctgaattgagtggctcattatctgtggtttgctgtggacctcctatttttgttgacaaagtgaggaatgaaaccgcaaaaatagttttagataagtctgcaaaagccattgagtactttgaagagtatcaatgctggtga

SEQ ID NO: 78810 - DNA, 495 bp, Saccharomyces pastorianus
atgaccaatgaaggaataggtataaatagagatacttcaactatatgccttcgagaatatgtctttattcatttctttcctgttaagcttatatcagcactaacaaacaaaacaaatacaatggtcaaattaacttcaatcgctgctggtgttgccgccatcgctgccggtgttgccgctgctccagccactaccactctatctccatctgacgaaagagtcaacttggtcgaattgggtgtttacgtctccgatatcagagctcatttggctcaatactacttgtttcaagcagctcatccaactgagacctacccagttgagattgctgaagctgttttcaactatggtgacttcaccaccatgttgactggtattccagctgaacaagtcaccagagtcatcactggtgtcccatggtactctaccagattgagaccagctatctccagtgctctatctaaggacggtatctacactgctattccaaaatag

SEQ ID NO: 78811 - DNA, 714 bp, Saccharomyces pastorianus
atgactccaaaaagagcgctaatatctcttacttcataccacggtcccttctacaaagatggtgcgaaaacaggcgtttttgtagttgagattttgcgatcgttcgatacattcgaaaagcatggtttcgaagtggacttcgtttctgagactggtggatttggctgggatgaacattacttgccaaagagctttattggtggcgaagataagatgaactttgaaacgaaaaattccgccttcaataaggcgttagcgaggatcaagaccgcaaatgaagtcaacgccagcgactataaaatattctttgcatctgctggacatggtgctctatttgactatcccaaagctaaaaatctgcaagatattgcatccaagatatatgccaatgggggtgtgatcgctgccatctgtcatggaccgctccttttcgatggattaatagatatcaaaacaacaagaccattgatcgaaggcaaagctataacaggttttccactcgagggtgaaatcgccctgggagttgacgacatcttgaggagcagaaaattgacaacggttgaacgcgttgcaaacaagaatggagccaagtacttggcgccaatccatccctgggatgactactctattacagatggaaagctagttacgggtgttaacgcaaattcttcctattcgaccacaattagagctataaacgtattatatagctga

SEQ ID NO: 78812 - DNA, 1128 bp, Saccharomyces pastorianus
atgattttcaatccggtcatatcaaatcacaagttgagccattatattcatgttttttgtacattcaccacgttctgcatattaggtactgaaacacgtcaggctataacggcgctttccacctacactccggccttcgttactgctccgaccgttctctggtctaattgttcatcctgcatgctaatggggattatgcaatctttaaatgcttacacttggatgaaagatcaccaagtcttgtttttaggtgtaactactgggtactgtggtgccctgtcttccttttctagtatgctgctagagatgttcgaacactctacaaacttaactaacggtaatatcgctaaccacacaaaactgccgaacagagcttacggtataatggagtttttatctgtcttgctcgttcatcttatggtttccatgggtagtcttattttcggtaggcaacttggtaaggaggttattgttgcttatggatctagttcgttttcgaagccatatacccctccctcagacactgtaaaggaaaatgctggtgatgttgatacacaagaaatggaaaaaaatattctagagtttaaattcaaaactccagcaccattttttaagaaattttttgatattgtggataaactcgcgtacgcactagcttttccattaattattttgtttgtggtgctgtgtgcgtattatgagaactattcgaggggcaagtggacactaccatgtctatttggaattttcgctggtttcctaagatattggttggcagaaatgtttaataaaacaaacaaaaagtttccattgggtactttcttggcaaacgttttcgccactttattgattggcatatttaccatggtgcaacgtggtaaaaaacacttttctacggacgttccaattgtgaactcgttgaattcatgtcatattgtttctgcgttaatatccggattttgcggcactttgagtaccattagcacgtttatcaatgaagggtataagctatcatttattaacatgcttatttattatactgtttcgattgcaatttcatattgcttattggtgataactctcggatcctatgcttggactagaggattgaccaacccgatttgttag

SEQ ID NO: 78813 - DNA, 303 bp, Saccharomyces pastorianus
atgacagataacacaacttccagcgacttaataaagaatgtcgaaacggctcgctccactatcgatggtttaattgaatctctagggtggattgaactaaattaccgttgtgagaggcaatgcaattgggatgaagtttgttacactccttcctggggcccatctccaatgggtatgactgaaccaggttcccacaatgagggatttggaacccactttgatgaatctcgacaaaggttggttattaacagtaaactacagtgtatcaatataaatgatttgatggttaatcgtaatcattag

SEQ ID NO: 78814 - DNA, 1461 bp, Saccharomyces pastorianus
atgcgattccatcgtcaaggtatctcagccatcataggcgtactactcattgtactgcttggtttctgttggaagttatctggatcttacggcatagtatcaactgccctaccacacaatcaatctgcaattaaaagcacagacttaccttctatacgatgggataattaccatgagttcgtcagagacattgattttgataacagtacggctatctttaattccattcgggctgctttaagagagtctccatcggatatacatcctgtcggagtatcttattttcccgctgtaattcccaaaggaactttaatgtaccatgccggatcaaaagtgccaactaccttcgaatggctagctatggaccacgaattcagctactctttcggcttgaggtcaccatcctatgggagaaaatctttggaaagaaggcatgggaggttcggcaatggcaccaacggtgatcatccaaaagggccaccaccaccaccaccaccagacgaaaaaggtcggggttcacaaaaaatgcttacttatagagcagcacgggacctcaacaaatttctctatcttgatggggcttctgctgcgaaaactgactcaggagagatggacacgcagctaatgttgtcaaatgttattaaagagaaattgaaccttacagatgatggtgaaaacgaacgaatggccgaacgactctacgctgctagaatatgcaaatgggggaagccattcgggcttgacggaattatcagggtagaggttggatttgaggtcgttttgtgtgatttttcggctgataacgtcgaacttgtttcaatgttagaaatggtccagcctaaccagtacctaggcttaccagcacctaccgtaatatcgaaggaagaaggttggcctctggatgaaaatggaaacctagttgaagatcagctaacagatgaccaaaaggcgattctggaaagagaagatggttgggagaaggctttttctaatttcaacgcagttaaaagcttcaatcagttgagagcgggtgcagcgcatgacaacggggagcatcgaatccatatcgactataggtacctagtgagcgggataaacaggacttacattgctcctgatcctaacaacagaagattactcgatgaaggaatgacatgggaaaagcaattggacatggtagatgacttagaaaaggctctggaagtcggatttgatgccacgcaaagtatggattggcagttagcatttgatgagcttgtccttaaatttgctccattactaaaatctgttagtaacatactgaacagcgatggtgatattaatgagtcaattgccatcaatgcaacagcactcacattgaacttttgtctaccaatatgtgagcccataccaggccttaaaaacggatgcagactttttgatttggtcatctgctgtcagcgttgtcggagaaattgttga

SEQ ID NO: 78815 - DNA, 438 bp, Saccharomyces pastorianus
atgtcgaagggaaaggttttgctggttctttacgaaggtggtaagcatgctgaagagcaggaaaagttattggggtgtattgaaaatgaacttggtatcagaaatttcattgaagaacagggatacgagttggttactaccattgacaaggaccctgagccaacctcaacggtagacagggagttgaaagacgctgaaattgtcattactacgccctttttccccgcctacatctcgagaaacaggattgcagaagctcctaacctgaagctctgtgtaaccgctggcgtcggttcagaccatgtcgatttagaagctgcaaatgaacggaaaatcacggtcaccgaagttactggttctaacgtcgtttctgtcgcagagcacgttatggccacaattttggttttgataagaaactataatggtggtcatcaataa

SEQ ID NO: 78816 - DNA, 711 bp, Saccharomyces pastorianus
atggtggtcatcaataagcaattaatggtgagtgggatattgccggcgtggctaaaaaatgagtatgatctggaagacaaaataatttcaacggtaggtgccggtagaattggatatagggttctggaaagattggtcgcatttaatccgaagaagttactgtactacgactaccaggaactacctgcggaagcaatcaatagattgaacgaggccagcaagcttttcaatggcagaggtgatattgttcagagagtagagaaattggaggatatggttgctcagtcagatgttgttaccatcaactgtccattgcacaaggactcaaggggtttattcaataaaaagcttatttcccacatgaaagatggtgcatacttggtgaataccgctagaggtgctatttgtgtcgcagaagatgttgccgaggcagtcaagtctggtaaattggctggctatggtggtgatgtctgggataagcaaccagcaccaaaagaccatccctggaggactatggacaataaggaccacgtgggaaacgcaatgactgttcatatcagtggcacatctctggatgctcaaaagaggtacgctcagggagtaaagaacatcctaaatagttacttttccaaaaagtttgattaccgtccacaggatattattgtgcagaatggttcttatgccaccagagcttatggacagaagaaataa

SEQ ID NO: 78817 - DNA, 1764 bp, Saccharomyces pastorianus
atggatatgctcaaaagggaaaatgaatcggacaagtttacgataatagagacagaatctactacgataccaaatgactcggatagatctggttcactgatcagaagaatgaaggattccttcaagcaaagtaacctgcatgtcattccagaagaccttgaaaacagcgaacagacaaagcaggaaaaaatccaatggaaactagcttctcagccctaccaaaaagtcttgagccaaaggcacttgaccatgattgccataggtggtactttggggacgggactgttcattggtttaggttattctttggcatctgggccagccgctttgctaatcggttttttgttagttggtacttcaatgttctgtgtcgttcagagtgccgcagagctttcctgccaattcccggtttctggctcatatgccacacatgtcagtaggttcatagatgaatcggttggctttactgtggctacaaactatgctttggcttggctgatttcttttccaagcgaattaattggttgtgcacttactatttcatactggaaccaaacggttaatccggctgtttgggtggccattttttatgttttcattatggtactgaacttgtttggtgtgagaggctttgccgagactgagtttgctctgtcaatcattaaggttattgctatatttattttcatcattattggtatcgtccttattgccggaggggggcctaactctactggttatattggcgccaaatactggcacgacccaggtgccttcgcaaaacctgtcttcaagaatttgtgtaacacattcgtttctgctgctttttcctttggtggtagtgagttagtgctgttaactagtacagaatctaaaaatatttcagctatatcacgtgctgccaaaggtacgttctggagaatcgcgattttttacattactaccgttgtcattattggatgtctcgtaccttataacgaccccagactgctcagtggttcgaacagtgaggatgtatctgcctctccctttgttattgctttgagtaatacaggatcaatgggtgcaaaagtttccaactttatgaatgtcgttatccttgttgcggttgtgtcagtttgcaattcttgcgtttatgcttcttcaagactaattcaagctttaggtgcatctggccaacttccttcggtatgttcctacatggacagaaagggtaggcctttggttggcattgggattagtggtgcatttggtcttttaggttttcttgtggcctcgaaaaaggaggacgaggtcttcacttggcttttcgccctttgttccatttcatcattcttcacctggttctgtatttgtatgtcacaaattagatttaggatggctttgaaagctcaaggaagatccaatgacgaaatagcttacaaatccatactgggtgtttatggtggaattttggggtgtgtgctaaatgcattgctaattgcgggtgaaatatacgtatcggccgccccggtcggtagccctagctccgctaaagccttctttgaatactgtttgagtattccaatcatgattgttgtttattttgcacataggttttatcgaagagattggaaacacttctacatcaagaggagcgagatcgatctggatactgggtgttccgtggagaatctagagcttttcaaagcacaaaaagaagctgagaaacaactcattgcttctaagccattctattacaaaatctacagattttggtgttag

SEQ ID NO: 78818 - DNA, 978 bp, Saccharomyces pastorianus
atggcacgtcttcctctaaagcagttcttagcggataaccccaaaaaagttcttgttcttgacggtggtcaaggaacagaactggaaaacagaggtatcaaagttgcaaatcccgtgtggtctactattccatttattagcgaatcattttggtctgatgagtcatctgctaacagaaaaattgtcaaagaaatgttcaacgatttcttgaatgctggcgcagaaatattgatgactacaacatatcaaacgagttataaatcagtttctgaaaacaccccaatcagaactttatccgagtacaataaccttttaaacaggattgtcgatttttctcgtaattgtattggcgaagacaaatatttgattggctgtattggcccatggggtgctcatatttgtcgtgagtttacaggcgactatggtgctgagccagaaaatattgatttctaccaatacttcaagcctcagttggagaatttcaataaaaatgacaaattggatttgattgggtttgaaaccattcctaacatccatgaactgaaggctatcttatcttgggatgagagtatcctgtctagacccttctatatcgggttgtctgtgcatgagcacggtgtcttgagagacggcactaccatggaagaaatcgcacaagttattaaggacttgggcgacaaaataaatcctaacttttcgttcttaggaatcaactgcgtcagcttcaaccaatcacccgacattcttgagtctctacatcaagcactaccaaatatggccttgcttgcttatccaaacagtggtgaagtttatgatactgaaaagaagatatggttgccaaatagcgataagctgaacagttgggatacggttgttaaacagtacattagcagcggtgcccgtatcattggtggttgttgcagaacaagtccaaaagacatccaagagatttctgcagccgtcaagaaatacacgtaa

SEQ ID NO: 78819 - DNA, 1554 bp, Saccharomyces pastorianus
atgactacgtttaggccactatcaagttttgaaaaaaaaattctcactcaatctttgaatgaccaaagaaatggaactattttttcgagtacatattcaaaatctttaagtagagaaaatgacgctgactggcattctgatgaagtcacgctcagaacaaattcttccaaagatgattctcgtctgactctgcccctaatagcaacaactttgaagagattgattaaatcgcaaccggcattgtttgcaactgtaaacgaagaatgggaattcgagccattgaagcagctgaaaacttccgatattgttaatgtgattgagtttgaaaccataaaagataaggaggtcaattgccattggggtgttccacctccttatctcttgcgtcatgccttcaacaagactagatttgttcccggatcaaataaacctttatggacactatatgtaattgacgaagcgctattggtttttcatggtcacgacgtattgtttgatatattttcagcggctaactttcacaaattatttttaaaagagttaaacgaaatcagcacagtaacacactctgaagataggattttgtttgatgtcaatgacatcaatctctcagaattaaaacttcccaaatcgatatatgatagcgcaaaattacacctgcccgctatgacaccacaaatcttccacaagcaaactcagtcatttttcaaatcaatatactataacactttaaaaagacctttcggctatttaaccaatcaaacttccctcagctcgtcagtatctgcaacacagctgaaaaagtataatgatattctaaatgcgcacacctcattatgcgggacaacagtatttgggatagtaaacaaccaaaggtttaactatttaaagtcaatcgttaatcaagagcatatatgtctaagaagtttcatctgtggtattgtaatgatatgtttaaaacctctcgttaaggatttcagcggtacaatagtatttactattcccataaatttaagaaaccacttaggcttaggtgggtcattgggtctcttcttcaaagaactaagggtcgaatgtccactttctctaattgatgacgaactttccgccaacgaatttttgaccaacagtaacgataacgaggataatgatgatgagtttaatgaaagattgatggaatatcaatttaataaagttacaaagcacgttagcggttttattatggcaaaactgaggagttgggaaaagaatgggtttaatgatgacgatataaggaggatgaagtatgacaatgacgacgatttccatatccaaaattcaaggacaaaattgattcaaatcaatgatgtttccgacatatcgctatcgatgaacggcgatgacaaatctttcaaaattgtaagtacgggatttacaagttcgataaatcgccccacattaatgtctctttcctatacatactgtgaagagatgggcctgaatatctgtattcactaccctgattcgtataatttagaatcttttgtagaatgcttcgaatcctttattgaatag

SEQ ID NO: 78820 - DNA, 189 bp, Saccharomyces pastorianus
atgtctgcctggaggaaagctggtatatcatatgctgcatatttgaatgtggccgctcaggctatccgttcttcattgaaaactgaattacaaaccgctagtgttcttagcagatcgcaaacagatgctttttatacccaatataaaaatggcactgcagcttctgaacccactccaataacaaaatag

SEQ ID NO: 78821 - DNA, 2463 bp, Saccharomyces pastorianus
atgaaaacttacgtacttttatacgggaaactaataatgactacaatgatattgaatactggccgcttcgaagagtggtataaagtttgtatcattgcattaaaagaaaaagaaatatatgtcccatcatcgccaatcgcaatgttgaatggtcgtttaccacttttgcggctgggcatatgcagaaacatgctgtcccgtccccgactggctaaactgccatctataaggtttcggtctttggtcaccccttcttcatcgcagctcattcctctcagtcggttgtgtttaagttcacctgcagttggaaaatcactaattttacaaagttttagatgtaattcatccaaaacagttccagaaacttctctgccttcagcctctcccatatctaaaggatcagcaaggtcggcacatgcaaaggagcaatctaaaactgatgactataaagatataataaggttatttatgttggcgaaacgggattggaaactgcttcttacagccatacttcttttaaccatatcatgttccataggcatgtctattcctaaagtcataggtattgtccttgacacacttaagacgtcatctggatcagatttttttgatttgaagataccgattttttctttgcctttatatgagtttctttccttttttactgttgctttactgattggttgtgctgctaattttggtagatttatattattgaggatactaagtgagcgtgttgttgcacgcctaagggcaaatgtcattaaaaaaacgcttcatcaagacgcagaattcttcgacaaccataaagttggggatttaatttctcgtttaggatctgatgcttatgttgtttcaagatcaatgacccagaaggtctcggatggggtcaaagccctaatttgtggggttgttggcgtggggatgatgtgttctttgtcacctcaactatcaatattgttactattcttcactccacctgttctttttagtgcctcagtgttcgggaagcaaattagaaacacctctaaagaccttcaagaagctactggtcaattgactagagtcgctgaagaacaactctctggtatcaagacggttcagtcgtttgttgctgaaggtaatgaattgtctaggtataacgttgcaattagagatatttttcaggtgggaaaaactgcggcatttacaaacgcaaagttttttactacaactagtctcttaggtgacctaagttttttaaccgtccttgcgtatggctcctatcttgttttacaatcacagctctccattggtgatctgactgcatttatgctgtacacagaatatacggggaatgcggtattcggcctttctaccttctattcggaaattatgcagggtgctggggccgcttccaggttgtttgaattaacagataggaaaccttccatttcaccgactgtgggacacaagtataaaccagatcgtggtgttatcgaatttaaagatgtttcatttagctaccctacaaggccttctgttcaaatattcaagaatttaaattttaaaattgcgccaggatcgagtgtttgtattgtgggcccttcaggtcgtggtaaatctacaattgcactcttactgctaagatattataatcccactactgggactattacgatagataaccaagatatctctaaattgaattgtaaatccctaagaaggcatattggtatcgttcagcaagagccggtactgatgtcaggtactattagggataatatcacttatgggttgacatataccccaacaaaggaagaaatcaggtcagtagcaaagcagtgcttttgccataactttatcacaaaatttccgaacacatacgatacggtaattggtcctcacggcaccttactaagtggaggacaaaagcagcgtattgcgattgcaagggctctaatcaaaaagccaactattttgattcttgatgaagctacatcagctttagatgttgaaagtgaaggagccattaactatacgtttggtcaactaatgaaatcaaaatcgatgactattgttagcatcgcgcacaggctaagtacgatcagaagatcagagaatgttattgtccttggccatgatggatcagtggtagaaatgggcaaattcaaagaattgtatgcgaatccaacaagtgctttatcgcaattacttaatgagaaagcggctcctgggccatctgaccaacaactgcaaatagagaaggtcatcgaaaaggaagatttgaatgagagtaaggagcatgatgaccagaaaaaggacgataatgacgataatgataataatcatgataacgacagcaataaccagtctccagagacgaaagacaataattcagatgatattgaaaaatctgtcgaacatctcctgaaagacgcggcaaaggaggctaatccaattaagatcacaccacaaccgtga

SEQ ID NO: 78822 - DNA, 1935 bp, Saccharomyces pastorianus
atggataatgatggacccagatctatgaccattggggatgacttccaagagaacttttgtgaacgtttagaaagaattcacaatacattacattcaataaacgattgcaactcattgaatgagagtaccacaagtatatcagagacattgttagttcaattttatgatgatttggagaacgttgcctcggtaattcccgacttagtcaacaagaaaagactgggaaaagacgatattttgttgtttatggactggttattattgaaaaaatatatgctatatcaatttattagtgacgttcataatattgaggaaggttttgctcatttgttggatttactagaggatgaattctcgaaggacgatcaggatagcgacaaatacaatcgatttagcccgatgtttgacgtcatagaagaatctacacaaattaagactcagttggagccatggcttactaacttgaaggaattattggatacgtcattggaatttaacgaaatttcaaaggatcatatggatacattacataaaatcattaatagcaatatatcgtattgtctggaaattcaggaagaaaggttcgcgtccccgatacggcatactccatcatttaccctagaacaactagtcaagttattaggaacgcatacggagacaactgagccaaaggtaccaaaattttctccggcagaagatattttatcaagaaagttcttgaacctaaaaaaaaatatccccccaattgaaaaaagtttgactgatatcctacctcaaagaattgtgcaatttgggcaccggaatataacaaacataactactttgcaaacaatcttgcaaaaaaaatacgagctgataatgaaagattatagatttatgaattcagagtttagggaattgaaagtcgaactaatcgacaaacgttggaatatactctttattaatttaaatcatgaactattatacattcttgatgagatagaaaggttgcagtcgaaattactgacaacaaagtataccaaagatatcactataaggctcgagaggcaattggagagaaaatcaaaaactgtttctaagacattcaatattatttacagagcattggaattctcgcttttggacgctggcgtcgcatcgaagacaaatgaattagctcaaagatggctgaatatcaagcctacagcggataaaattctaatcaaatcctccgcttcaaacaaaatagctactagcaagaagaagattccaaaaccgaaatcattaggctttgggcgaccgaatagtgttattggaactataacccaggatttccaggagagagtcgccattaatgaaggtgacagtaataaaacaccggaaaattcaactacagtggctttgaaaggtaaaaagcttggtaaagcgttactgcagaagatgaatattaaacctgcaacaagcccaaattcatcaaatgcgattaatccattttttgatccggagtcgccaaacaaaggaaaactgatactaagtagtgttcctcccttaccttatgacgaaaccgatgaaaccaccctccgtgtttctcgtggggaaaatgaaaagtcaccagactccttcattacatctcggcatgaaaataaagtacagattacagaaactcctttgatggcaaagaataagtctgtgcttgacatcgaaaaagataaatggaatcattaccggtccttgccctctaggatccctatatacaaggataaagtggtgaaagtcaccgtagaaaacacaccgatagtaaaggttttccagactccgccaacaaaaatcacgacacctaatagtcaagtttgggtcccttcgacaagaagaagaacccgattgaggcctcccacccccttatcacagttactttcaccaagagaagggcgtttagataaaaccccaacttattga

SEQ ID NO: 78823 - DNA, 2610 bp, Saccharomyces pastorianus
atgactgaaagtgctatagatgaccaaaggtttaatcttacaaaggagttacaacgacactcatgcagagatcaagggaaaataacacaaaaggatgatgctttagattttataagttacagttcttttcaatcctcttttaatactgaccaaaaaagcgcgaacaatggaagtactgtgagaagaagcataaggtcgatttttagaagagcagccgaattgcccagagtccatatggggcctcttacttattcacatgggataaatgagcttgttaacaagaaattaagaaaagactgtgatctcagcacgctatgtcgcgtattgcaaagaggaatcaggatgattaggatgacaagaagaagaaggaagttctatgaatttaaattaatcaataacaacgggcaaataatatggaaagatggttcgaagtatctggaattagactccgttaaagacatcagaatcggtgatatggcgagtacttatcaagaggaagtagatccgaaaagattgagatcggacagtaaactttggattactattatttataaggtttccaacaaattgaaagcgttacacgtagttgctttgaatgaattggactttaacacattcttaagctgcatttgcggtttagtgaagttaaggagggaattaatggaaagcatacttttgcctgataattcgcaattcgctaggatacattggcaaattactgtttctgaaaaagaggaagatgagaaaaaggacacattgagctttgcagatgtgaagaaactatgtgataaatttcatatttatgtgtcaactggtcaattgttagagtttttccaattagcagacatcaatcataacggactattaaattattttgaatttgaaaagttcattaaaatcttaaagaataggaaagaggtaaatatgatttggtctaaatttacaaaacctccacactcccacttatcattcgaaaatttttttcaatttttaattacagagcagcatgagcaagtggatcgtcaaactgcatggtcatattttattaagtacagagaaccgactcagctgacgatggggcaagatggttttaccaagttcttgaaggagcaaccatatttggtggaggttaaagaggagttatattcaaagccattaaaccattattttattgcatcttcacataatacttatttattggggaaacaaattgcagaaactccatctgtggagggatatattcaagtcctacaacaaggttgtaggtgcgtagaaattgatatatgggatggtgaaaatgggccagtggtatgccatggatttttaacgtcagctattcccttaaaaacagttatacgcgtgataaagaagtacgcttttataacgtctccgtatcctttgattatttcactggaaataaactgtaacaaggataatcaaaaattggcaagcctgataatgagagaggttttagcagaacagctgtactttgttggcacaagaactgataaactgccatcaccaagggaattaaaacataaaatactgttgaaatccaagaagacgagtgaagcaactagaggtcttagcgttaatgagccatttccatcttcttttagttcttcttacgaatcagctaatgaacaggaattaagaatgaaagatgactccacgaacagtagtagcgcaacaaattcttctagtatgcaacgcatcaaaagaattggattaaaaaagcacgttgatataattaatgatgtttctaacatttctggaatacatggcatcaagttcaggaatttctctttaccagagtccaaaacgatagcgcattgtttttcactgaatgagcgcaaagtagaatacatgataaaagacaaacacttaaaattatcgttggataaacataatagaagatatttgatgagagtctatcctcacgttttacgatacaaatcatcaaattttaacccaatacctttttggaaggccggtgtacaaatggtggctacgaattggcaaactaatgatattggacagcaacttaatctggcaatgtttcaaatattagatcaccaacctgatggaagttttaaatcaggatacgtgctaaaaccaaaaaagttgctacctgtagtaacaaaggcgaaaatgattccattaatttacgaacattttgaaaatggtagtgatcctgttactgttaaaattcgaattttatctacacagttattgcccagattgaatgatacatcgccaagcagaaataacaccaattcctttgttaaagtggagtttcataccgatgacgagccgacaatgcccatctcaatcgataagggtacaaggatttctgccactgaagcatccactaagagttctcaagggaatggattcaacccaatatgggatgctgaagtttctatcacattgaaagatacagacctcacatttataaaattcatggttatctctgaagagacccagattgcatctgtttgccttaagctgaactatttgaggatgggatatcgtcacattccgttgtttaacatggagggggaacaatacatattttgcactttatttattcatacacaaattttatag

SEQ ID NO: 78824 - DNA, 630 bp, Saccharomyces pastorianus
atgatatcaccatcaaaaaagagaactattttatcaagcaagaatataaaccaaaaaccacgagcagtggtaaaaggcaatgaacttcgttcaccatcaaagagaaggtcacaaatagacacagactatgcactaaggcgaagtccaataaagacaatccaaatttctaaagctgcacaatttatgctgtatgaggaaacggctgaagaaagaaacatagctatccacagacataatgaaatatacaataataacaattctgtgagcaatgagaataatccttcccaagtaaaagaaaacctttcacccgctaaaatttgccctgatgaaagagcatttttaagggaaggaggaagaattgcattgaaggacttaagtgttgacgaattcaaaggttacatacaggatcctctcaccgatgagactataccactgacgttgccactgggtgataaaaaaatcagcctacccagttttataacgccgccaagaaattcgaagatatctattttcttcactagtaaacaccaaggacagaacccagagacaaagatatcccgttctaccgatgacgtcagtgaaaaaaaagtagtgagaaaactgtccttccacgtctatgaagatgagtaa

SEQ ID NO: 78825 - DNA, 957 bp, Saccharomyces pastorianus
atgggaaaggctgcgaaaaagaagtactccggagcaacttcgtccaaacaagtctctgccgagaaacatttgagttcagtatttaaattcaacacagatctaggtcagcatattttgaaaaatcctttggtggcgcaaggtattgttgataaggcacagattagaccctcagatgttgttttggaggttggtcctggtacaggtaacctaactgtaaggatcctcgaacaagcaaaaaacgtagtggcagtagaaatggatcccagaatggctgcagaattaactaagagggtacgtggcacacctgtggagaaaaagttagaaatcatgcttggagattttatgaagactgaattaccatactttgatatctgtattagtaacactccttaccagatctcatcgcctctggttttcaaattaattaaccaaccaagaccaccaagagtatctattcttatgtttcaaagagagtttgctttaagattactggcaagaccaggtgactcattatactgtagattatccgccaatgtacaaatgtgggctaatgttacacacatcatgaaagtgggtaagaataactttagaccgccaccacaagtggaatccagcgttgttagactagagattaaaaatccaagaccgcaagtggattacaacgaatgggatggtttgttgagaatcgtctttgtgaggaaaaacagaacgatttcagctggcttcaaatcgaccaccgtgatggacattctggagaagaattataagacatttttggcgatgaacaacgaaatggtggatgatacaaagggttctatgcacgatgtcgtcaaggaaaagattgacacagttctgaaggagaccgacttaggcgacaaaagagcgggtaaatgtgatcaaaatgatttcctaaggctattatatgcttttcaccaggttggtatccatttttcatga

SEQ ID NO: 78826 - DNA, 1827 bp, Saccharomyces pastorianus
atgaagatgcctctaaagaagatgtttaccagcacgtctcctcgtaactcttcttctcttgacagtgatcatgacgcttactattcgaaacaaaatcctgacaatttccctgtaaaggagcaagaaatctataacattgacctggaagaaaacaatgtgtcctctcgttcatccacctctacatcaccttcagcaagggacgactctttcgcagttccagatggtaaagacgaaaacacgcggttgaggaaagatttaaaggcaagacatatttctatgatcgccattggtggttcattaggtacaggtctgcttataggtacaggtaccgccttaatgacgggtggtccggttgcgatgttaattgcatatgcctttgtcggccttttagtcttttacaccatggcctgtcttggtgaaatggcttcttacattccattggatggttttacaagttatgcctcacgttacgtggatcctgcattaggttttgctattggttatacttaccttttcaaatatttcatcttacctcccaaccaacttactgctgctgctttggtcattcaatattggatcagcagagaccgtgttaaccctggtgtgtggattactatattcttggttgttattgtcgctatcaatgtcgtcggtgtaaaattctttggtgaatttgaattttggttgtccagtttcaaagtcatggtaatgttgggtctaatcctgttactatttattattatgcttggtggaggtcctaaccatgaccgcctagggtttagatactggcgtgatcctggtgcgttcaaagaatattcgacggctatcactggtggtaaaggtaaatttgtttcgttcgttgctgttttcgtttacagtcttttcagttacacgggtattgaattgacaggtatcgtttgttctgaagctgagaatccaagaaaaagtgttccaaaggcaattaaattgacagtttaccgtatcattgttttttacctatgcaccgttttccttttgggtatgtgcgttgcatacaatgaccctcgtttactttccacaaaaggtaagagtatgtctgctgctgcatctccattcgtggttgccattcaaaactcaggtattgaagtcttacctcatatcttcaatgcttgtgtcttggtcttcgttttcagtgcttgtaactcagatttgtacgtttcttccagaaatttatatgcgttggcaattgatggtaaagcgccaaagatcttcgctaagacaagtagatggggtgttccttacaatgctttaatactctccgtgctgttttgtggcttggcgtacatgaacgtgtcttcaggatcagcaaagattttcaactactttgttaacgttgtttctatgttcggaatcttgagttggatcaccattttaattgtttacatccacttcgataaagcctgccgtgctcaagggattgataaatcaaaatttgcttatgtcgctcctggacaacgttatggtgcttattttgctttattcttctgcattttgattgctttaatcaaaaacttcactgttttcctaggtcataaatttgattataaaacattcatcaccgggtatattggcctgcctgtctatatcatttcttgggcaggttacaaattgatatacaaaaccaaagtgataaagtctaccgacgtggatttgtacacatttaaggaaatatacgatagagaagaagaagagggaagaaggaaggaccaagaaaaggaagagcgtttaaaaagtaacggtaaaaatatggagtggttctatgaaaaatttttgggtaatatcttctag

SEQ ID NO: 78827 - DNA, 1062 bp, Saccharomyces pastorianus
atgacgctgcaaagaattagtaaagattatctaaagcctaattatggacttatcttacttatagtgtcttattttttcaattcttccatggtagtttctaccaaagtcctagaaaatgacccactggaaacttcgcaatcaagaattaatcctctgcaaatcctgctagtaaggatgtctatcacgtactgttgtacgctagtatacatgcattggaataaaaaaagtgttccagatattccatggggcccagcaccatgcaggaaatggttgatactccgaggtataatggggttttttggtgtttttggaatgtacttttctttaatgtatctaagtataagtgacgctgtcttaatcaccttcatgtcgccaaccctaaccattttcctttcatttttactgctgggtgagccatttagtaaacttgaagccttggggtccctaatttcattttctggagtggtgttaattattaggcctacatttttgtttggtgagcagacccaaggccagcaatctccacaagacgatattgttgaaactcaaaatcccaaattaagactcattgctatcggggtgagtttattaggggtttgcggattgagtagtgtttacattatcataagatatatcggtaacaaggcacatgccatcatgagtgtcagttatttctcgttggttactactgttgtggcagccctcggtgtgcttctaattccctcgatgtctttacaactgccccattcgtggaagcagtgggggctatttctgaacttgggtatttctggattcattcaccaaattctgttaacaatgggaatccagagggagcgtgcaggaaggggttcgttaatgacttatactcaagttatatatgctgttttctgggatgtcgtgctctttcaccactggccaaacatatggacgtggtgcggtatggcagttatcgttagttctactatatgggtcattaatatgagagcctccaaacaaaacgttgtggctactgccgagctactctccacatcggactttgaattagatgatttggaggattaa

SEQ ID NO: 78828 - DNA, 1956 bp, Saccharomyces pastorianus
atggcaaagaagaataagaaggataaagaggccaaaaaggcacgtgctgaactgaagaatcagaaaaaccaaaaaaagcaggagaaaaagtttcagaagaacaagaataagtctttaaacggcgaagaagatgatgaaagtgatcaagatctcgatgaaattctctctagctttagcaaaaagcaaattgaattagagcatgtagacatcacttctgtggaaaaaccctcttgtcgtactcatccgttgatgtttgcaaatccgcaacacaataaacatgaattgttcattttcggtggtgaatttacagatccagaaaccaaactaacacatttctataatgatttgtattcatactccataaagaacaactcttggaaaaaatacgtttcgcaaaatgcacctttgcccagatccagtgccgctgtcgctgtgcatccttccggaatagcactgttacacggtggtgaattttcgtccccaaaacaatctaaattctaccactattctgatacatggctgtttgactgcgttgaaaggaaattcactaagttggagtttggcggtagagactcttcacccagcgccagatcaggtcatagaattattgcttggaaaaaccatttcatattatttggtggatttagagatttggggaatggtcaaacttcttacctaaatgatttgtggtgttttgatatctcaacctacaaatggaccaaattggagacaaacagcaaacctgacgctagatcgggtcattgtttcattcctacagataattctgccatattaatgggtggttactgtaaaatcattgccaaaaataataaaaatttaatgaagggaaaaatcttgaatgatgcatggaaactgaacttaacgcctgatccaaagaagtggcagtgggaaaaattaaagaatttcaagaaccagccctcaccaagagtcgggtattcgttcaatctatggaagcaaaacaagtccgttgcttttggtggtgtctacgatttacaagagacagaggaatccttagagtccgttttctataacgacctatatatgttccacctagagttgaacaaatggtctaaacttagaattaaacctcagcgtcaaacgaatagtaaaaattcacccgccacaagtaaaagaaaatctaataaagatcaagaaaaggaactgcaggatttactaaattccattctggccaaatctaatctaaatgacgacgacgatgacaatgatgacaacagcacaacgggtcctaactctatcgatgacgacgaagataacgaagatgacagtgatttggacaaccaagaagatattaccatctcaaatcaattacctcacccaagatttaacgcagcaacttgtgtagtgggcgactcgttgttcatttacagtggtgtctgggaactgggcgaaaaagattatcctataaactcattttatagtatagatttgaacaagttggatggtgtcaaggtttactgggaagacctatctgccatcgaagaagcaaagagactaggtgatagagattcggacgaagatgagtttgaatacgaggacgatgaggaggatgaggacgacggcgaagaggaacaagatgcaggaccccttgaaggtgatgaagatgaggaaagcgagagcgacgatgacaaacaagtgcagatggagattccagacgaaaggtcttggctaccacacccaaaaccgttcgaaactttaagagcgttctacttgagggaaggtgcaaatttcttaacctggtctatttctaacaacagaaaccttaagggtaaacagttgaagacgaagtcatttgagttatgtgaagaccgttggtgggaaagaagagatcaggtgacccttgaggaagagcgtctggaggatacaggcggaatcattgaaagagatacgactactaaaccttccaaaagaaggtga

SEQ ID NO: 78829 - DNA, 1467 bp, Saccharomyces pastorianus
atgttgagatttaccaattgtagttgcaagactttcgtaaaatcgtcatataagcttaatataagaagaatgaactcctcgttcagaactgaaaccgatgcatttggtgagatacacgtgcctgctgataagtactggggtgcccaaactcaaagatcctttcaaaacttcaagattggtggcgctcgtgaaagaatgccattgcctttggtgcatgcatttggtgttttgaagaaatctgccgcgattgtgaatgagtctctggggggattggatcccaagatctccaaggctattcaacaggccgctgacgaagtggcttctggtaagctagacgaccactttccattggttgttttccaaacgggttccggtacccagtctaacatgaatgctaatgaagttatttccaatcgtgccattgagatcctaggaggcaagattggatctaaacaagtccatccaaacaatcattgcaaccaatctcaatcatccaatgatactttccccactgtcatgcatatcgctgccagtttgcaaattcaaaacgagttgatacctgagttgaccaatttaaagaacgcccttgaagccaaatccaaggaatttgaccatattgtgaagatcggtagaacacacttgcaagatgccacgcctttgacactaggtcaagagttttccggttacgtgcaacaagttgagaacggtatccaaagagtggcacattctttgaaaacattgagtttcctggcacaaggtggtactgccgttggcacagggttgaacaccaagcccggattcgatgtcaagatagccgagcaaatttccaaagaaactggactaaagtttcaaaccgcccctaataagttcgaggctttggctgctcacgacgccattgtcgaatgtagcggtgctctaaacacccttgcttgttctcttttcaaaatagcgcaagatataagatacttagggtccgggccacgttgcggctaccatgaactaatgctgccagagaatgaaccaggttcctcaatcatgcctggtaaagttaacccaacccaaaacgaggcattgactcaagtgtgtgtgcaagtcatgggtaacaatgcagctatcacgtttgccggctctcaaggtcaattcgagttaaatgtcttcaagccagtcatgatcgccaatctattgaattcgatcaggttaattactgatgccgcatattcatttagagtgcactgtgttgaaggtatcaaagccaatgagcctcgtattcatgagttgttgactaaatctttaatgttagtcaccgctttgaaccctaagatcggttatgatgccgcttccaaggtcgccaagaatgctcataagaagggcattaccttgaaggaaagtgcattggaattgggtgtattgactgaaaaggaatttgatgaatgggttgttcctgaacacatgctaggtcctaaataa

SEQ ID NO: 78830 - DNA, 309 bp, Saccharomyces pastorianus
atgctctttttagacagttattctcttctaatacaatttcagcgttttaaaaattgggaaagtcctcgaagatttagtagttcttttcctttgcttttgtttgtttttaaaccgatatttgctgctaaacttcttaaagagatttgctcttctggtgtactctcttattcgttatcatttctgaaaattcccctttccgtgatgcgggtaatactaggtcccttacccgacgacaagaaattaaaaaatgacgcaaaatattcatttatgaactattttattataacttgtataggaataataatgtag

SEQ ID NO: 78831 - DNA, 1656 bp, Saccharomyces pastorianus
atgtttgcatccgctggacaacaacaccctcaaattgttcctaaggaagaggaatccatattaaactacctccttgaagtgagatcctccttggctaaactcaagcaaaataggacccagtatttgaactctaaggatgtccaaactacttaccaacacgtcttgaccaaagtcagagagttggacgatattaggaagaatagtcatgagacgcccgctaagagcgccgccaccctgattcatagtactgaattgcataatagagttgactccgtactggatgatgtctttcaattgctctcgttgtgttttttaactgttgggctaaaaaattctgcacctgcgacttatgcatcgttatctactgtggagagtcttttggaacatttaaatgaatcaaacgtcttcacccatcacgatttgagtcctattaaggaaaggctggaagaaatcagcaagattgtcgaacaaaaaaattctagtcctgcgtacgatgaggatggaaatgatgaccgattaagggaaatcgacaacgaaaggaaaaagaataaaattgaggaagacctattactacgtgctaaattaaagcattgcaaggatgaatatgatatattggaaggcaaattggaggaaattgatccgtctttgtctactgtaatggaaaagttattccgaattagaagaggtttattgtcattagttgcatctgctaaaaaaacaatgtctaaatctgatattaataccaactctttattgcaggaacaaaatgatttgcaaacggacaatgaaagcttaacggatgacaaacatttagtatctcaagagtatgtccatgagaaattatcagttttgaagaacgaattaagtgaattagaatctaatcgtgacgattctggtaaattcaagtccttggaatctcatcaggtggcagaaaaaggccaaagtgtccttaatggtttattggatgattgccatgatttagttaacgatttatcacaccaaaaaaatggcgggttgactttagatccatatttacagccaatatatgaacagctgattgatataaagactaccttagaaaatttaatgatcacaagaagatggactttgagagaaaccgatttattttcttaccaaaaaaaattgaacgaaattgataacaaaagaatcaatggtaagtttccaacaaaatctcaggactctaaggggcaatcaatacttttatacctgttgcgtagatgttatgccataatttataaactgttggaaagttcagaacccgtatctgaagcgttgcagccaattcacaatcaactatctacagttcgtcgttgcctattagaattgaaaagaatgggaggtgtgaataatgaaagagagttgtacccttatcaaatgaaattggcttcattggacaacctgagaactgaaggtatattctatgactctgatggcaatatacctgaaggccaaggtatattgaatgctttattagcagaatgttttgatatcttgcatgaattaaaagtggaagccgaggaaagagcacagaactctacttcaagtgatgattctgacgacgatgacaacggagaatcaggcatagactcgaacacaaacgacagcgagcctgaatctgaatatcaacaggaatag

SEQ ID NO: 78832 - DNA, 1428 bp, Saccharomyces pastorianus
atggcttctgcagtgtatttttgcgatcataatgggaaaccactcctatcaagaaggtatagagatgatattccgctttctgcaattgacaaattccctatattactctcggatttagaggaacaatcaaatctgattcctccatgtttgaaccacaatggtctggaatatttatttatacagcataacgatctatacgtggtggcaattgtgacttctcttagtgccaatgcggcggccatttttacttttttgcacaaattagtggaggtattaagtgactacttaaaaaccgtggaagaagaatctattagagataattttgttataatatatgaattactggacgaagtgatggattatggtataccacagatcactgaaactaagatgctgaaacagtacataacacaaaaatccttcaaactagttaaatccgctaagaagaagaggaatgctactagaccacccgtcgcactaacaaattcagttagttggaggccagaaggcatcactcacaagaaaaatgaagcctttctggatatcgtcgaatctattaatatgctcatgactcaaaaaggtcaagttttgagatcagaaattattggcgatgttaaggttaactcaaaattgtctggtatgcctgatctaaaattaggtattaatgataaaggcattttctccaaatatttggatgatgatacaaatatcccatcagcgagcgcgacaacatccgataataacacagaaactgataaaaaaccatcaataacatcatcatcggccacaaacaagaagaaagttaatattgaattggaagatttgaaatttcatcaatgtgtccgattaagcaaattcgagaatgaaaaaattataacgtttatacctcctgatggaaagttcgatttaatgaactacagactatctactacgataaaaccattaatttggtgtgatgtaaacgttcaagttcattcgaattctagaattgaaattcactgtaaggccaaggcccaaattaaaagaaaatctactgcaactaatgtagagatattgataccggtcccggacgacgcggatacaccgacttttaaatattcacacgggtctctaaagtatgtccctgaaaaaagtgctatcttatggaaaataagaagttttcccggtggtaaagagtactcaatgtctgccgaattgggactgccttcaatatcaaataacgaggatggcaatagaacaataccaaaaagtaacgcggaaatcttgaaaggacctgtccaaatcaaatttcaaataccctactttactacttcaggtattcaagtacgttatcttaaaattaacgaacccaaattgcagtataagagttacccatgggtaagatatatcacgcaaagtggtgatgattatacaataaggctgacgtaa

SEQ ID NO: 78833 - DNA, 1656 bp, Saccharomyces pastorianus
atgacctattctacagttaatattaatacacctccaccatatctcgctttggccagcaatgaaaaattacccacggttttgtctattgctggaacagatccaagcggtggtgctggtgttgaagcagatgtgaaaactatcactgcacacagatgctatgctatgacatgcatcactgctttgaatgctcaaactccaattaaagtatacagcattaataacacgccaaaggaagtagtttcccaaattttggacgccaatttacaagacatgaaatgtgacgtcatcaagactggcatgcttacgacagctgctatcgaggttttgcacgaaaaactgctgcagctcggcgaaaatagacctaagctagtagttgacccagtccttgttgctacttcgggctcttctttagctggaaaggatatagctagtttaattacggagaaaatcgcaccttttgctgacattttgactcctaacattccggagtgtttcaaactgttaggtgaagacagagaaataagcaaattgcgagacattttcgaagtcgcaaaagaccttgccaaaatcaccaagtgttccaatattttggttaaaggtggtcacattccatggaatgatgaagaaggaaagtacatcactgatgtcctttacttaggggccgaacaaaggtttataaccttcaagggtaattttgttaatacaacccacactcatggtaccgggtgcaccctagcttccgccattgcatcaaatttggctcgcggttattcccttccccaatccgtttatggcggtattgagtacgtccaaaatgcggtggccattggctgcgatgtcacgaaagagactgttaaggacaacgggccaattaatcatgtctacgccatcgaaattccattagaaaaaatgctcagtgacgaatgtttcactgcatcagatgccgtacacaaaaagccagtcaaaagttctcttaacaaaatccctggaggaagtttctataaatatctgataaatcaccctaaagttaagcctcactgggactcctatgtgaaccatgattttgttagaaaagtagcagacggttccttagagcctaagaagttccaattttttatcgaacaagattacctgtacttagtcaattatgccaggatttcctgcatcgcgggtagtaaatccccgtgtcttgaagacctggagaaagaactagttattgtcgaatgcgttcgtaatgggctttgccaacatgaaaggagattaagggaggaatttggaattaaggaccccgactacttacaaaagattcaaagaggtcctgcattaagggcttactgtcgttactttaatgatgtttccagaagaggtaactggcaggagttagttatagctcttaatccttgcttaatgggctatgttcacgctttgaccaagatcaaggatgaagtaactgcagcagaaggctccgtttaccgtgaatggtgtgaaacttactcatcgtcatggtgccacgaagctatgcttgaaggcgaaaagctgttgaatcacatcttggaaacataccctccagaaaaacttgatacactggtcacaatatatgctgaagtttgtgaattggaagctaacttctggaccgccgctctagaatatgaatga

SEQ ID NO: 78834 - DNA, 582 bp, Saccharomyces pastorianus
atgacagctcatgcaaatgaaaggattagcgatgtatcccctagtgctgggggttcaagttcggaatcgaagtatgacaagctctgccgagttcttttcactattgcaattacaaaaagttcatttactccagagcatatattgtataagaattcaatatttactgataagccaatcttaactgatatagttacctttatgtatgcggcgtttgtttccattggatggtttctgatatggggggaaagagcatgcagaactcaagaaatgaatcaacctccaatgtgctcgaatataaactattctcttttaagttttaagaaaagacaccccaagagatttacgtgtacgttatggttggtatttttccttgcatatgcggttttgacagtttcaatttggatagttcagttgatttttcgaaaaggtaatgcttttcaaatgatatcgcaacttattgtattagatatcgccattgcattgatcaatgtagcaattgcattcggttttgaagtatatcttgcacacaaagctgcgatcgagaatagtgacaatgatttaaatgatcttagcagtgcttaa

SEQ ID NO: 78835 - DNA, 1638 bp, Saccharomyces pastorianus
atggctagtgctgaaccaagaccccgtatgggactcgtcatcaatgctaaaccggactactatccgattgagctatctaatgcagaactactttctcacttcgaaatgctgcaagaataccaccaagaaatctccaccaatgttattgctcaatcatgtaagttcaaacctaatccaaaactaatagaccagcagcctgaaatgaaccccgtggaaacaaggtccaacattatcacttttttgttcgagctgtctgtggtcactcgagtgacaaatggtattttttttcattcagttagattatatgaccgctattgttccaagagaatcgtgttacgggaccaagccaaattggttgtcgctacttgtctctggttagctgctaaaacttggggcggttgtaaccacatcatcaataatgtagtcatccctactggcggaagattttatggtcccaacccaagggcacgtatacctcgactctctgaactagttcattactgtggtgatggtcaggtctttgatgaatcaatgtttttacaaatggaaagacatatactagacactttaaattggaacatttatgaaccaatgatcaatgattacgttttaaatgttgatgaaaattgtttgatgcaatacgaactttatgaaaatcaagttacttatgacaaacaatgctctgaaaaacgtcagtctcaattatcccaggatagtgatgccactgtagacgaggggccctaccaaaacgaagaagaagaagaagaagacttaaaactaaagatcaagttgattaatttgaaaaaattcttgattgatgtatccgcgtggcagtacgacttacttagatatgaacttttcgaagtatcgcacggcatattctccattatcaatcaattcaccaatcaagaccacggtccttttttaatgactccaatgacatcagaaagcaaaaatggtgaaattttgagtaccttaatgaacggcattgtttccattcctaactccttgatggaagtgtataaaacggtcaatggtgttctacccttcattaatcaagtgaaagaatatcacttggatctacaaagaaaactgcaaattgcatccaacttgaacatttcgagaaagcttaccatatcaaccccatcatgctctttcgaaaattcaaatagcacatccattccttcgcccgcttcctcatctcaaagccacactccaatgagaaacatgagctcactctctgataacagcgttttcagccggaatatggaacaatcatcaccaatcactccaagtatgtaccaatttggtcagcagcagtcaaacagtatatgtggtagcaccgttagtgtgaatagtctggtgaatacaaataacaaacaaaggatctacgaacaaatcacgggtcctaacagcaataacgcaatcaatgattatattgatttgctaaacctaaatgagtctaacaaggaaaaccaaaatcccgcaacggcgcattacctcaatgggggcccacccaagacaagcttcattaaccatggaatgttcccctcgccaactgggaccataaatagcggtaaatctagcagtgcctcatctttaatttcttttggtatgggcaatacccaagtaatatag

SEQ ID NO: 78836 - DNA, 1467 bp, Saccharomyces pastorianus
atgtcagctatacaatcgccagcacctaaacctctgcagccaacttttccagctgcttcgccagcttccacgaatgcatatatgaagccgggcctaattggtagtcctgccgtcagtaatcataccgagcctaacaatggtaacaatgaaactgcggagcctcagggaccaaatcagagaattgatttgggtgccatgatcgaagaattaacctcactattgggaaaagaaagctggacgaaatatgctcagatcatcagtcttttcattttagggaagttatccagaaaggaactttctaatgaattagagctggtattttcaccaagcgctgcaagcttagaaaaatcaaatacaaatcatcaccatagtttagtacgacttcataaccaacttttattagggatttttgctaattcattacgtgaaaaccctcttgggagaaacggtaatgagagttcttggggatttggcaatggaagcaacaatccaaacaataaactaaaaagaatcaataagcataactctcaaattgaagtctataaaaaaattgtcatgtcgttacctctaaatgatcgaaatagacttaaaatgatcacgaaagaggccggcaaaagaggcttcattttttgctctgtatttcaagccagattaaataatatacccaaaattcccattgtaaccaatccagaaagtttgaagcgtgtcaagagcaataatttaaaaacgccgctggaatggtcacaagatataatgaatggattcaacgttcctttagcgagcgaaagccattctttaccagacacggattcgttttacttaagaatggttggtatagcaagagaacatgggttagtcggcacagtggacgcacgttgcgtagagcttatatcattggccctagatcaatatctaaagaatataatagagtttactattgatacagttcgttatagaaggaagaaatattcagattattatgatttgaatgagagtgggctttataaatccgtatcagaaatggctgctgataaacgcgatgccaaaattaagcagttagatgatgataaaaatgaggatgactgtgccgatgaagccaaaagtattaataacggcaataacagtagcaaggacgatattggcgacatatcaatgagcagcattacaaaggctggcgaagcagttaatgaggagttacatgaaaacagaacgatatcattaacgaatgaagacatatatgattcgttatctatatttccgaatttggttgaaccttcaggttcatactatgcgttaactaatttagggctagttaacgatgatgaactagtagatatgaagagcaatattgacgacttgccggacttcttaaatgaaaagccgactttcacgcctttggatgaaagaaacgttggtacaaggcatgaattaaattggttaattaaaggaatcttaacggaagattga

SEQ ID NO: 78837 - DNA, 1944 bp, Saccharomyces pastorianus
atggcgtcacagcaaaacaaacacgcttttctttcaaagaatagaatctttcacaatcccgataatgtgtcctcatcaaaatctcgaaaccttatggatatcacaaacacgacaaacaccataaatggctctaggccttcgtctatgaagagttcattggctcttccacccctaaaggattccttcccatctgtatctcgatctgcatcattaaacatcaacatgagcaaaattaaggacttaaaagaccgccaagacaaaataaggttccaaagacatactctcaggactcaattgattgagtgcgaaagagaaatcaaaaccatcaagtttcgagatctcaataagtccaggtttgaactttataagaaaaaatccaaacaagcaaagtatctcaaacaggttagagatttggcgcaaaatctgaactccaaggacggtgaacgcgctgatttaattaagaagaacaaatccgctttggcaaccttgcaggctgaactagaccagaatctgatcttgaaaaggcaggaatctcaagaattgtacaataataagcttatcttttgggaaaatgagctgcaaataatggaaaatgtcgagcctgaccacgaaatcacagaggaaatatctcagttgaagaaaacgctgcaagagctcaacataaattgggcgaatttacagaagcaaaacttggaaagacaagtaaaccacgaatcacaattgaggaagggttttattgcattcaaagaagctaagttaaaatccatggaaaatttgacaaacaaacatcgtgaattacttgatcagatagccactctacaatcggaaagtgagaagttacacaaggagatcatggatatagatagacaagctgaatattcggaacaaaacatctcagaaataaatgaaaatataaaacaattggaattggcaaacaacccactaataagcaaatccttacaaaactcgcaagatttggaacatttacaaaaccaaatggaaaatttgaaagaaatggcctctaaacaggaaaaattttataatgatacctataacactgtggaaaaagaactcctgcggagtaggagacttgaaaactctattattgaacaaaaaggcacgatgcgctgttacgcttacgtgatggagcaaaatttgcctgagaaccttttatttgattacgaaaatggcgtaataactcaaggtctaagcgaacatgtttacaaatttaatagggtgataccgcatttaaaagtttctgaagataaatttttcactcaagagtatagcgtttaccatgatatgtgcctgaaccaaaaaaaaaatttcaacttaatatctctaagcaccactccacatggctcattgagagagtctctaataaaatttttggccgaaaaggatacaatatatcaaaaacaatatgtgatcaccttacagtttgtatttttatcagatgacgaattttctcaggacatgctcttggattattcccacaatgataaagatagcataaagttgaaatttgaaaaacactcaatttctttggattccaaacttgtcatcatagaaaatggactcgaagatttgcccttaaattttagttgtgatgaacacccaaatttacctcattctgggatgggtataatcaaggtgcagttttttcctcgagattcaaaaagcgatggcaacaatgaccccgtaccggtggacttttattttatcgagttaaataatctgaagtccattgaacagtttgataaaagcatctttaagaaggaatcatgcgagacccctattgcacttgttctgaaaaaactaatttctgatactaaatcctttttcttgctaaacttgaacgattcaaaaaatgtcaataaattattaacgatttcagaagaagttcaaacacaactttgtaaaagaaagaaaaagctcacttaa

SEQ ID NO: 78838 - DNA, 411 bp, Saccharomyces pastorianus
atgtcctctgtggaatcttcccccatctcgcgctatgaagacgaggtcttccctctttcgttttcaaacgttgctttcgagccccctatgctctcgcatagcccggacagatcgacttatgccgatgacttttctcaatcttaccagcaagaattgctaacttttccgctatcgtacccgattgtcgatgagtcagaatgcacgcacactaaagataagacggacagcaacataataacgagtactgaagacgattgcattttcgatatggaatttaacggcaacgccgccagtgcagttgctgctgctagtaaggaatctaactctgcctctgggtttgcctttgcaagtaacgatgcctttgccaatgtcgcacaacagaactacagactatggttgtcatcggtatga

SEQ ID NO: 78839 - DNA, 288 bp, Saccharomyces pastorianus
atgacgacgagaggcagcaatgatgttgttcatttcttcgaccttagccttggctctggtgaaagaacccaatctcttcttggcgacctttctggctctcttttcaccggagtttctgatcaaatcgatcaatcttctttcatatggggacaaaccggcgatttctctaaccaaagatctgacgaacttggttctgttggaggcagcacccttcttgtaggagatctttggggctggagtcatttgggtgactttcttacccttgttcaaaccaatagcgatacctag

SEQ ID NO: 78840 - DNA, 2694 bp, Saccharomyces pastorianus
atgtcgtcagacaaatctattgagataaatacagatacgatcgcctctgaagttcacgaaggtgataatcattcgaataatttggtttcaatggaggaagagataaaatcaacgccatcagaccaatatgaagagatagctataattccaactgagcccctccattcggacgaagaactaaatgacaagcaacaaagtttagaccacgaggaaaatgaagcacccacaaatgtatcaagagaagaacctattgggatctctggtgatgaagacacccaaatcactgaacaaaacgttaatgaacaaaggcaagaaacgagagaacctagttctgaaattgatttaaatgagccattggatgttgaaaaagatgtgacaacggatgtgcaagccccaaatgggctgaatattgaaaaagaatatgatgcagtcaaagagaatgagaaggtttacgctgatacgaaagacgttgttagtagtccagaaaatagggaagtaactggaaaaaattctggaggtgagaaatcatcctcgagtaaatttctcgatgacgaatctggtactatgacagctgcaaatgcgaacgacatttctataagtagtgaagtaaccccagaaaggtcgtcagaaaatgataataaccagattcatattaccaatgaggtagccgctggaataaacttgaatgaaaacaaggaacaaaaagctgctatagaagatgggcccgtaacagcagagaatctttcctcagaaactgctaggaaagtaccacctatacccacacaaatcataaatgaaaaaggtgataactcaagcgagaacgaggtttccgcaattcccactacatcttcgccaccattaccacctagacaaaatgttgcgacatcaacgtcaccaaaattacctccaaggggcaaacaaagggaacaaccaccgaagacgaagaatgctgttccaccgccactagaggaagaaatgaagtcagagaagttccgtaaaaacttcgaagaaactaaaagaaatagttatcatcatgttcctctcactggttccaaaactgcgcaattagagtccactgcagaaattaatttgatcgctagtcgttaccgcaagaccagtcaccatttgaataaagagggggaagaaactagagagtcgttgcaggaaggtcaaagctttttgaaatcgacatttacgtcatttctggagaacttgtccgagtataacgaagtggagaatgttaatgaagaagatagagaaatgtttaaaattgattggtccttctggactcaagtagttaatgattatgctacagtggcaagcaacgaaccagaaaatttagaagcccatgttaccaatgggataccaccacaaattcgaggtatcatttggcagctgatggcgaattccaaatcaagagaaatggaagatatatatgaaactctattggataccgaatgtcttcatgaagcaacaatacgtagagatttaaggagaacgaagtttgtggccgaggacaaaatggagtcactatacaaggtaataaaggtgtattctgtttatgatccagatgttgggtacacgcaaggcatggggttcattgcagcgccgctattaataaactgtgaaaacgaggccgaatcttttggactactcgttggattaatgaagaattatggattaagagagcttttcttaccaggaatgcctgggctgatgttaatgctttatcaatttgatagattattagaggagcattcaccttctttgtacaatcgcttgatccgtgagggaattagctccacaatgtacgctacacaatggtttttgacatttttcgcatacaagtttccgttagagtttgtgttaagaatttttgatattgtattcgtagagggtattgaagtgcttttgaagtttgccgtaaatttaatgttaaagaatgaagaaactttagtaaaattgagattcgatgaactattggattttttaaaggacgaactcttcaattactatttaatgggaaaccaggatgacgcttctgtagtgcaaatgggattgtcaaatgggaactcatttaagggcaatgatgacggcactttttcctacaatgtcgatcttttcgttcatgatgcaatgacaggtgtatatatcacaccattaacattaagaagatacaggggagagtacgtagaaatccatgaaaaagagcaaaaaaaagaggaccactacgaatcgctaagaattcaaaaccaccaactacaaagagaggcgcagaagctagaacacgactattcaattttgaacaaagagaatatcagcgccgctaacgagctgattcagaacagattgaatatggagatgctgttggatgaaaaaaacgacctgataaatacaatcactgatatcaaaagccaaattgaggaagagattcgcaagcaaaatttaccgaacccggacgcgtcactaccaaaggcagatctgagagaagacttggaaaggaccatatccaggaacaatgaggtgatgagggagaacggccaattagaggaaagaatcactgaactgcaagcggaaatcgatgagttgattaacatcaataaggagcaagtgtccacggcatcgttattggaacgagattctaaggctaaagggaggaaaggctggactggttttaaaaaagtttttaaatag

SEQ ID NO: 78841 - DNA, 1572 bp, Saccharomyces pastorianus
atggatccctttcacaatggcaataagaggagctcaatatcgtttggctcatcgcagcggcagccatataacaagaacaattacttgagtggtactaatgggccttcctcggcggcacaagatcaaggtagaggcccatctccctttggaatgtctggcaacactaccaatggcggtaacagcaaaaggaatagtggctgtgacctaagtgccacgtactatgcaagtcgatcgccgatgtattcaccgttagatttctcgccaccagttttttcaccaaatcattctcagttacagcaggcgaggggctatgctgcaaatattccggttgtaagcaatctgatgaacccttccatggcctccgtgtgcgaatatcaatcacactatccactctttgggctcgattggagcgccgacgactacgtctgcttgggttcgtacaaagaggacagcagaaataagttgcaggttctgcactctaatgatctactgagctgggaaagcgtagtggacgcagatgtggtttatcctgtgagcaaaatccaatgggtcccctctcaattgtatccaaggaaactcgcgacgtgttctgactccttacagatttggagcgttagccctgaggaaagacagttccaagaacaaataaatctatctctgtgtaaatacaatagacagcaccccgccaatcccgcggccgcagatgacatgaaggtcataggcactttcccaccaataacatcatttgactggaacacggtcgatactaacttgataatctcaagttccatcgacaccacatgcattgtatgggatctgcaaagcagtcactacgttaagacccaattgatcgctcacgacagcgaagtttttgatgtaaggtttttgacaaaatcgacccaattatttgctagttgtggtggggacggtagtgtacgagtatttgatttaagatcgcttgcgcacagtacaattatttacgagcctccctcttcctcagtgtctggagccactgcggatactataacgccgtcgtcgaaaggttcggacgccttattgaggctggagccatcaccgtatgacccaaatgtgttggccacttttgcagctgactcgaataaaatcattattctagatatgaggaacccagaatcccctatactaaacttacaaggccacggttcttcggtaaacgggattaaatggcatcccacaaagcgcaatgttttgctctcgtgcggagatgactgccaggtgctctattgggacttgaacagctcctttatggaaattaatgctgcaggtagcaaatcccccagtattcatggaacttccttggaggaccctgacggcgacacagagatgacagatggtggcgctggatccggtttaaacgaggatcccttaagtttaaacaacaacagcaagcaggtgtgcaagacactagagactcctaacatgatgtatgccaataaaacacaagagataaacaacattgcatggaggccccagaggggcgattggtttgggtgcgtgagcggcaagaagtttcaaaacgtccgcgtcctttga

SEQ ID NO: 78842 - DNA, 789 bp, Saccharomyces pastorianus
atgaattggaagtcgtacgtttttcccggtggtcatccaccagctgcgttgaccacaggccttgtggtatttctaaccgctatttacctgttaagttttatttttgccctaagggaagacctgtcgttggcgccagagtcattgttcaagctgcaaatgagcaggctatcgctttatcctttaattcacctatcattgcctcatttactgttcaatgtgctagccatctgggcacccttgaatctcttcgaagaaacgcatgggactgtgtacacaggtgtttttttgaacctgagtgctctatttgccggaattctgtactgtttgttgggtaagttgctatatccagaagtattagttgcaggcgccagtgggtggtgtttcaccttattcgcatactatagttttaaagaatcacagatccgccctagaacaaggatctttcgcacagactactcaattccgacattatatacacccctagtactattagtcgcaattgccgtcgttatacctggctccagtttctggggtcattttttcggcttatgtgtcggttacgccataggctacaaggaatcgtggtttaacaagatcactccaccaggatggatcatcaccaaaatcgaaaaaagtttagacggtttaattcgattaataccttggggaattaagtattacagagatgaggatatcgacagaactaaagattacgaaccgttaatgtccacagaaacaccattgcctctccacaatgacaactccggcactgtcctagggactgcctag

SEQ ID NO: 78843 - DNA, 1365 bp, Saccharomyces pastorianus
atgcatgggcctacttcaaaagctatttcccgcaatgtgagaagcgtgaagagaccaagaagagcacctaggcccgtggtctccacgcaggctatgaacaagttgtctaacgtaacactctctgctgaacaagaaaagttgagagagcgcgttttgtcgttcatgcgttccaacttatctcagtacaagtctgactggaaacatccggccatgtttgtaatccaaggggacgcaggtacaggcaagtctgtgattctaaactccttgttcaatgaaattcagaaactatcccagttctcaccttcttctgaagatatcttacatgggacacataattatctggtagtcaaccatcccgagatgttaaagttatatatccggattagtgacagtttcaaatatatttctaaatcgtcactagaacggcccacttcgttgatcaacaatctacagaagagaaaagtcatggccgatgtagtcattgtagatgaagcacatttgttggccacttctaaggatgctttcaaaagattttatggcgaaaaccatctcaaagacttaatgtccctttgtaaagtgcttgtattggtttacgatgataagcaagctttaagaatgggttcctattgggatgaaggttctaataacggtgccactttaaaggacttttacaacgagattccaccaaaatccagagactggtacactttaaaacagcagtttagggtggctgccccacaaaacgtgttgaactggattgaccaaattagtgtcgcaggtaaaatcccaccaattgaatctgtgctatctaagggcaatgcagattgtgctgacgataaaattaagaattttgatttcaaaatttgggatgattgtggcgccatgtacgaggcaatcaaggagaaagaccgtcaacacggccaatgtaggatgctatctacttacgattttccctatcgcttggacggaaaagactattacgttgaatgtggtgacaatttcaaagttcgctgggatcgctatactccacgtgaagtgacgccttggagtgagcgttgcgacacgattgatgaggtaggtagtgtgtatactatccaagggtttgatctgaattatgctggtgtaattttgggccgttccattgggtatgatgcggctaatgactgcatcaaactaagaccagagctgtatgacgatagggccggtttcaccaaaaagaaaaacattcacaatgcagaggacgttaagcaaaagattattatgaatagcattaatgtcctcttaactcgtggcgtgcgtggtctgtatgtttatgcatacgatcctgaattaagagagagactgcttcgtccatcaaaaaaatag

SEQ ID NO: 78844 - DNA, 1020 bp, Saccharomyces pastorianus
atggcgggaagtacatccagtttggtgatctgtgcgattggtatatatgctacttttttgacgtgggcattagtacaggagcctttggccacaagaacctggccaaactccatgggaaagtttcaattccctaatgtaatatccctcatacaagcttctgtggcaatgatgatgggctacctgtacttaaactggaagaaggtggaatatccgcccagaaaaatgattaaagatcattggaaacaattgatgttgatatcatttacacagagtagttcaggcccgctggctacaacttctttaaagcacgtggattatctcacttacatgttagcaaagtcatgcaagatgatccccgtgttgttggtgcatttgcttttgtataggacgcccatagcaagccaaaaaaaagttgtagctctcttggtaagtctcggtgtcactattttcactataggtggcaacgatggtaaaaagttgaagagatcctttaatgagagcggaaatgataacaaattacaagggtttggactacttttctctagtttattccttgatggattgaccaacgccacccaagataagctactaaaggccaataaggccaaagaaaagggaaaacaaactttgataacaggtgcacacttgatgtttacactgaacctcttcgtgatattgtggaatattttgtattttattgtgatcgactgcaaacaatgggataatgccgtttctgtattgacgatggacccacaagtgtggggctatttaatgctttattcgttctgtggcgctatgggacaatgctttattttctatactctagaacaatttggctctttagttttgatcatgataacagtcaccaggaaaatggtctcgatgattttgagtattattgtcttcggtaagagtgtacgtttccagcaatgggtgggaatgtttatagtatttggtggaatcacttgggaagcaatcaacaagaagaaggctaatataccgaaggcaaaatctgcgtag

SEQ ID NO: 78845 - DNA, 1800 bp, Saccharomyces pastorianus
atggttgcctattctccaatcattgccacctatggtaatcgtgcagaacagtttttagaaacagactcagacttcgctaaataccatgcgaaattgaataaaaagttgcaacacttgaggagccgttgccatttggtcaccaaggatacaaagaaatactcaagtaaaaataagtatggcgaaattaactccgaggattatgataataaaactaaattgattggtgttttgattttactacacgctgaaagggacttggcattggctgaaactttgaaattgagagctcgtcaaagaggaaagttaaagaaaagtgaagaaaaggttttatccacaagattgaagaaggcctgcaagactgctgataaattggttaacgtcactcaaaatgaacagcaatggataactcgtgcccaatatttagcgttcgctaaattggtacattcagagtacctaattaatggaaaaaggttcaagaggaaggacaatgccaaaatttcgaacaacctagccctcgttttcgccgcattggaacacttgaagaatctaagcttattatctgaagaagttgtggataacattgtgaataaataccagtactctctcaagcagtacgcgggaaatttaattacaacgcccgaaataaataactttatcgtggaaagagttcaatctgatgagaacaaggacgatgagcttgtgaaattgttattagacaatggattcaatatgaaaaaaattacaacctcaactgaagatcaaaaggctaccactaacataaactggaggtctttcaacgccaagataatcgatgctgaagttgctcaatttttggaacaaggtctatctatccacccaactcagattactcaatatacacagaggctatcaaaattggagaaagctttagaccgtcatgaatttttcatcgcaaaccacgacgatcaagatgacatagacgagatggttgaaaatagttctgaaaacaatcagataattttagcctacattaaatataatattcttttgacctctatatctcgtgaaagagatttgtttactcatttatggaatcaatggctgaaattaaatacttcattaccatcgaagttaaccaaatataaagaaatggaacgtattgtgaagaatttgacaaaatatttatcggacataatggagctacctggtgtgtattcagatgacgagctgctaagccaattagacttatgcaagctgtatttccagttatttctgaatacgggctgcctgagtgttttatatcagtcgaaaggcagatatatggaggcgttagctctatatgtggacgcttaccgaagattagaaaacaaattatctgaaattgaatctctagacgaaatcttgcttccagcaaatcttttgtcattgaattctgtccgaagcttacaaaagagaatcgaaaacggtggtaatagtgtcattactttggcggaatacgaaaaaagaaatcatggtggcagcttagggaaatatgatttgacagtgattgaaaaattggatagtaaaaaaatactgccaacggacatacaattgaaaaatttattccctctcaagccaaaaatgctgcccattcctagtaaaccaacactttttgatttggccttcaactacataacatatgataagcaagagccctcagcttctcaagtgaaagattcagtcacagaaaccgagagcatctctcaaacaccaatttctaatgagcagacggaaggagagcctaaaaagaagcgtggtttcttgggcctatttggtcgttaa

SEQ ID NO: 78846 - DNA, 4488 bp, Saccharomyces pastorianus
atgacagcatattcaggctctccttcgaaaccaggcaataataattcttatctaaatcgttatgttgaaaacctaggcaccaatgtgactccacctctgagaccgcagtcaagttccaaaatcaactcttcgttaaacatagcgtcgccaagtcatttaaagactaagacgtcagctagcaacagttctgcgacaattttgtcaaaaaaagtagaaagttccgtatcaaagctgaagccatcccttcctaacaaactcgtaggaaaatataccgtagacttaagtaattattcgaaaatagaactgaggtactatgagtttttatgcagagtatcagaagtcaaaatatggattgaagctgttattgaggaagcactaccatcagaaatagagttatgtgttggagactcacttaggaatggtgtttttttggccaagctaacccagaggataaatccagatttgacaacggttatatttcctgcaggtgataaactacaatttaaacacactcagaacattaatgccttttttggtttggtagaacatgtcggtgttccggactcttttagatttgaattgcaagatctctataacaagaagaatatccctcaggttttcgaaaccctgcatattcttatatcaatgattaataagaaatggccaggcaaaacgcccgctttaacaaatgtatcaggccaaataagttttaccaaagaagaaatcgcagcttgtaaaaaggcatggcctagaattagagacttcaagtccttaggaactaatatcaatactgcaccagcttcccctgaggaaccaaaagaaaaaagaagcggattgataaaagactttaataaatttgaaaggccgaatataccggtggaagaaattttaattaccccaagaaagaatataacagatgctaattgctccgatttttctaatacaccttcaccttataatgaagctccaaaaatgtcaaatttggatgtcgttgttgagaagaggaaattcacacccattgagccgagtcttctgggccctacaccatctttagaatatagcccaataaaaaacaaaagtctgtcgtactattctcctaccatctcgaaatacctgacatatgatacagaattttatacgagaaggagtcgtgcaagagaggaagatttgaattattaccagacgttcaaatactcaccttctcattattctcccatgagaagagaaaggatgacagaggaacaatttttagagaaggtagttcaactacaaaatatttgtcgaggagttaatacccgttttaacctatacattcaaaaaaggttactgaacctttttgaacaggacatagtaaggtttcaagcatgcctaagaggaaataaatttagagtattgtcgtcaatgtatttgccaataagaagagcaaagattgatgttcctcatgtcgaggcgattcaatcgcgaattaagggaagcagaattcgatataaatacgataaattgaaatttacactctcaaggttttcgtgtactgtcgaacttttgcaagcatattgtcgttcaaaattgttgaagacaaccgttaacacaaaattaaatgatatcgagatatcacattatcctctgacaaaattgcagtcttatatgcgtgcttcttatgtgagaaagaaggtgatgtccctcaatacaaagttgaacgatgagcgagaaagtattatgaagttttcggcaatcatcagaggtaatgttgtgaggtgttcagaggacgcgatattaagtgctgtacatgatgtacataaggaaaatatctcaaaattgcaaagcttgattagaggaatatttacgcgttcgtgcctagcatcaataatatattcacttggaaaagaaaactgtaatattattcaattatcagcctgtatacgcggaaacgctgtaagacataaggtacagtcactgtttgcgcccgaaaataatctcagtgaaactgtgcacgacctccagggtttggttagaggtattctagtccgctacacattagacttagtcgatgacattgtggagtataataatttagcattatttcaagcattttctagaggcgctttagtacgtgaaagcttggaccaaaagtcgagtttttacaagagaaacgtaaggtcggttattatgattcaaagctggattaggaaaagtctgcaaagatcggcatatttggaacttctagactgtccaaatccaagtctttgggctgtcaaaaaattcgttcatttgctcaatggaacagcaaccattgaagaggtccaaaaccagttggagagttgccaagcctctcttgattccgaaaatatgaagaaggaacgattactgaagagcataagacaacaactaaatattaacggagtattggataagtttggactattaaaagataaagatcatgaactcggtatttccgattctacgattccgaagtctaaatatcaaaagtatgaaaaactgttctatatgttgcaagttgatccctcttattggaaattgctgtatttgaaagagccagaatttgttgcaaagaatgtttatatgacatttggaacagtgaatcaaaggatgaacgacagagagagatcctatttcacaaggtttgtttgtgaaatgttacaaaatgcgattaatgaagcaccgagtattgaaagctttcttgacaaccgatcacaattttggcaaaccattcttcaagattttttgagaagagagtctccagaattcttctctataatagtcccagttttggattacttgtcagatccagtagtggattttgaaagtgatccatacaaaatttatcaagaaatacacggctttagctctcctcagcattgttcgcctgtggatgatgcgagtaccaagaataagttcattgacaatttaaggtgcctatggcacgcgattgaaatggtcgctgaaatttataccagaaaggttcacactattcccgttgaaatcaggtacctctgcactaaaatcttctgctacgcggcagataagaatattgaggagattgactctttaagggccatatcaagtattctagtgaacgtttttgtgtctgagtatttggtcaaccgggaatattacggatacaaagacagcaacgttcaaaaaaataaccaaaaaattgacattctaatgaaatccttggcgactgtttttgaaatcaaaaattttgatggctttttggatccattgaaccagtacgctaacgaaataaagcctcatatcaaagatgtcctttataatgtgttagtagatccagagtatgaacaagagggagatagattgatttatttggatatggtatcgccaagccccaaattggaattgttaactgaaaaggttctggaaatcagtggtaaatttgaagagtatttaaatgaatttccggaagcagatattttgcatgatattttggaaaagaacttggacaattcatcctttccaagatcaggacgtgttaccttggaattggatgcatctgcatatcgatttctcgttagtgatgacaagatgagaaaaatctacgaccaagttaaaagggcatttgtgtacatgatgcaaattgaggatgtagataccaatttgtatgacctttcaattagtacaattctacctcaagatgaaccaaattttgcaaattttctggagcaaaatcctaaaatcagggatgatccaatgatacagaagctgaaaccattgaaatacttcacactcaaaaatgttactttgaaaaaaatacatgaactagaaagtacggggactttttgctcttctgataataagttacaaaatttcttaaacgatattgcgaacactattaaaaatcccaactatgccattgattatgtaacccaggaaatttacatcacaaaggaaacactcacaaaaatttcggaaatgaaccacagcttagatatagaattatcaaggcttaaaaaacatgttgatcatacgataaaagacttccagaaagccaaggatttttcgccggtgcacaaaagtaaatttggaaattttaagaatgcagtaaaaaaagttcaaggaagagaacgttctgaattgcagggaatgaagtttaaatggaacacaaagcagttgtatgaaagaggagtgcttaaaaccatcaggggtgaaaaactagctgaactgactgtaaaagtctttggttcgagcggtcctaaattcccagatataatattcaaaatttccacatcggatggttctagattcggtattcaaatgattgacaaaagaaaagggcccgataaacgatactcggatgatgtcgattctttctcatttaaagacttgataaagactcaagttgaaccaaaaatcgagacgtggaaattattccattccaacgttgttgttaacaatagccaattactacatttgattgtcagttttttctataaaaggaacgctttgtaa

SEQ ID NO: 78847 - DNA, 2124 bp, Saccharomyces pastorianus
atggctggtgaaacctttgaatttcaagcagaaatcactcagttgatgagtttgatcatcaacactgtctattctaacaaggagattttcttgagagaactgatatctaacgcctccgatgcgttggacaagatcagatataaggctttgtccgacccaaaggaattagaaactgaacctgaattgttcattagaatcactccaagaccggaagaaaaagtcttggaaatcagagattctggtattggtatgaccaaggcggaattgatcaacaacttgggtaccatcgctaagtctggtaccaaggcctttatggaggctctttctgctggtgccgatgtctccatgattggccaattcggtgttggtttctactctttattcttggtcgctgatagggtccaagttatctctaagaacaacgacgatgaacaatacatctgggagtccaacgcaggcggttctttcactgttactctagacgaagttaacgaaaagatcggtagaggtactgtcttgaggttattcatgaaggacgaccaattggaatacctggaggaaaagaagattaaggaagtcatcaagagacattctgaatttgttgcttacccaatccaattgctagtcaccaaggaagttgaaaaggaagttccaatcccagaagaagaagaagaaaagaaagacgaagaaaagaaggatgaagatgacaagaaaccaaaattggaagaagtcgatgaagaagaagaggaaaagaagccaaagaccaagaaagtcaaggaagaagttcaagaattagaagaactaaacaagactaagcctctatggaccagaaacccatccgaaatcaccgaagaagaatacaatgccttctacaaatccatctccaacgattgggaagacccactatatgttaagcacttctccgtcgaaggtcagttagaattcagagccatcttgtacattccaaagagagctccatttgacttattcgaaagtaagaagaagaagaacaacatcaagttgtatgttcgtcgtgttttcatcaccgacgaagctgaagacttgatcccagaatggatgtcctttgtcaagggtgttgttgactctgaagacttaccattgaacctgtccagagaaatgctacaacaaaacaagatcatgaaggttatcagaaagaacatcgtcaagaaggtaattgaagctttcaacgaaattgctgaagactctgaacaattcgaaaagttctactctgccttcgctaagaacatcaaattgggtgtccacgaagacactcaaaacagagctgccttggctaagttactacgttacaactccaccaagtccgtcgacgaattaacttctttgaccgattacatcaccagaatgccagaacaccaaaagaacatttactacatcacaggtgaatctctaaaggccgttgaaaaatccccattcttggacgctttgaaggctaagaactttgaagttttgttcttgactgatccaatcgatgaatacgctttcacccaattgaaggaattcgaaggtaagactttggtcgatatcaccaaggatttcgaactggaagaaactgacgaagaaaaagctgaaagagagaaggagatcaaagaatatgaaccattgaccaaggccttgaaagaaattttgggtgaccaagtggagaaagttgttgtttcttacaaattgttggatgccccagctgctatcagaactggtcaatttggttggtctgctaacatggaaagaatcatgaaggctcaagccttgagagactcttccatgtcctcctacatgtcttccaagaagactttcgaaatttctccaaaatctccaattatcaaggaattgaaaaagagagttgacgaaggtggtgctcaagacaagactgtcaaggacttgactaagttattatatgaaactgctttgttgacttccggcttcagtttggacgaaccaacttcctttgcatcaagaattaacagattgatctctttgggtttgaacattgatgaggatgaagaaacagagactgctccagaagcatccaccgcagctccggttgaagaggttccagctgacaccgaaatggaagaggtagattag

SEQ ID NO: 78848 - DNA, 390 bp, Saccharomyces pastorianus
atgctggaattagcacttggagtaccttctttgctttcagcatccacattatctagaccagctttagctagttctttctcaaacgcgtctacactgctgtcctttgtctttttctttttcttcttcaaggatagttcacccaaggcttctgctatgtcgtcagtaggctctttttcagcttcagcatcggcagaaacgctcttggacttcttctttttcttttttaatccggcaaataaatcatctcctgaaccattttctttgccgtttacggcagcatcaaaatcatctgggatcaccttcttagtcttctttttcttctttagtgtagggtcgaatcctaactcagcagctaaatcggaggacatctcgtgcgtgcttattatatga

SEQ ID NO: 78849 - DNA, 858 bp, Saccharomyces pastorianus
atgtcctccgatttagctgctgagttaggattcgaccctacactaaagaagaaaaagaagactaagaaggtgatcccagatgattttgatgctgccgtaaacggcaaagaaaatggttcaggagatgatttatttgccggattaaaaaagaaaaagaagaagtccaagagcgtttctgccgatgctgaagctgaaaaagagcctactgacgacatagcagaagccttgggtgaactatccttgaagaagaaaaagaaaaagacaaaggacagcagtgtagacgcgtttgagaaagaactagctaaagctggtctagataatgtggatgctgaaagcaaagaaggtactccaagtgctaattccagcattcaacaagaagttggcctaccttattcagagttattatctagatttttcaatattctaagaactaacaatccagaacttgctggtgatagaagtggtccaaagttcagaattcctcctcctgtttgtttgcgtgatggtaagaagactattttctcgaatatccaagatatcgccgaaaaattgcatagatctccggaacatttgattcaatatctcttcgcagaattaggtacgtccggttctgttgacggtcagaaaagattagtcattaagggtaagtttcaatccaaacaaatggagaatgtcttaagaagatacattttggagtatgtcacttgtaaaacttgtaagagtattaacaccgaattgaagagagaacagtcaaacagactgttctttatggtctgtaaaagttgtggttctaccagatccgtctcttctattaaaaccggtttccaagctaccgttggtaagagaaggagaatgtga

SEQ ID NO: 78850 - DNA, 1095 bp, Saccharomyces pastorianus
atgatttctattgtattggaattgttccagaacttgtgctgctgtcgcgggttttccgatgctactattagggtaaatgataaacgatataggattcaacgactacttggagaaggtggaatgtcctttgtgtatttggtacaactgtcaaagaatcctctgattatagacaacggcatcgcaacaccagaattatacgcactaaagaagattatttgtcctagtgtggaaagtatatccaatggtatgcgagaaattgaaaattacaaacggtttcaaagcccttatgttataaaaagtatcgactcacaagtaatgcaggaaaaagatggatcaaaaacaatttacatagtactaccatattattcattggggagtttacaagactctattaatcggaggttactcgagggcacctttgtatcagaggcagaatgcgtaaggataatgcttggagtgacaagaggtttactttgtttacatgatcctgcgtcaagacaagataacgctacttccagagtaaatgtcgatgcggtttctatgacttatagcgatgaaacggcgatgctcctagaagacactcccttagagatggacatgctttcctccaactcagcaggttcaatagcatatgcacatcgcgatattacaccttcaaacattttgttctcttcagacggtttaccagtaattggtgacctcggctcctgctctcaagctgatataacaattgaaaacaggcatcaactcagcgaactacaagaatgggtcaatgacaattgtacgttgccatatactccaccagaacttctaaacttgaaattaaatcaggttttgagctctaaggttgatatttggtctttgggttgtacgttctatactttaatgttcggtatctccccctttgagcgagaagagcaaatacatggagcttctttaacctacgccataaacactggtaagtacagtttcccgagaaattccagattttctgaggggcttttaagtgtaatcaagaaatacattcaagtggatcctatacaaaggcctactaccagccaattattaaatcttttacaagatttagacacttga

SEQ ID NO: 78851 - DNA, 1416 bp, Saccharomyces pastorianus
atgtcgattcaaactagtgatccaaatgaaacatcagatttaaagtcgttatctttaattgctgcccactcccatattacaggtttaggtctagatgaaaacttgcaaccacgtcccacatccgaaggtatggttgggcaattgcaagcccgtcgtgctgctggtgtgatattgaaaatggttcaaaatggcaccatagcaggtagggctgttttggtagcgggccccccttcaactggtaagaccgctcttgccatgggtgtttcccagtctctgggtaaagatgtaccattcactgccattgcaggctcagaaatcttttctttagaattgagtaaaactgaagcactaactcaagcttttaggaaatccatcggtattaaaatcaaggaggagacagaattgattgaaggtgaagtcgtggaaattcaaattgatagatctattactggtggacacaaacaaggaaaattgactattaaaactaccgatatggaaacaatttatgaattaggcaataaaatgattgatggcctaactaaagaaaaggtattggctggcgatgttatttctattgataaagctagtgggaagattaccaagctaggcagatcctttgctagatctagggattatgatgccatgggtgctgataccagatttgttcaatgtccggaaggcgaactgcaaaaaaggaaaacagtggttcatacggtgtcactgcatgaaattgatgttattaattcaagaacacaaggatttttggcattatttactggtgacaccggtgaaattaggtcagaggtaagagaccaaataaacacaaaagtggcagaatggaaagaagaaggtaaagcagaaattgttcctggtgtattatttatcgacgaagtccacatgttggatatagaatgtttttcctttataaatagggctttggaagatgagtttgccccaatcgtcatgatggccacaaatagaggagtttccaaaaccagagggactaattacaaatctccacatgggttacctctcgatcttttggataggtcgattattattacaactaaaagctataatgagcaggagattaagacaattttatctataagagcacaagaggaggaagttgaactgtcatccgatgccttagatctattgaccaaaacaggtgtggaaactagtttgcgttacagtagtaatttaatctccgttgctcagcaaattgcaatgaagagaaaaaacaacactgttgaagtggaagatgtcaaaagggcttatttgctatttttggacagcgctagatctgttaagtatgttcaagagaacgagtcacaatatattgatgatcagggcaacgttcaaatatccattgctaaatcagcagaccctgatgccatggatactacggaataa

SEQ ID NO: 78852 - DNA, 651 bp, Saccharomyces pastorianus
atgtcacaaggtcagtccaaaaaactggacgtaactgttgagcagcttcgaagtatataccaccagtttcatgatatcttggaagaaaaaactgatttgcatctaccgaagaaagaatacgacgatgacgctgttaggagagaggttcagatacagttacaagaatttcttttgagcgccatgacgatggcttcgaagtcactagaagttgtcaacgccgacacagtaggaaagacggtaaagcaattgatcatggagtcacaagagaagtacatggaaccctttgaccttgacctgaatgagcaagttagaaagatgtaccaagagtgggaagacgaaaccgttaaggtggcccagttgaggcaaacggggcctgcaaaaatcaacgaagtttacaacaactcaaaggatgagtatttggcacaattagatgggagaatcggcgttcttcaagctagaatgatgcagcaacaatctgccgaccatgatgatagtactgacgatgccgatgatcacatcaactgggagcacatcaagcaggattacgttgcctcactcaatgaattgtatcaaacacagcaagacctacccaaggtaagatataacgttgaaaaggtcaagcgcttaatggacttcctggaggaggattga

SEQ ID NO: 78853 - DNA, 1179 bp, Saccharomyces pastorianus
atggaaaataccacgaatcgtaatactgcaggcgttcttacgagcaacaatggtaactttgccaccaatagtgtagcggcatcaactccgaagaggtccaaaagtgctcgaaggaaaacgttcaaatgcaccggatatgacggttgtacgatgtccttcactagagcggaacatcttgcacgtcatataagaaagcacactggtgaaaagccgttccagtgtcctgcatgtttgaaattcttcagtagagttgataatttgaaacagcatcgggaatcggtccatgcacataaaaaccaccattctaccagctcgcaccagcgtaagccttcctcttcatctttatcctcctcttcttctgcatcttcttcgtcttctgcttcatcatctacatcatatagtgatccttacaggaaaactaatattaatagcgggaacatgccgatgatggcagaaaacgaaaaagcgccccatataatacattcttcgccggagttcattactagcacgagaagcatcccacccatctctccaaggtccatttataatacccaacgacagcaacaacaccaacaacaacaacagcatcaacaggctccctattattttccttcccatccaatcactgatagttactaccagtatcctcttcccagtaataataacaccatcaattatttaccatcagtagatgtgcagtatcctttgaatgtgagcccctcctcaatgagccatccggcctctgaggtaatcatatcgtcctttcctccgagatccatgccaagtacttccttcaaatataaagattctgctgactttcaagcacggacaactatgaacaaatacaatattagaccaagcaatatcaatgtcaatactagtaatatcaataacaatcttgattcattctccccgccgttttctccgtcaacgacagttgctgaagcaaaaccagttattttaccacagtatcagcaggcatttagccaaccaccaaatggaaataaaaacaataatatgtcttcctcgaagaatggcggcaaagggggagaaaatttcaagaatactgatgatcgcaatgataataataacaaaaagaggtcggaaactttatcagagtctgatatttcggtcaacaccaataagaaaaggcttagtgttgattacatattgacttga

SEQ ID NO: 78854 - DNA, 645 bp, Saccharomyces pastorianus
atgatgccctacaacacccctccaaatatccaagaacctatgaacttcgcaagcagcaacccctttggtattattccagatgcgctcagtttccagaatttcaaatatgatcgtcttcagcagcagcaacagcaacagcaacagcaacaacaacagcacctacaacagcagcaacaaaatcgcactgcgtcatcgttacagcagccgcaacagcaacaaccaataagcccgcctttgtttttagtaggggccggtgccagcgaaaactcaaaccttaacaagaatgccaacactagtactatccctcctttactctttagcagatcgtctcagcattatgttgtcccagatatagaccactcctccataatatacaagaacaacatctgcaaatctttcaaagatgacttatttttctgtccaagatctttactttctctcgaagaacaacaagcatgcgagaaaatggataggctgaccgctgaacaaatgtcattgtatcatcagaacacgcaatccagttctaatcctggttctatgtcttcttcacctccaaattctgcttcttctatattcaactctaggccgaagttcaatccttatacatctcaaagttttaatcctttggaaagtgttcaagaatga

SEQ ID NO: 78855 - DNA, 441 bp, Saccharomyces pastorianus
atgtctacttttaatgcagaaaccgctgataacttggaagatatcgagaaacaattcgctgttgttgctgttgaacaagcggaaacatactggaaactattaacaagtgttcccggttccaagttacgtttgactaagtttgatgacgaaatatacgagaattttatggagagattcccagaatacaaagatgttgaaagggtcaaaaagtttacggaggaagaattaaaaacaaaagaagccaaggaaagatggagaaagttcttcacaatttttgagaaaaaaatcgaagactataactttggtactttgttgaggacagacgcttctgccgagtatggtcaatttactacttgttttgtcgtgagactacaattttacgcttttgaaattgctagaaataaacacggcttgaacgattggattgtcggtcagaaatga

SEQ ID NO: 78856 - DNA, 507 bp, Saccharomyces pastorianus
atgtccaatctattaaacaagtttgctgataagttgcacggcaacgatcatgatgaacgttacgaagacgacaatgacgaccagactagacaacagcgtcatgaaaaacaccaacagagggaattcaggaatcaaggatccaaggccgatccctacggcgaagaaaaccaagggaatttccctcaacgccagcagccacagtctaatctaggcggtaacacgcagtttggcggtaacgacttccagcaacaaactactgactacactgccggcactggtggtggcacttatacccaaacttaccgcgaaactaacactcaaggtcagttggacgacgatgaagacgatgacttcttgacttcgggccaacagcaaaaacaaggtcgtacaagaggtgctcaaagtaaccgctaccaatcctctaatatcggcagcggtagacgcgatctgtctgggtcaggaaacgatgaatatgatgatgatagtgggaaccaaggcgtctggtag

SEQ ID NO: 78857 - DNA, 2067 bp, Saccharomyces pastorianus
  modified_base (2035)..(2035): a, c, g, t, unknown, or other
atgggggaaaaaaggacaataatcaatgcgctgaaaaactctgcagcgtcccacttcatcaagaagttgaccgcagatacttccctgtcgtccatacaagaggcaataaacgtcgtgcagcagtacaatgcaacggatcccgtgagattaaagcttttccatacgcctcggatggtttcgcagggggctcattttgcattttgtttgcccactaagaaaccacattacaagccattactgctttcgcaaaacgcacttgatgagtttaatttggtgcaggatcaggacttggagaaaatactatccggtgagaaagtatattattccgatagtatctttccctatagtacagtgtactccggatttcaattcggctcatttgctgcacagctgggagacggacgtgtggtaaacttgtttgatcttaaggacaagtgtagcggacaatggcaaacgtttcagttgaaaggtgccggtatgacgccattttctcggtttgcagatgggaaagctgtgttaagatcaagcatacgtgaattcataatgagcgaggcgttgcacagtattggaattccatccacaagagctatgcaattaactctgttaccggggacgaaggcgcaaaggcgcactcaagaaccgtgcgctgttgtatgccgttttgcgcccagctggatccgcttgggtaacttcaacctattcagatggcggcacgacttgaaagggttgatccaactatcagattattgcattgaggaattgtttgctggggggacccaatttgaggggaaacccgactttaatatattcaaaagggatttttttcctgacactgagacgaagattgatgagcaggtggaaaaggatgaaactgaggtgagtaccatgaccggagataacatttccacattgagcaaatatgatgagtttttcagacatgtagttagcttgaatgcaaacacagtggcccattggcaagcgtatggggttgctaacggtgttttgaatacggataacacctccattatgggcctgacaattgattatggcccctttgccttcctggacaagtttgaaccaagctttaccccgaaccatgatgacacagcgaagagatattcgtttgccaaccagccaagcattatatggtggaacttgcaacaatttgccaaggatctcgcatgtctgctgggtcctgaggcccgtgaccttgaattgttacttaagggcgaactgaattctgttgatgacgccctagagaaaaccatgattgaaagggtccagaagttggtagagctcagtgctaatgagtacaagtatgtgtttacgacaaggtacgcgcagataatgtctcaaagactcggtgtagatctggatctggaaaagtgcatgtcttctacaaacctcaaagatatcgaacatgcagccgagaaggctaaagagttctgcgatgttatcgtcaaaccattgctagatattctgcaggccacaaaagtcgactataacaatttttttatccatctacaaaattacaaggggcccttcttcatcaaagataaaagtgacaccgcaacactttttggagcattcgacgaagagtacttgggtatgttcttcaactccaagcaactgcagcaaatggcagaaactgaagaggccttcgcggctggtgagaaggtctttgacgctaacggcgaattgcgtttgctcaacgaaaaattgcaagaaatacgcaattggacccaagactatttgaccttggtcccacccacggaaactgctgcaagagcgtcgcttgccaagaaagccaacccgttgtttgtccccagaagttgggtactggaggaagtagtcgacgatttaatgtacagtcaaagggatggcctacaagatcccagttcggagctagatacatctgcgttgaagaagctatacctaatgagcgtaaacccatacgaccgcacgaaatgggatgtcactctgcggccagaactggagacaaaatgggctgacctttcccaccaagatgacgctnagtttatgatgcaagcttcctgcagtagctaa

SEQ ID NO: 78858 - DNA, 246 bp, Saccharomyces pastorianus
atgggtttacgctcattaggtatagcttcttcaacgcagatgtatctagctccgaactgggatcttgtaggccatccctttgactgtacattaaatcgtcgactacttcctccagtacccaacttctggggacaaacaacgggttggctttcttggcaagcgacgctcttgcagcagtttccgtgggtgggaccaaggtcaaatagtcttgggtccaattgcgtatttcttgcaatttttcgttga

SEQ ID NO: 78859 - DNA, 654 bp, Saccharomyces pastorianus
atgtccaagatcacttcttctcaagtcagagaacacgtcaaggaattgttgaagtattccaacgaaaccaagaagagaaacttcttggaaaccgtcgaactacaagtcggtttgaagaactatgaccctcaaagagacaagcgtttctctggttctttgaagttgccaaactgtccaagaccaaacatgtccatctgtatcttcggtgatgctttcgatgttgacagagctaagtcttgcggtgttgacgctatgtccgtcgatgacttgaagaagttgaacaagaacaagaagttaatcaagaagttgtctaagaagtacaacgctttcattgcttccgaagttttgatcaagcaagttccaagactattgggtcctcaattgtccaaggctggtaagttcccaaccccagtttctcacaacgatgacttgtacggtaaggtcactgatgtcagatctaccatcaagttccaattgaagaaggtcttgtgtttggctgttgccgttggtaacgttgaaatggaagaagacgttttggttaaccaaatcttgatgtctgttaacttctttgtttctttgttgaagaagaactggcaaaatgttggttccttggttgttaagtcctccatgggtccagctttcagattgtactaa

SEQ ID NO: 78860 - DNA, 1479 bp, Saccharomyces pastorianus
atggctaatgatcaagatcccaacaagtctctcattaatgacgctttgactcggagtatgtccgaattttatgatgatgatgatgataacgacagtgacatgtgtagggcaaatgatgagggagaagacgtttttgaccttccacttaaggtaggcgtttctcaaagcaggaacttttcagaagtaaatgacgtgttagacccgctttctagtttgcatggtccgtccaagaaggtgagatttgaacagcaaaagcagcaacagcaacatcagcaacttcacaatgacttcaatacagatttcaacctgaaaagcccgtccagtaaaaaaatgggggtagaacagctgatccagtcagccaatgaaatcaacgattacctcgctaacaacattgacaaggtaaatagctttaactcagagctattgagcggcagtggcaagttacctgggagagtaaagagtgacacagcaactcaaggtaccggacgcttagattccatgtccaactttgctcttagcgatacggagttggacaatgatgacgataattatctcctggatccccttgcaaatgctagctctactacacccactgtggaacaccacggttacagcttattagacaaggctttatccacgtctgataaggaaaaaatatatacgaataaagtgaattcgaatagtcagatagatactgataatcactctcacgaaagtggaaacactaccaataacgaaacagatgaaaatgagagttcggagatcctggactacacaaaatttgattctttcccctatcccccgtcttctgcccccaatggggaaccaccagatttgaaagtgctaagcattgaatgtgagcaggaaaatgaaaaagagctacgacgaatatctttattattggatcattacgaatcaataccgaaaataccagaattgtcagacgatgaagcactatctaagttccgtgagaatatcgaattaattttacaactatctaagaaaattaacgataatgcgaacactttagcgatttcctccgaagatcctcaaaaatttgttaattttgtgatgaagaacccaccttccttatcattcagagattttatcgacagaatccagaataaatgcatgtttggtgccgtagtctatcttggagccacctatctacttcaacttgtgtttcttacgagagacgaaatggacggtcccataaagttgaaggctaaattacaggaggaccaagcccataggatcatcatatctacaataagaattgccaccaagctattagaagactttgtccactcacaaaactacatttgcaaagtcttcggtatttcaaaaagactgctgactaaactggaaatttctttcatggcgagtgttaatttcgatggattaatgattacttgtgaaaaattagaaaaaacattgcatatccttgatgatacaagacaggcattaggaaacacatga

SEQ ID NO: 78861 - DNA, 1623 bp, Saccharomyces pastorianus
atggtatttactaaggaagaagttgattactcattatatctggttacagattctaccatgcttccaccgggaactactttatgttctcaggttgaagctgggttgaaaaatggtgtaacgctagttcaaatccgtgaaaaggatattgaaacaaaaaatttcgttgcagaggctttagaagttcaaaaaatatgtaagaagtacaatgttccacttattatcaatgaccgtatagacgtcgctatggcaatggacgccgatggggttcatgtgggccaggacgatatgccaatcccaatggtaagaaaacttttgggcccttctaaaattcttggatggagtgttggtaaaccttcggaggtagagacattggctaaatgggggccagatatggtagattatattggtgttggtactcttttccctacatcaacaaagaaaaatcctaagaaatcacccatgggtcctcaaggcgccattgccattttggatgctttggaggaatttaaagctacatggtgtagaaccgttggtattggtggtcttcatcctgacaatattcaacgtgtgctttgtcaatgtgttgcttcaaatggaaagagatcgttggatggtatctctctagtcagcgatattatggccgctccagatgcatgtgcagcaaccaagaggttgagaggcttgttagatgctaccagataccaatttgttgagtgcgagttaaataatacatttccgaccacaacttcaattcaaaacgttatatctcaagtatcaaacaatcgtccattagtgcaacatatcaccaataaggttcatcaaaattttggtgccaatgtcactctagctttaggctcatctcctatcatgtctgaaattgaaagtgaagtatctgaactagcaagaatcccaaatgcttctttactgttaaataccggatcagtggcacctattgaaatgctaaaagccgcaattaatgcttataatgaagtaaatagacccatcacctttgacccggtcgggtacagcgccactgaaacaaggctctgtctaaacaacactttgctcacttacggccaatttgcttgtataaagggcaattgcagtgaaatactgtctctagccaagttaaataaccataaaatgaagggcgtcgactctagcagcggcaaaacgaacatcgacacacttgtgcgcgctacacaaattgtggcattccaatacaggactgttgctgtttgcacgggtgagtttgattgcgttgctgatggtacttttggaggcgaatacaaactttcatcaggaacagaaggaataaccgctgaagatcttccatgtgtaataattgaagatggcccaattcctatcatgggtgacatcactgcaagtggatgttcacttggttctacaattgcttcctttatcggtgggttagattccactggaaaactgtttgatgctgtggttggtgctgtcctattatacaaatcagctggtaagttggcttccacccgttgtcaaggaagtggttcattccatgtcgaattgattgacgcattatatcaattattccatgaaaataaaccagaaaagtggtccgcttctttgaagaaattcaaataa

SEQ ID NO: 78862 - DNA, 966 bp, Saccharomyces pastorianus
atggttgaaattgtgggccacagagcttttaaagcaagatatcctgaaaatacgctactagcatttgagaaggcttatgcagcaggtgctgatgtaatagaaacggatttacaaatgactagcgatggtatgatggtggtaaaccatgactcagacactggtcggatgtgggataagaacttggtgattggcgagtcgacttgggaggaggttaagcgattgcgctgcaaagaggatggttccttagcaatgatgacattgaaggaaattctaacatgggcagtgtgccatccaggtgctaaattgatgttggacatcaaatttaccaacgagaaaatcatcatgatcaagacctttgctatcatgttagaggttaagaatgatcttaaattttggcaggagaggatcacgtgggggctttggttgctggattggtacgatttcggtattgaaactggtgttctgaaggatttcaaagttattgtgataagtctgtctttagatatcgcctcgcaatttgtgaagcgctctttgacactgaatgatcctcactataaactttttggtatcagtgttcattttgtctcctcgtggacaagccaatttagattgagattactacctgtgcttatgaagaatgatatcaaggtctatttatggactgtcaacaaacctatagatttcaaatatctgtgcgaattgcctatccatggtgctatcacggatgatccgatcaaggcaagaaagttatgcgatggtcataccgtggcgaagaagcctactgctgaaaaaaagtttgttgcgcccagtctggcatctgtagatgggctaagattccatgcttttatcaaagtttataacatcctttgcacgcttctatattccaaatgggtccatattaagttgtgcggttggtctattgcttatgtgatttttttgttccttcgaaccattcattttctttga

SEQ ID NO: 78863 - DNA, 1485 bp, Saccharomyces pastorianus
atggacttaagagtaggaaggaaatttcgtatgggcaggaagattgggagtggtccctttggtgacatttaccacggcacgaacttaattagtggtgaagaagtagccatcaagctggaatcgatcaggtccagacatcctcaattggactatgagtcccgcgtctacagatacttaagcggtggtgtgggaatcccgttcatcagatggtttggcagagagggtgaatataatgctatggtcatcgatcttctaggcccatctttggaagatttattcaactactgtcacagaaggttctcctttaagacggttatcatgctggctttgcaaatgttttgccgtattcagtatatacatggaaggtcgttcattcatagagatatcaaaccagacaactttttaatgggggtaggacgccgtggtagcaccgttcatgttattgatttcggtctatcaaagaagtaccgagatttcaacacacatcgtcatattccttacagggagaacaagtccttgacaggtacagctcgttatgcaagtgtcaatacgcatcttggaatagagcagagtagaagagatgacttagaatcactaggttatgtcttgatctatttttgtaagggttctttgccatggcagggtttgaaagcaaccaccaagaaacaaaagtatgatcgtatcatggaaaagaaattaaacgttagcgtggaaactctatgttcaggtttaccattagagtttcaagaatatatggcttactgtaagaatttgaaattcgatgagaagccagattatttgttcttggcaaggctgtttaaagatctgagtattaaactagagtatcacaacgaccacttgttcgattggacaatgttgcgttacacaaaggcgatggtggagaagcaaagggacctcctcatcgaaaaaggtgattcgaacgcaaatagcaatgcagcaagtgcaagcaacagcacagacaacaagtctgaaactttcaacaagattaaactgttagccatgaagaaattccccacccatttccactattacaagaatgaagacaaacataatccttcaccagaagagatcaaacaacaaactatcttgaataataatgcagcctcttctttaccagaggaattattgaacgcactagataaaggtatggaaaacttgagacaacagcagccgcagcagcaggtccaaagttcgcagccacaaccacagccccaacagctacagcagcaaccaaatggccaaagaccaaattattatcctgaaccgttactacagcagcaacaaagagattctcaggagcaacagcagcaagttccgatggctacaaccagggctactcagtatcccccacaaataaacagcaataattttaatactaatcaagcatctgtacctccacaaatgagatctaatccacaacagccgcctcaagataaaccagctggccagtcaatttggttgtaa

SEQ ID NO: 78864 - DNA, 1251 bp, Saccharomyces pastorianus
atgaaagcaaagtcgatgaagagcataatatctgtgccaatatcagtgtctaaaacagggaaaatgaagttaacagcatctcccgataatctagcatctatgatgtctaaagaccaaaataaacttattcatttagacccagttccgtcttttgaggacaggcacgagattaaaccgtggctacagaaaatattctatcctcaaggaatagatatagtcatcgaaagatcagatagtagcaaagttacttttaagtgtaggtcagtacgatcgaaagtagggttgaaccctaaatccaaaggttcctcttcaagatcccatgcatgtccatttagaattagagcagcctactctgtgcggttacagaagtggaacgtggttgttatgaataacatacattcacatgagctgagatttgatttgattactaaaacggatgactataaaaagtttaaggaaaatcttcgtcagaagaacgacgaaaaagccatcaaaacatttgatgaattagaatataaagcaagtctaaacttaccactcgtcacaccaattatttcttgtgactgtgggttaaccaaggaaattgaagctttcaataacatttttctcccactatcaaacccccctttgacgtctaaaaaaaatttgctcaaaacaaataaaaactccgtttctaaaataaaatccagacagatggataattcgaaacctaggccaaggttgaaaacgaagttggatgcggatctacatgataccggatttttagacaatttcaaaacgcggaattcctgtgtaaagatagagaaagaagattctttaacgaacttaaacgaaattgattttacgaacatgttttgcaacgacaatttcatccaaaattacaaccaaggcctgatggaacttttgacagaacctacaccaggtccttcgtcctcttcttgtatacttccttcaacaccaacgaggcccttgtcacaaagcaaaatggatatagccctgtcagaatcaacaacatcttcaccaaattttatggaaacagacgctccttatggagatgagatcattaaagtttacaaagataccaaaagcaacgcaccaactgctgatacagatattgctacgaacttaggcaaagagagaaacgaaaattttggcatgttaaactacaactacgaagcgttgcttcatttcaacgatgagcattttaatgaattaaattctattgacccagccttaatatcaaaatattaa

SEQ ID NO: 78865 - DNA, 1386 bp, Saccharomyces pastorianus
atgggtatacctatgcaaatataccaggatgggaagggggtgcaattttaccacacgagatatcagaacgtatttgacgaacgggcgagcaagtatggcaactacacggtgaataatgattacccacagcttccagatacgataaaggaacatatcgaccagcttacctttagcaatgtcggagaggatggtggagatgttggaaactattctgaagaagacgatgatggtgacgaagaaaaggaacttgaagatgtttttcgaagtaaccgtgggttggaatttgtacggattaataactattttactacccacgatttacaaagtttcaaaagttttagaaatttcaatagcaagtactggattttttattctaatcaagcagaggacaaaaaattactgctgtatgactttaacggccaacatttgatttttatcaagcagcaattttacgggcagttgaatttactgctatcggacgcaataatatgtatggactgcaattttggttataattcaaacaccattcaaattttagttggatttcagaatggaaagttgttaaagctaaactgcgacttgaacggaaacgtaaacaatcacttgcttttgaaggatccttcaacttcctctcatcaaagccacctatctatattaaatgtctgggcaggtttgttgccacatttcgttgtttcttttagtttgaaagatgggctgctaataacttctttagatcaccaacaaagcaatggaagttttcaaagtttccataccaacattgatttgcctgtagatctacgcacgaccacaaatgtcaagtccgttttaaatttccctcagtttactttatacaaaggaaatgatatgattttccactgcaagaatctattaggatcggatgcttccacgctaaacaaggaaataaactttatgcttaaaatagacgaagacgttcaaaagatcgactatctttctattacgaatcacattttactcgaaaccaacatgagatatctgtccattccaacaagagaccccatagagaattcaaattcttctccacccgtctcagacagcgaggtttatccaatattttacaagacacaagaacttcatgtccatgcttcaggaacaggacgtcagatagcaaacaatgggaagtatatttttataaccgagcaacatctctacggaacagcgttatcggtatacaagtactctatatctttcaaacggtggctgttcgtgggctactcagacattagggccaaatacggtataaggagtgtcaaagatctctttgttggtaactgtccctctgtaaatagcccagtgctgacaattcttactgatgacaataacattcaaacaattcttcttaaataa

SEQ ID NO: 78866 - DNA, 471 bp, Saccharomyces pastorianus
atgatggatggttccataacaaggaaggtaacatcaacgttgtccaaccaattggcgacctggaaatggaaactgcagttatcgttattggaaagaaaattagcgacaataaacaatgattattttctcctgcaatgggaactcctttttataactaatgaagtgatgaaatggaaagaaatgattgcctttttggaaagccagttattttgcacaacgcaaaatttcgtggcacaagagacacatgacagggaaacctttccaagcctggtagatgattataacaaacagttgagcgaaaataacctgattatttctgtattgaaaagtagaccacagctatcatcatttcctatatatttgagcgatgaggtgtgttcacaccttaaattcgtcatcgcggaactaaattcattgataatagttttttttatttctttagtatttttgtgggtatcgatagaagtttaa

SEQ ID NO: 78867 - DNA, 723 bp, Saccharomyces pastorianus
atgaaaggaacaggtggagtagtagtcggaactcagaatcctgtaagggactacaatcatagcactgatgaagagtatcaaagattgagaagattagcagatgaagcgtataagaaaagagaccaactcagccatgaatcgcaaaccgcttatcaacaaggtgacaagaagctagctcatgaactaagcgagaaaagtaaggcacaactgaaaaccgctgaagattttaacatgcaagcggcagaatatgtgtttgtagagaacaatgctgattcttccagtaatgaaattgacttacatggattatacgtaaaagaggccctatttattctccaaaaaagaatcaaattcgctattgatcataatgaaccacaactgaacgttattgttggaaaagggttgcattctcaaaacggtatagcgaaactcaaaccgtcaattgaggagttctgtgctaagcatggtatcagaaaccatttggaaaaaggaaattcaggagtcttggtgcttgagttgcaaggtgtgcaaatgcagatggatggccccgcagtgaatgcccccactaatcagtacaatgcacaaccacatcctcaatataacaacaatggaggacaacctcaaggtcaagcccagaattataataacagtggcaatgacaacaaagatagtactttgactagtatattcaaaatcttttgtaattgtatacaaagtttggcgtga

SEQ ID NO: 78868 - DNA, 822 bp, Saccharomyces pastorianus
atgtttggagtcaaggatgctatattcaagattaaacgttccattgcaggcacagattcttctgattccactgcttacacaacggcaagtgaatcttcacctcaattaaaagattcccataacccctttcgaaataaaacgacatccgagagaactatagttgaggagggctctctaccaccggtgagattgaatggctacttgccctcaactaaaaataaacttcttactcctgaaatgtgcgatgaaataagaacattaatgcccacaaggatacagttgtacaccgaatggaaccttctatatagccttgagcaacatgggtcttcattacactccctgtatagtaacgttgctccagatagcaaggaatttagaagagtggggtatgtattagtaataaaggatcgtaaaaacggaatctttggagcttacagcaacgaagcttttcatcctaacgaacataggcaatacacaggaaacggggaatgttttctatggaagctggataaagtacctgatgttaatatatccgaaaaagaagaatctgagcaagaaggtaaagaaggtaaggaggaaggggataaagaggagagatggaggttttcaggttatccttacactggagttaacgaatttgctatatactgtacatctgaatttctttcaatgggtgcaggtgatggtcattatggtcttttatgcgatgacggcctactccatggtgtttcaaacccttgtcaaacatatggcaatgaagttttgagtaaggagggcaaaaaattttctatagtagctttggaagtatggcgtgtaggatag

SEQ ID NO: 78869 - DNA, 402 bp, Saccharomyces pastorianus
atgacagcaatgaaagaagacaacgctgcattgattacactgaagaaaaacaacgaccaagaaaaacttagagtgcataaactgacagatgcaagttcaaactctgctgatggcttcgttataaataaagccaaaaacggtggtccgcttaataaaaagtcattagttaataatgaacaacacattaagaaggctgtgtcgcctggtagagtcaggaagcacaaaacgacaacatcttccacaaaatcgcgaacgaaaagtaagaaaaaagacgcttctgaaagtaaagtacagagagagaataagggttcattttaccaaggtgccattttcggttcgttccttggtgctgctgtaactactgttttaagtaacctagcagttaaagctcttcaaaattag

SEQ ID NO: 78870 - DNA, 1083 bp, Saccharomyces pastorianus
atggatttaagtttcacgactaaaagtgtcaaaattaatggtcaaaaccatcgaatattactgcaaaacgaaaacggaccttgtgccttgttagcacttgcaaatattctaatactttcaccagatcatacacgtttttccaatgagttaataaggttggtaaataagggaagtcaaatatctttaaaagaacttattgaagtcttagcagatattgctttacaagttacagataaacctagtactgatataagtgagttactaagtttgttacctagattacatgaaggtttaaatattaaccctgagtttaatgggtcttttgaaaatactaaagagatgtcaatatttcgattgtttaacgttgatgttgtccatggctgggttatcaacagtttcataaatgaaaacattgatgagaaactatctcattattcttatgaatctgcgcagagaatcttaacacaagcagctgatataaattgtggaatttcccaagatgaaaactcggacgaagttttacgtgatgccatgcatttgggtctgtttttgaacgaatcaccgactcagttgaccgcctttggactcctacgattgagagaaaagctgctacacaacaaattctcgattttattcagaaatgaccatttttctacattgttcaaatacgaagatcgattatacacattggttacggactttggttataaaaattgtaaagatattgtatggcaatccctagattcggtggacggctcctgcgatgctttttttgccggtaactttagtgcagcagaggtaaatggacagcaattgtcaactgacattgaacgtgattttggaactggaaatttgctacttgaagaaattcagcaaattgaaaacgataaagaactagccaaacagttacaggaacaagaacaagaacgtgttacgaaatttgaagcaaaaaggaaaatccattctcacaaaaaaaactcagaaatacacgcaccagtcaaaaaagacaagtttaagcgaagaagcagccttctcaatgcaaaagcttctgaaaaagagaaaagtgagtgcgttgttatgtaa

SEQ ID NO: 78871 - DNA, 207 bp, Saccharomyces pastorianus
atgagagcagtcactagaaacaaaatagtcaataacctatacttttctacatttctcattgcattcgcatcagtggccatcggttctgtgctgccatgtccagcacattcagtggattctgattcaccagctgtacagcaacacaagcttcagcttgctcatgagcaggagttaaagaggaaggatgctttaagtaaaaagatttaa

SEQ ID NO: 78872 - DNA, 1245 bp, Saccharomyces pastorianus
atgtttgtcagggttaaattgaataaaccagtaaaatggtataggttctatagtacgttggattcacattccctaaagttacagagcggctcgaagtttgtaaaaataaagccagtaaataacttgaggagtagttcatcagcagatttcgtgtccccaccaaattccaaattacaatctttaatctggcagaaccctttacaaaatgtttatataactaaaaaaccatggactccatccacaagagaagcgatggttgaattcataactcatttacatgagtcataccccgaggtgaacgtcattgttcaacccgatgtggcagaagaaatttcccaggatttcaaatctcctttggagaatgatcccaaccgacctcatatactttatactggtcctgaacaagatatcgtaaacagaacagacttattggtgacattgggaggtgatgggactattttacacggcgtatcaatgttcggaaatacgcaagttcctccggttttagcatttgctctgggcactctgggctttctattaccgtttgattttaaggagcataaaaaggtctttcaggaagtaatcagctctagagccaaatgtttgcatagaacacggctagaatgtcatttgaaaaagaaggatagcaactcatctattgtgacccatgctatgaatgacatattcttacataggggtaattcccctcatctcactaacctggacattttcattgatggggaatttttgacaagaacgacagcagatggtgttgcattggccactccaacgggttccacagcatattcattatcagcaggtggatctattgtttccccattagtccctgctattttaatgacaccaatttgtcctcgctctttgtcattccgaccactgattttgcctcattcatcccacattaggataaagataggttccaaattgaaccaaaaaccagtcaacagtgtggtaaaactttctgttgatggtattcctcaacaggatttagatgttggtgatgaaatttatgttataaatgaggtcggcactatatacatagatggtactcagcttccgacgacaagaaaaactgaaaatgactttaataattcaaaaaagcctaaaaggtcagggatttattgtgtcgccaagaccgagaatgactggattagaggaatcaatgaacttttaggattcaattctagctttaggctgaccaagagacagactgataatgattaa

SEQ ID NO: 78873 - DNA, 915 bp, Saccharomyces pastorianus
atggtcaccattgtatttgatcatccggcggaagactttccagagttgaagatcgctggggagtttaccaattgggaaggtgtacccatgaaaataaataccagtagcgggaaatgggaatacaaatttgatgaatcttcggtaaccaaacataatgataaagataaggtacatttcaaatttatagatcagaacggtaactggtttgccgatgatgagtatccaaaggaggtggacgagcacagcaatgaaaacaatgttgctactttaaatagcgaagaggacggcggaagcgctggtgaagaaaaggacgagggcgacaaaactgcacacaatacaaatgaaaatgggtcagagttgtactatgagggccctgagacgccaactccttctttaaaaggtaatgtaacgtttccttcccctaaaacagctatttcgcaagatggttctgcttttgcaaaagagactaccaggaaagaaagaaagtatgaacatgctccattgaacgaagttccagtagaaagagatccaaaagaagagaataaggagctctctccaaacttttctcaggaacagacagagaataaacaggacgaaggtttagacaatctatctgaaggtaatgataatgataacacaagagttaatgaagatacagacgtcaccgacacgcaagaatcagaacatgagatcaacggttctgatactgaaaatacggatatgtccgaacaagaagaaatacagaaaatagataaacccgccgatcaaaacgctaagtcaattgtaaaagaaggcgatgccaatactgaagattatgaaagtgttttgaaaaagctactgggagcgttaggacgcttttttggctcatggttttcttggttgacaacgaaaatgtcaagctcagaggcatcataa

SEQ ID NO: 78874 - DNA, 1851 bp, Saccharomyces pastorianus
  modified_base (62)..(93): a, c, g, t, unknown, or other
atggtggtttcttataacaataacaataataataacaataacaataacaataacaataacannnnnnnnnnnnnnnnnnnnnnnnnnnnnnnnaacatgttccctccttttccttcttccgatgactttgcaatgtatcaacagtccagttcttctggcccttaccaagaaacttatgcgagtggccctcaaaactttggcgatgctgtgtatcctatgaatggtaattttactcttttaccatccgactttacacgagagcctaatgattcgttcttttacgagaatgacggaatttttgattatcagcgtattcaacagcaaccaactcaattccagacaaagcagcgaaatgattcacaacaacaacggttttcacaggaacaaaatttcgaaattgataacgaagttgtccacaataacaatcgttattatgaatatgaaaggtcatctaatgaagtctctccttttgatgatgagaatccaaatgtgttatctgatggcatgtcacccactattatggcaactgcaactgcagtaaccaacgcaaatgcgcctttaccagttaatgcacaagccaataatcctttgaattttacatcggccccaagtagaactgtttatttgggtaatgtgccaccaaacctaagcgttaaagagttattggatcatgtcagaagtggtgtcgttgaagacgtcaaaatcatacctgaaaagatgtgtgcattcgtttcgtttatagatgaaagtgctgcactattgttccattcagacgcaattttaaagcgcttgaacatcggtgacagggatatcaaaatcgggtgggggaaaccaactcgaattgatcctattgtagcggctagaatctctacggacggtgccactagaaatgtatacattggccgtatgacgattgaaggcgaagaatcacatttatctgaggagcaattgagggttgatttagaagaatatggtgaaattgactgtataaaaattatcaaggaaaagggaatcgcctttattcattttgcgtctattttaaatgctataaaagtggttacgaatctgccaattagaaatccatactatcaaaataagagaatattttatggaaaggacagatgtgcatttattaccaaaactcaacaacataatgcggctcaatttctaggtgtacaacctggtatggaacatatgatagagttttctgatcgtgaatttatatctaacgctttgttacaacagtctgctgctgctgctgcaattgctacatctgcgggcggccccaataacttgggtaacaggactgtttacctgggcagcttgcctaaggatgttaaaattgaagaaatatgtaatgcagttcgtggaggtttattacaaagtataaaactattgaacgatcgatacgtctgttttgtaacattcattgatcctactgctgctgcgcagttttatgcaatgagttctttgtatggattcacagtccagaaaaaacgttgcaaagtcggctggggtaaacactccggcccattaccaaatgcgctcgccttggcagtcagtaatggtgcctcaagaaatgtttatgtgggtaatattgattttgtcggcgattccctaagagatgaacgtgtcttcaccgaaagcaacttaagacatatctttcagcaatatggggaagtggaacaaatcaatttcttgcctgagaagaactgttgtttcatcaattatactaacatcagtaatgctattttagccttagacaagattaagtctaacccctatttcaaagatctcaaaataaactttggcaaggatagatgtggtaacgtcccccaccaatcacgttaa

SEQ ID NO: 78875 - DNA, 282 bp, Saccharomyces pastorianus
atgtttttacagactctccgcctaactatgccaaggatgtttttgcacatgaaaccgtcccccataacgataacaagggcctgcacagtgcccagcctcctatctgttgcagctccgcaaccagctcttgttgcagctaacagacctttggtttttaacagaggtttcaaggtcagaacatctgtcaaaaagttctgcagtgattgctatttggtaagaagaaagggaagagtatacatttattgcaagtcgaataaaaaacacaaacagcgtcaaggctga

SEQ ID NO: 78876 - DNA, 384 bp, Saccharomyces pastorianus
atgaaaaatccggagtcatctggagtatcgagctctccacagatacagcgagtttcgccttcctcttcctcgacttccccctctccaccttccataggaacatcttcttgttttacactttcttcctgtacacttccaatcgccgccgttgttgtcgctgttgatgttgttgatataatgtctgtggacccactagcaatgacttccgctttctccatatcttcactgcccacaacagggcctttaggcactattgctgtcgattccattactcttctctttactcctatatgtttatgctatcttttagtaaggttacgcaaagtaaacttcgaaggaaacaaactattgatggtctctgttgtgaactttgtacccctgtaa

SEQ ID NO: 78877 - DNA, 1521 bp, Saccharomyces pastorianus
atggaatcgacagcaatagtgcctaaaggccctgttgtgggcagtgaagatatggagaaagcggaagtcattgctagtgggtccacagacattatatcaacaacatcaacagcgacaacaacggcggcgattggaagtgtacaggaagaaagtgtaaaacaagaagatgttcctatggaaggtggagagggggaagtcgaggaagaggaaggcgaaactcgctgtatctgtggagagctcgatactccagatgactccggatttttcattcaatgtgagcagtgcagttcctggcagcacggttattgtgtgagtattactcaagacaacgcacctgataaatattggtgcgagcaatgcagaccagagttacatcagctctttaccacagatactggcgaagcaaggttaatctataaacctgtgcaagagaaaaggaggcaatcaagaaggaaggcacgaagtgcagctgcaagtaaatctcatgccgccaatgaagcagagaaaagtcccagaaataccagcaataccgatgataacgtcgacgatatcggcgacgaagaagatgaagtagaagatgaagcttcggctgtagcattagccaaggacggcaacacgaggtcaagtagaaggaggaggaggaattcaatggatgatgcttctaccgatcagtattcactggatcctggagatagtgataagaagctactggatagaacaagggcaactttcatggcaagagaagaaaagcaatatcaaagaatgcttgaaaaagccttgaaagaaagcaggaggacatcacatcaagaagatcctgaaagttatgaaaatgatgctgatatataccaaggtgataccgacaatcacaacggcaccactcgattacaaacggatgttatgctaacggaaggcaaaccggactcggtaacaaatgatgatatgaaagaaagcctacgaccatcgaaagagcaatcaatggaaaaaacaaatgatgtggaaaaagaagctagtcaagaaaaggaatcttctacgggttcggcgcaagacactgagaaaactgatgaacccatcctacccctaacctcaatatcttcttctgaggatgattcaaggaaagctagttcgaggggttctaaaagagtttccaaaccagcaagaaagggcaacagaactcgtcgaagcaatacaagttcagacaccaaccaaaatagaaggagtgctgatataggtaccgacaaaccagtaaagcccagattaccccctcaaaggacctcattaaacgaaatgagaagaagggtatctgctattttggagttcatttctagaactcaatgggaattgagtgaagatcagtctgatcgagaagaatttgtacgattcgtggaaaaccagcatttcgtagaaaaagttgatacgatttacaacggttataaggaaagtctatcaatgatggacgacctgactagagagttactactatgggagaaaaaatattcaaataacactaatgccattcaataa

SEQ ID NO: 78878 - DNA, 1650 bp, Saccharomyces pastorianus
atgagaagaagcccgtccagatcaaataataactttgcagtaccgaattgctcaactaattcaaactctagtcagcaacaattaactacaccttcagatgatctcaacagtaacgaacctaatgacccagatgatagtaggtctctacctactatcaagaaattcaataataaacattctataaacaattacaacactttagcatcggccgggaaaaacaacaacaataaacgagctagcaatgataatttgctcattcctggtgagaatgcccataaacagaaaatatacactaaggatgaaaacttgaagagcttgtacctagatatcgatgttcctgtcgctaaagccctatcctcatcagcaactgctccgaagctgatcaataccgcaagaacttcctctactaccactgccactacctcaaataatatcctgacatcaccctcttatcgtgaatcaaattattcttctccatcctcatattctttttcctcctactactcatccgctacgtctgcttcttcatcgacctcatcatttttaaaatcttcagggttatcgtccagagttaagtctccttcatcttcggttaaggcaggttcttttggtgcgccttcgtccccaacatctgggatacctaatcctaaaagtagcaaaaagcctatatttttgagacggtattcccatgatacctcttcaaatgaaggtcttgatatcgatgttgcgatcgaaaaattactacaagtgggtgagtcaagagaaattacaaaaacgtccaaaaaaaagaactttccattccattcttgggaaattcaactcatttgctatcatgcaagagaaatttttttgaatcaacctactcttttgagattacaagcgcctatcaaagttgtcggtgatgttcatggacaatttaatgatttattgagaattttgaagttgtctggtgtgccatctgatactaattatctgttcttgggtgattatgtggaccgtggtaagaactcattggaaacaatactattgttattatgttacaaaataaagtacaaagacaacttttttatgttaaggggtaatcacgaatctgctaatgtcacaaagatgtacggtttctatgatgaatgcaaaaggcgattgagctcgaaagtatggaaaatgttcgttgacgtatttaatactttgccattagcagcaattattcaagataagatcttttgcgttcatggaggtatatcgcccgatttacatgacatgaagcaaatcgaaaaagtcgcaagaccaacggatattcctgaaagcgggctggttacagacttactgtggagtgacccagaccctcaagtaactgattggtcagaaaatgatcgtggtgtttcatacacattttctaagaggaacgttcttgatttttgtgctaagtttaaattcgatttaatacttaggggacatatggtcgtagaagatggttatgaattctttgccaggaaaaagtttgtcacaatcttttcagcaccaaattattgtggagaatttcataattggggggcagtaatgagcgttacaacgggtatgatgtgtagctttgaactgttaaagccgcgtgcattgaaaaataaaaagaagttatacaaaaccaaagtgtag

SEQ ID NO: 78879 - DNA, 627 bp, Saccharomyces pastorianus
atgtccctggaagaatttgacgaagttaaatatgatcattcaactaaacgcctagatacaccatcaaggtacctgctgcgcaaggctagaagaaaccctaacgggctacaagaactgcgtgagtcgatgaagtcatcaacaatttatgtaggaaatctttccttttatacatcagaagaacaaatttacgaattgttcagtaaatgtggcacgataaaaagaataattatgggtttggaccgttttaagttcacgccatgtggcttctgttttattatatatagttgtccagatgaagcattgaatgccttaaaatatttgtccgatacaaagttagacgaaaagacaattaccattgatctagatcctggttttgaagatggaagacagtttggtcgtggtaagagcggtggtcaagtcagcgatgaattgaggttcgattttgatgcatccagaggtggcttcgccattccatttgcagagcgtgtcggcgtaccacattccagatttgataacagtagctcacaatctaatacgaataattatatccctcctcctgatgcaatgggtactttcagaccaggtttcgatgaagaaagagaagatgataactacatacctcagtag

SEQ ID NO: 78880 - DNA, 894 bp, Saccharomyces pastorianus
atgtctggaagctatcaacatttatcaaacgttggatcgcgtgttatgaaaagattggggaatcgacccaaaaactttcttcctcatagtgaaaagttcattaaaaaatctacgcctgagttcatgaagtcagatttaaaggaagtagatgagaaaactagtttcaagagtgaaaaagaatggaagtttatacctggcgacagagtagtagtaatgagcggggcttccaaaggaaatatagctgtaattaaatctttcgataaaagaacaaattcattcatattagatgagaatgggcccacaaagactgttccagttcctaaacaattctggcttgaaggccaaacatctcacatgataacaattccagtttcaattttgggaaaggatttaaggctagttgctgatattgacgatgaaaagaccccaggaaagacaagaacggtggcagtaagggatgtttccttcaatggttcctactatgatgcagactacaaaaaggtaatgccatatagatgcgtaaagggtcaaccagacttgatcattccatggcctaaaccagatccaattgatgtgcaaacgaacttggctaccgatcctgtatttgctagagaacaaacattttgggtcgattccgtagtgagaaaccctattccaaaaaaggctataccaagtattcgctatcctcattctaagtacaaaaggggtaccttgacagcgaaagatatagctaagctagtagcacctgagatgcccctaacagaggtaagaaaaagccatttggcagaaaaaaaggagttggctgagagagaggtaccaaaactaactgaagaggacatggaagctattggggcgagggtttttgaatttttggaaaaacaaaaaagagaataa

SEQ ID NO: 78881 - DNA, 1389 bp, Saccharomyces pastorianus
atgagttactttcctcgaacatatgctcacttgatgagaaatgttcttgctcataataaagggaatatatacttacaaattggtacacagctgcacgatactcaaataaaaattcgatttaatggagttcgttatattagtcggaatcatggcgggaaacagcaacatataaacactgcgccgatagaattcactcccaattttggatatggtgatagaacctctaattgcaataaaaaggttgaatcgactgccttgaaaacgctaagatgcacagatgatatatcaaattcaagtggaagcgaagctactaccgatgcaaacacacaacttccatttaatgtcaaacttgtagacccgatggtaagaaaatctaagaaaccatctcacgcaatcagcgaagggctgaatatgaaaactttaaagaagaaggtgattatgccatatcttcagttgaccaagccccgactcaccattctagtgatgttaagtgccatttgttcgtatgctttatctccatatccagcctccgtcagtgaattgttatgtttaacagtaggcactactttatgttccggttctgcaaacgctataaatatgggcagagagccagaatttgatagacaaatggtgagaacgcaggcgaggcccgttgttagaggtgatgttacacctacccaggcattcgagtttgccgcacttatcggaacattaggagtatctatcttgtactttggtgttaatcctaccgttgctattcttggtgcttcaaatatcgcgttatatggctgggcctatacgtctatgaaaagaaagcatatcattaacacatggttaggtgccctagtaggaatggtacctcctctaatgggatgggcagccgcaagtccgctctcacatccgggatcttggtgccttgctggtctgttgtttgcttggcaattcccacactttaatacgttgagtcataacattagaaatgaatacaaaaatgccggatacgttatgactgcatggaaaaatccgctcctaaacgcccgtgtgtcgttgagatactctatcctaatgttccctttatgtttcggattgtcttattttaatatcacagattggtactaccaaatagattccggatttataaatgcctggctaacgttctgggctttcaaattttattggcaacaaagaatcaactattctgcaaaaacattaaaagataacgtcaagtttaataaaggtctaagtgtagccaacatttatgcaaggaaaacttttatggctagtgtattgcacctaccggcaattttaatcctagccattatacataaaaaaggccgctgggattggatatatcctggtgaagcaaagcgaccacaggaacgattttag

SEQ ID NO: 78882 - DNA, 459 bp, Saccharomyces pastorianus
atgtccttcattaaaaacttgttatttggaggtgttaaaacaagtgaggatccaaccgggctcacaggtaacggggcctcaaacacaaacgattctaataaaggtagtgaaccggtagtagcgggtaatttctttcctaggacgctttccaaatttaacggccacgacgatgaaaaaatatttattgctattaggggcaaagtatacgactgcacaagagggaggcagttttacggtccaagcgggccatacactaactttgcaggccatgatgcgtcgcgtggtcttgcattgaactccttcgatctggacgttattaaagattgggatcagcctatcgatcccttggatgatctgacaaaagaacagattgacgcactggatgagtggcaagagcattttgagaataagtacccatgcattggtaatctgattccggagcctggcgtgaacgtatga

SEQ ID NO: 78883 - DNA, 1293 bp, Saccharomyces pastorianus
atgacagttttatacacatctgcatcgctgaaaaaaatgaagtgcttggcattcaacatgggcatgaattgcgtgcgaacagtatctcatgcaagaagtggaggtgcaaaatttggaggacggaatgtatttaatatatttgactcaaaaactcctgattcagtgcgtataaaggccttcaaaaacacaatataccagtctgccatgggcaaaggtaagaccaagttttctgcaatggaaattaatctcataacaagtctagtgcgcggatataaaggagaaggtaagaagaacgcgataaatcctctccaaactaacgtgcaaattcttaacaaattattactaacacatcgattaacagacaaagacatattagaaggaatgaacctggcagccggtcctgtcaatgttgctattcctcgagacataacaccgcaggaagaaaagaagaaagttgaactaagaaatcgaaaagcagagaatatggatcttcacccgagcaggaagatgcatattaaggaacttctacactctttgaacttagatatgtgtaatgatgaggaggtttatcagaaaatatcactttacttacagaaaaatgaggaaagcaggacttcagtgggtgcctcgcaacaaaaccacgtagatatcgatataaactccctaaaacgctatctacaaaatattgaaaagaaggcacgtcaaaaaagtgccatcgataaacaaaaaaagaatcaagctcgtatatatcaatggaatactcaatccttctccgaaatagtacccttatcagctggaaatatcttattcaaaagggaacccaatcgcttatggaaacgtttacaaaatggaataagtgtatttttaggttcaaacggaggaggaaaaaagagtaaaactactaaaaaagtacttcaagggaataacatattgttacactcattagaaaacaataaggatatgaccctgtcaaacaactttgatcacagtgtctttaacatcaattttacggacttatttggcgttattaatgcatctgggtccccaccagatagagttttgaacgaaattaatgagatcgaattaaaaggttggaaatgtgtggggaacttatacgataataataaaattgtagtttttcaaagtagcaatccactcttagaggatacgaagattcctcaaaagtctttcactaattcaaagagattccttatttcactctcagcattgctggcctccttttttgcatattatagataccgtctatctcaacgtcaagaatcaaagaaatga

SEQ ID NO: 78884 - DNA, 822 bp, Saccharomyces pastorianus
atgtatgtttctaatgggaaagacacttgccagttgttggggcccgtgtctctttttgtccagacattgatgggtatgacagccgtgattgtgttattggtgaaaagaaactatgagcatccaaggagaaaaatgattgtgtggagttatgacattggaaaacaaatcatcggctctcttggaatccattttttgaatctaggcatcagcatactgaagaaaagacgaaggtcactcttcgcaatcactgcaaaaggcaatgatgatgaggatcaatgcgattggtattttcttaacttactcctggatactactgttgggattcccattctttggttgtgcttatacataattgaaaaagtgctaaaatccttacacttccaaaacattgaaagtggtaattattttccatctaaaaccgttgggagccaccccagaaaacccttattctctgccttcgtgaaacagctgcttatattcattgttgggctgggcgtgatgaagttctgcgtgtttctaatactaaactacttagaagacttggcatactggttcgccgatcttatccttggctggtcagattcatggccaaactttcaagtttttctggtcatgtttgtctttcctatcttactgaattgcttccagtacttttgtgtcgacaatgtcatcaggttacattctgagagcctaacgataaccaatgcagagaattttgaaacgaacacattcctaaatgacgaaattcctgatttatcggaagtctcaaatgaagtgcctaacaaggataacaacatttccagctatggtagcataatatag

SEQ ID NO: 78885 - DNA, 1902 bp, Saccharomyces pastorianus
atggattacgaagaaattttatttggtctgcaaccgatcctcaatgcgtcttcaataaaggatgttccgatgaacgatgtctacttaggaagctacctagcggtaatggaccaattggctgtttcgttgagagaaccaagtaatagagatattgttggtaaaactgggctgctactgaacctagtaagagtattagaacaagcgcttgatatctgctttcatgatacgagcatttcaattaatgataaaatagcgttttatgagatcagttctgaagtgattagatgtatcgctaacgcaataattgataatgatgataatcgggaaattctcttggattctggaggtaaaaagcttcttaattattatataggcggggttcttcagctggacgaaatttcttctgacaagagtgaggatagcttagtggataaattacagatgcggtcagttgtgctactaaggaatttttgcattggaaatctcaagtatacagaaaatttggctcccttcattagaggtccattatttgttttgttgaaaaccacacaatatagctatttgtcatctcccgaaaaagttgttttaggttcagatttattgaacgatattttaaaagtcaattactcaaatgttcaaataagcgatctctttttcttaagccagtacatcaaaaaaatctcttcaaatgtgcaaaataaagaattgcaggcaatggaagatggagcagtcgaagcatattcaaatactgaaactcagaagttcgctggccaaggaaatcaagagtacatcgaaaaagaggaagaagatgatgaggaggacgttaattgtgaattgctattaaatctgtcaacatgtcttgaaactattgtagccaaggatgaaactataaactttaccaatgaggagcagcttgtgctaagcatgcaaaaaaatttaatattgtccttagtttgcttagaatcaaaaaccttcaataataagctaattgtaatgagaagactcatatcgtgcgcaggcaacatctccgccaacctaacaaactctaacaaacgagagcaatcattatgtatcgaaactattaagagttccgcaagtagttatgccctagccgcagctttgatgatattatgtaactcagttgcatccaaaagtgacgctgtcgcgctactgaagctcatatctcttagtgaatttattcaagttggtagcttgctacaagacccactacaatatcaaggattcctagatttactgaggaagctgttaaatctggaaaataccatgtggctagatatcaaggacctcttcaccctatttcagattatgagaagatgtcacgagcaaactaaatattataacaacctgagatcgttattaacaaatttattaaacaaaactttaacggtgcttccaagttcaaaaatacacaatttaataagcagtgatccaacaattatctcttttatagcagagcatggaacgttaacgtcctgtattgcgatggataagctgcttgtgtccaagaaagcccttcctaaagaagctattacatccctatgggattcgatcttcaaattccaaaatttaggtcaagcagaacaactaagcatctcagatttatttcatatcacaaaaacggttggaatttatttaaaagattcaagtgtaacagctgacgtgaatccgattgaaaatatactattcaaggattacattcaaaagttaaccctgatattagagaccatactttcatttaaagaaaataaagataagggtagcgagagttgtttcaacaatgggaaatttatagcgggcataatactaaacattgtgaaaaatacgaaatgcttaacgccagaggaacaaaatttagaagcgcttgcaaaatcgttcttttag

SEQ ID NO: 78886 - DNA, 762 bp, Saccharomyces pastorianus
atgttgaagctagctcgtccatttattccgcctttatcaaggaacaatgccatttcttcaggaatagttctcacttctagaagatttcagtcttcctttacgttcttaagtaaccagtctttactatctaaaaatcaaatgaaatccaaaagaaaaaagggcagtaaaaaggcagcgtaccatcgtcaacccccggaacacgaacatactgcaccacttataaagcaaaacaagacaatcacaaagaaagaacatagcgatgtgagaggttctcatttaaaaaagaaaagaagcgatttttcgtggctaccaagagtaccatccacctcacatttaaagcagagtgacatgaccacaaatgtactctattctggatatagacccttattcatcaatcccaatgacccgaagctaaaggaagacaccggaagtacgttatacgaatttgcgatgaagcttgaagatttaaatgaacctctatcaccatggatttcctctgccactggacttgaattcttttcagagtgggagaatatacctagtgaactactgaaaaatttgaagccttttcatccacctaaggaaaaatcaatgaacacaaatgagcttattcatgtaagtgctaagagaaatacattagttgacaataaaacaagtgagacgcttcagcggaaaatggatgaattttcaaagagaagaggaaaggggagaaaaaagtcagtagtgacgttgctccaaatgaagaaaaaacttgagggatga

SEQ ID NO: 78887 - DNA, 2244 bp, Saccharomyces pastorianus
atgatcatcagagctccaataaggacaaaaaccaagtcgtttagaggcgatcaaatggattttaaattcccgtctaacgaaagtttaccaagaggaacgctagaagagtaccatttgaataatcatcatcttttaaatgatgtgtttgcagcagaaaatggagtttctcgcgatgaagacggaaactctcaaatattatcagactatacgtccacttccaatacaaatacaaattccggttattcatcaaatggatattattcatttgctaacatttctgacaatactacatcttcaccacgtattgtaatcaatcaaaatgaaaccgctagattaacttcctcagactcgaacaaaagtgacttttttgcttctcatgacttcccaggaaatgactctcttcattatagcagctcaagtgtagttaaaaaccagttacattcaatggaagctattccagagggaaacgtaactggctcaatctcaacggcattccagactatcccaacagcagataatgtttcctacgatatcgcgccgtcatcagcatcatcgttattaccaaggaaatcgacatctaaaagcgccattctgccgtcgacccaagaagccaaaccgatgaccaaattaaatttggaaaaggatataaaaactaccgaattaaacaatagcgtagtaccgaaacctaaaaaaaagctaaacagagttccgaccataagacgagttgaatcctcgaggttttccaattccaggtatagttcaagtgtcagcagtaaatcaagtagcagtcgttgttctctaaaacgatcaaaagctattagatgtaagggcggactcttatattatttcacctcattgggaatcaagataaagaaaaagttacggaaattacggctagttttaagaagaagactgttttcatataatgttcaaaaagtcccctccgccacgaattccaaaaccactaaatctaaagcaaacattaacaacaagtcaaaaaaaagagggacgaatctagtcaacagtaacagcaactctactccgcgtcaaaaaaaatcgcagagatacgtctctaatttacaacggtcgatctcatcaaaatccttagtacctgtattggctccacaaaaaaagactaaacctttgacagttgatacgaaatttaaagcaaaccatccccaatctgaagattccaaagttggatcaaacaccccaaggagtcctttggtaagctatactccatcattgagaagaacaaattcctctattagaagggctgcatccatcctaaccgcatctgccactatgacaccggcaaataataaaaactccttcatttctgtaccggataatgttagtcatgccgtcactcgcaacagcagcatgtactcgaggtcaagattggtaaggtcaaaaccatcgacggccctaaatgcaattgcaagacagccatcaattgtggtagaaaataaagttattccgttatccatgaatcgatattctattaaagaggaagacgaatatgtaattgatactagttctatgagagaattatctcccgttaatagcgtttgctcatctgattatgacagagaatcatctgaaagctactctaattatgcggatgcaatggagacaacggaagtagataataaggacagagttgaatgcaacaatgaaattcaaaatgtgaatgcaaataatgaggaaacttcaaatgaagaaagttacagtttgatgaaacattatttaagcaccgtaattgctcaaagaattatgctcagggtacaaattgctcgtatacaaaatcataagagcaacgttgtttatatgaataaatcagcagaaacaaactcaactatctacgaagatcttgtcgattctctattaactgaatatgaggctgatggtagctcctcccaaatatttgatggcgtttcagtaagggtcgacgaggaagaagaagaagaagaagatgatgatgaagaagatgaagaagatgaagaagatgatgaagatgatgaagaagaagaagaaaaaagaaaagaaggagaaggaagaaatttggcaaaagaggtagacgaattagcggaattaagtccgatgagaaaacaaagcgatttgagtattacgttaagatctccatttgctatgctaaattctgcctactcaaacagcattatatcgctaccaacaggtgtggtcaagaggtcattgactcttcctgtcggtatgaaaatttaa

SEQ ID NO: 78888 - DNA, 948 bp, Saccharomyces pastorianus
atgggaagaacatttattcatgcttcgaaaataaaacatgcggcacgcaaaagaaaacatcattccaactttagaactctgatcaaattattgaacaatgatgcctataagatagaatcatcaaaaccgttgaaaaatggtaaacttttcaaatactggagaaataggcgtagattgttttcaaagatagattcggcgtcgatatatatgactgatgagctgtggttcagtgtgacgcccgaaagaattgcctgcttcctggcaaattttgttaaggcatgcatgccaaatgccgaaagaatactggatgttttctgtggtgggggcgggaacaccatacaatttgccatgcaatttccttacgtctatggagtggactacagtattgaacacatatattgtactgcgaaaaacgcccaaagctacggtgtggacgacagaatatggctgaagcggggatcctggaaaaagctagtctctaagcagaaactttccaaaataaagtacgactgtgtatttggatcacccccgtggggtggtccagaatacttaagaaacgatgtgtatgacttagagcaacatctaaagcctatggggattaccaagatgttgaaaagttttcttaaactaagccctaatgtgattatgtttttgccaaggaactctgatttgaaccagctttctcgagctacgaggaaagtactaggtccatttgccaaatgtaaagtattatatgtaaaggagaatggatatatgaaaggaatattttgcatgtggggggaatgcttttttaactatgaaccagcaagtacggagaatagtcgaagggagtcgtccgaaaaggaagagctgagttctgaaaacgaagagctctcgaaaagagaaaagcatgaatccacaacaacgaccaaagataatactgtagacatttacgacgtaaatggttaa

SEQ ID NO: 78889 - DNA, 855 bp, Saccharomyces pastorianus
atgatagcggattcatcagttttgaaaaagcacacagcaatcaagagaagtacgagaataatatcgctaacactcgttttgcttggcgtatttagcttcttactacttacatggaatgactccttggaattctacaactctgctgaccctagcgaaaacaaaaaaaatagtgaggaagaaagtgaaaagaagttcgtttacaagttgccaaacttattaaagacagcagacagttttctaagtaatgaaaatgaactaaatttccaaaaagtcaaagaagaaatttcaaatattcaaagcgaggttgaagtcgacatcccagaaccctcatccaaagctacatcaaagttttcttcaagatcgttccaaactgataatgtcgtgacggcgacgaccacaacaacactacatccacggtcatcttctctggccttgcagaaaaactgcgatcacaaaaaattcgaccctagaacagattttctagatataataagaacctctccagcggtattattcattaaatcatcacaagcagactccattttcttaaaaaatctattacaaagagaatttgagatttcacccgaattggccactgttgatttggaaaaacactctcatggctatgaattagaaaagtatatcaaacaaaataaactaaatatcgatactagtgctgccttggaatccattcagtcgccttatttatttttgaatggtatttccgtgataaatcgtggaatggtgagagatataatcgaacctcattcgaagggattgctactacctcttctaaagtctgaagcgcgtggcaacttgctggtagaaaaaaaagacatcccttctaattcttaa

SEQ ID NO: 78890 - DNA, 1218 bp, Saccharomyces pastorianus
atgttcagcttgaaagcattattgccattggccttgttgttggtcagcgccaaccaagttgctgcaaaagtccacaaggctaaaatttataaacacgagttgtccgatgagatgaaagaagtcactttcgagcaacatttagctcatttaggccaaaagtacttgactcaatttgagaaagctaaccccgaagttgttttttctagggagcatcctttcttcactgaaggtggtcacgatgttccattgacaaattacttgaacgcacaatattacactgacattactttgggtactccacctcaaaacttcaaggttattttggatactggttcttcaaacctttgggttccaagtaacgaatgtggttccttggcttgtttcctacattctaaatacgatcatgaagcttcatcaagctacaaagctaatggtactgaatttgccattcaatatggtactggttctttggaaggttacatttctcaagacactttgtccatcggggatttgaccattccaaaacaagacttcgctgaggctaccagcgagccgggcttaacatttgcatttggcaagttcgatggtattttgggtttgggttacgataccatttctgttgataaggtggtccctccattttacaacgccattcaacaagatttgttggacgaaaagagatttgccttttatttgggagacacttcaaaggatactgaaaatggcggtgaagccacctttggtggtattgacgagtctaagttcaagggcgatatcacttggttacctgttcgtcgtaaggcttactgggaagtcaagtttgaaggtatcggtttaggcgacgagtacgccgaattggagagccatggtgccgccatcgatactggtacttctttgattaccttgccatcaggattagctgaaatgattaatgctgaaattggggccaagaagggttggaccggtcaatatactctagactgtaacaccagagacaatctacctgatctaattttcaacttcaatggctacaacttcactattgggccatacgattacacgcttgaagtttcaggctcctgtatctctgcaattacaccaatggatttcccagaacctgttggcccactggccatcgttggtgatgccttcttgcgtaaatactattctatttacgatttgggcaacaatgcggttggtttggccaaagcaatttga

SEQ ID NO: 78891 - DNA, 99 bp, Saccharomyces pastorianus
atgatggttcacctcacgctgaaatctcatctaataaaggaagaattactttggcatgctttatctccgtcctatagttgccgataccgcggtagataa

SEQ ID NO: 78892 - DNA, 2706 bp, Saccharomyces pastorianus
atggttaatcctgttggatcttcgaaattggaacaaaacaatataaaaagcattataggatcatcgtacaatcgactatacagccaatttacttctgatgagttgacagaagtgggaaactacaagattttaaaacaaataggtgaaggaagttttggaaaagtatatttagcgctccatagaccaacacatcgtaaagtctgcctaaagacgagtgataagaatgatcccaatatcgttagagaggtattttaccatagacagttcgattttccttatattacaaagctttatgaagtgatagtgacagaatcaaaagtgtggatggcattagaacattgcccagggaaggaattatatgaccacttactttctctgcgtagaatatcgttattggaatgcggagagttgtttgcacaaatttcaggtgctgtttactatgcacactcaatgcattgtgttcatagagatttgaagttagagaatattttattagacaaaaatggaaatgcaaaattgacggattttggttttacgagagaatgtatgacaaagacgacattagaaacggtttgcggtaccacagtttatatggcacctgaattgatagaaagaaggacttatgatggattcaagattgatatatggtcattgggagtgatactatacacattaattacgggatatttgccatttgatgatgacgatgaggcaaaaacgaaatggaaaatcgtcaatgaagaaccgaaatacgatgctaaagttattccggacgatgctagggatttgatctcacgattattggctaaaaatccgggagagcgtccatcgttgtcacaagttttacgccacccttttttacagccttacggttcagtggttttagatcagactcagaaaattttgtgcagacagcgcagtggagggactcagtttaaaagtaaattagaaaggcgattgctgaagcgtcttaaacaatcaggggttgatacgcaagcaataaaacaatcaattttgaaaaaaaagtgcgattcactctcgggtctatggttattgttgttagcccaagggaaaaagcaagaaaattgcaaatatccaaaaagaagcaggtccgttttatcagtcaaaaaagttattgaaagtgctacgcataacgacactaatggcattagcgaagatgttttgaaaccctcgcttgaactttctagagctgcttcattgagtaaaatgctcaataaaggctcagattttgtaacatcgatgactccggttagcagaaagaagtctaaagattcagcaaaagttctgaatcctactctctctaaaatatcctcacaaagggcttatagtcactctattgcaggttctcctcgcaagtccaataatttcttacaaaaagtttctagttttttcaagtcaaaaaaaagctctaacagcaatagcaacaatagtattcacacaaatgttagtgaaagcttgattgcaagcaatagaggagccccatcttcagggtcgtttctcaaaaaaaacagtggttctattcagaaatcaagaactgacactgttgcaaatccttcaaggacggagtctataggatcgttaaacgaaaatgttgtcggtgccattgtgccacggagtgctaataatactacattagaaaataagaaaacttctgggaatgaaataggcttaaaagtagctccagaactattattaaatgaacatatccgaatagaggaacctcgcctcaagcgcttcaaatcgtccatatcaagtgaaatatctcaaacttctactggtaattatgatagcgaatctgcggaaaattctaggtctatatcttttgatggaaaagtttccccgccaccgatacgaaatcggccattgtcagagatatcgcaaatttctaatgacacttatatatcagagtactccactgatggtaataattcgtcattcaaaatttcagatactatcaagccgagctatatacgaaaaggctctgaaactacctcgcagtattcagcttcatccgaaaaaatgacaaatggctacggtagaaaatttgtcaggagggatttaagcattgtatcgactgcgtcgagcacctctgaaagaagttcaagaacagattccttttacgatatcactacagctacaccagttgtgaccactgataataggcgcaataaaaacaataatctgaaagagtctgttttgcccagatttgggactcaaaggccatggactggcaaaaggacgtataccacgtcctgccatggcaagaatgctaggcgttcgtctaaaagaggtctgttcaaaataacttcttcaaatacagactctattattcaagaagtaagctcatcagaagaagaagatcataatgttatctatagcaagggaaagggtcttccaacaccagttttgcaaactaaaggactaatagaaaatgggttgaacgaacgcgatgaagaaggagatgacgagtatgcaattcacactgacggagaattttctatcaaaccgcagttttccgatgacgttatcgacaaacagaatcatttgcccagcgtgaaggctgtggcaactaaacgttcgttgagcgaaggaagtaattggtctagtagctatttggattcggacaataatcggcgaagggtatcttcattgctagtagaggatggggggaatcctacagcgtag

SEQ ID NO: 78893 - DNA, 885 bp, Saccharomyces pastorianus
atgaatgacattaaacaattactttggaatggtgagcttaatgtgctggtatcgatcgatccttcatttttgatgaaaggaagtccaagagaaattgcggtgctacgaataagggtaccaagggaaacatatttagtcaattatatgcccttcatttggaacaagattaaaagctttctttcttttgacccattgaccgacagtgagaagtatttctggtttgagcataataagacgcctattccatggaattacccagtaggtgttttgtttgactgcctagccggaaaaagcgctacttttaccacctcttttgagaaccaggtaaaggatgttctcacttttttgagaattcatttggttatgggcgattcgttgccaccaactatcattcccatcgcatctagcaaaacgcaagcggaaaagttttggtttcaccaatggaaacaagtttgcttcatactgaatggttcctcaaaagctattatgtctttatcggtcaacgaagctcgaaaattttggggcagtgttattacgagaaatttccaagatttcattgaaatatctaacaagataagttcatcaagaccgcgacatataccgctcatcattcaaacctcaaggacatcaggaacttttcgaatatcacaaccaactatcagtatgactggagtcaatcctacgttgaaggatattgaaggcgatattctggacgtaaaggaaggaatcaatggtaatgatgtcatggttatttgtcaaggaattgaaattccttggcatatgctcctgtatgatttgtattctaaattgcgaagttttgatggctttttgtacataactcttgttcctataaaaggcggcgataaagcttcctctgagctctaa

SEQ ID NO: 78894 - DNA, 534 bp, Saccharomyces pastorianus
atgcctccagtgatgagttttgcatcgaggaatattggacgtaagatagcaggagtgggagttgacattgtatacttgccaagatttgcacatatactagagaaatattccccattcgacccatgtggccgttctaccttgaataaaataacacggaagttcatgcatgaaaaggaaagatttcatttcagtaatcttctcatcgaagaaaactgcttaactccacgattgcatgaatatatagcgggagtttgggctttgaaggaatgctcattgaaagcgttgtgttgctgtgttccaaagcatgatctacctcctgcccaagtactgtacgctggaatgctatataaaacacaaaccgatacaggtgtacctcagttagagtttgataagatgtttggaaaaaagtatccaaagtatcaacagctctcgaaaaactacgattctctcttttccactcatgagtttttagtttcgctatcccatgataaagattatttaattgcagtaacaaacttggtagaaagagagtaa

SEQ ID NO: 78895 - DNA, 2598 bp, Saccharomyces pastorianus
atgtcgtacaccaataaacgtcatacatactacggagggtttactaacgatttgtctgacacatttcagtaccctcaaagaacagatgagcaaaggcggaaacatgtaacgtttggtccttatatcctagggtcgacgttaggagaaggagagttcggaaaagtgaagctaggctggccaaagaatttttcaaacaactctaattcaacttttgacttcccaaaacaagtagcaattaaacttatcaaacgtgatagcatatcgaatgattacaggaaagaagttaaaatatacagagaaatcaacgccttaaaacacttatcacatccgaatatcgtaaaattagaagaagtgttgcaaaattctaggtacattggtattgtcctagagtacgcatgcgggggggaattctataaatatattcaaaaaaaaaggaggcttaaggaaatgaatgcatgcaggttattttctcagctaataagtggagtacattacatacattctaagggacttgttcacagagatctcaaattggaaaatctattactagacaagaatgagaacctagttattacagattttgggtttgtcaatgagttttgctcacgaaacgaattaatgaagacgtcgtgtggctctccatgctacgcagcgcctgaactagtgataagcgccgaaccatacgaggctagaaaagcagatatatggtcatgtggagttatactttacgctatgctagctggatatttaccgtgggatgatgatccaaataatcctgaaggcagcgatataggaagactttataattatattaactccacaccattaaagttccctgattatattcttcctatacctcgggacttattaagacgcatgctggtctcagacccaaagaaaagaataaacctgaaacagatcaagaaacatgaatggctaaagcctcattcttcattcttatccataacacctgatgagtgggacaaactaaacaatactcaatccgtgttcagattagcaaaaccaagaagaagatatggatctagaccacaatccagttgttctacctcatctcttggctcaaggagtgataaaagggattcactggtcattgattcaactttaattactttcccggctccgcctcaagaatcacaaaatcatattataaccagaccggcttctattgcatctgaccagcggctgtcacctataagaagatctaataggcacaatagaagtaactctgctgcatccgttgccttgcaggcagtggtgaacgcagatagggagtatgtgttaagtcatgaacaatcattatccccagtacaaaacattagacaaactacgggaaacatgactgccagtctttcacctccaccagccataagtccaggcgacattataatcgaaaccacacctattaaaagaaatacaatttctgggagtagtattgtaccaagtttagaaaaagagtcgtctaccacaatgcaaacaagcaagattcaaccaaataacatggcttcatcacaaaatcatcaatacaataaaaataagacccaaaatagtctccaatctgctaaaactttctaccgtacgtcttcctcatcccatacaaagccacggccaacttcataccatcctggctcatacacaacgcctccctacaattcgaatacgctctccatatatgagatcaacgaaaaagctaaaagtagcgcttcatcacaaacgctgaatcaaagagacacatccccatttgattccacaccataccttgccctagatacatgcataacctcatcctcttccatcgaaagctctccaaagttaattacgcacggccaattttcagtagcaaaaccctctgttgatttgcaaagcgtatctggtgacttgatcaagtataagagggacgcagatgtagtaacgagaatctatgatgaaaaatacaaacagaaacgcaaaagtttgagatatagcggcatattcagtgacatctcatgcgatacggtcaccgaagagtctgatgaattgaggccaccagaatctccttttcaacaacatgaaggacaagaatcaattgataaggcgaaaacggaggacacaagtgaaaagggtagtagaaatagcaacatcgcgaaagctacagcacaaaaacacgtcaataaccatctagaaagatcacttaacgaagcagagtcaacaaagaaaagatttagctttctttccttgtactcttatgatacttccaaatctagtttatactcatcaatggattccaaacggaaaccttctccaccttcccaaagacgcccaaaaaaggatgacagttatcaaacaaattcaaagaatcattatatcactgcttcaaatatgcaaacatcccatcaagtctcaaaaaacctgcctgcaccaacgatggtgcaaaataaatgtactttagaaactaaaaaagcggtccgaagcaacaggtcctccataatggtatctgaggtcaacaaggcaagcgtagacaataaagcagcccaaagtccagaacattcaaccgcaaaaagagtattagggtttttcaaaagaagaagtatgaaaatctag

SEQ ID NO: 78896 - DNA, 174 bp, Saccharomyces pastorianus
atggcggagccacatcctaaagtcttgaatttgacatcttcaataacgccagtagagtcgttgactttgatctgcaacctcatcacatcaccgcacgctggcgcacccactagaccagtgccgactttgggcaattttttatctaatgagccgacgtttcttggatgtgtataa

SEQ ID NO: 78897 - DNA, 933 bp, Saccharomyces pastorianus
atgacatctatagataatagacctttgccgttcatataccagttcacagccggtgccattgccggcgtctcggagctattggtgatgtatccattggacgtggtgaagacaagaatgcaattacaagtgacaaccaaaggtcatcccgctgttgttgcagcgaaagcagcagtagatcactacacgggcgtgatggattgtcttacaaaaattgtgaagaaggaaggattttcgcatctttacaagggtatcacatcgcctatattaatggaggctccgaaaagagcaattaagttctccggaaacgatacattccaaacgttttataaaaagattttccccacgcccaatggggagatgactcaaaaaatcgccatatacagtggtgcgtccgctggcgccgtggaagcctttgtcgtcgcgccttttgaactagtgaagattagattacaggatgtgaattcacagttcaagacacccattgaagttgtaaagaatagtgttgtgaaaggtggtgttttgtcacttttcaatgggttggaagccactatctggagacacgttctttggaatgccggttatttcggtataatattccaaattcggaagcttttgccggcggctaaaacaagcacggaaaagaccagaaatgatttgatcgcaggtgctattggtggcactgtcgggtgcttgttgaatacaccatttgacgtggtaaaatctaggatccaaagaagttccgggccgctgaggaagtacaactggtccctgccttcagtgctgttagtttaccgtgaggaagggtttaaagcattgtataagggatttgcgccaaaggtcatgagacttgcccccggtggtgggttattgttggtagttttcacgaacgtcatggattttttcagagaagtcaagtatggtaaaaaacaatga

SEQ ID NO: 78898 - DNA, 1341 bp, Saccharomyces pastorianus
atgtcagcaaacagtggtgtaaaacgagccagtaaggctttcaaaacatgtttattttgtaaacggtcacatgttgtatgtgataagcaacgtccatgttctaggtgtgtcaagagggatattgcccatttatgcagggaagatgatattgcggttccaaatgagatgccatcacagcacgaaagttctccgaatgataataatatacagggcaaatatgcaaataaagcacacactggaattccgtctgactatcagaatgaaccagtcaataaaagtggatccacatatggagaggaactgtcaccgaaactagactcctctcttgtaaatgatacaaccagcttgctgcttccgcaacaacctgtatttgtgtccgagaatgttggttcggaattcagttctttgaatgaatttctttctatgctagaaaatcctctattgactcaaacatcactaagttccagcagtgcgagcaatgttcatttggaaaatggctcacaaaccacacaatcgccattagagtaccaaaacgacaatcgtagggatgaaataggagtggcaagacaagaaaataggtcgcctactattatgtcaggttcttccaatagtatctcgaaaggggataaacaagatcaagaaaaggaagagtctcgaattctagcgaatgcaaacgaaaacagtgcaccgacaccgaaggaacaattctttttaacagcggcggatccgtcaacagagatgacaccagaagaccggctgaaattggtcataaatgcgaagcttgaagcaggattattgaagccgtataattatgccaaggggtatgcgagactacaagactacatggacaaatatatgaatcagtcttccaagcaaaggattctgaaaccactatccaccattagaccggcgtttagaaccattgcgcgttcattgaaggatgttgacttagttttagtggaggagagcttcgagaggatgttattatcttatgatcgtgttttcacctctatgagcatgccagcgtgcttgtgtaggcgtaccggtgagatttacagagccaataaagagtttgcttcactggttgactgcacagtcgatgatttacgcgatggaaagcttgcgatctacgagttgatgacagaagaaagcgctgtaaatttctgggaaaaatacgggtccatagcgtttgataagggtcagaaggctgttttaacaagttgtagtcttcgaaccaaagatggaatccgcaaacggccatgctgttttagtttcactatcagaagggataggtacaacatcccaatttgcatcgtcgggaatttcatccctttgtcataa

SEQ ID NO: 78899 - DNA, 903 bp, Saccharomyces pastorianus
atgataagaatatgtcccattgttagatctaaggttccactgttaggaacttttcttagatccgactcatggttggcacctcatgcgctagctctaaggcgggccatatgcaaaaacgttgcattgagaagttattcagtgaacagcgaacaaccaaaacatacatttgatatttcaaaacttactagaaatgaaatccagcaattgcgagagttgaaaagagcaagggagagaaagtttaaagatcgtacggttgcattttatttcagcagcgtcgcggtacttttcttgggtttggcatatgcagcggtaccactctatagagccatttgtgctcgtactggttttggtgggattcccataacagatagaagaaaatttaccgacgataaactcattcctgtagatactgagaagagaattcgtatctcattcaccagtgaagtatcacaaattttaccgtggaaattcgttcctcaacaacgtgaggtttacgttctgcctggtgaaacagccctcgctttttataaagccaagaattacagcgataaagatattattggtatggctacttatagcatagcgcctggtgaagcagctcaatactttaataaaatccagtgtttttgctttgaagaacaaaagctagctgccggtgaagaaatagatatgcctgtcttcttttttatcgatccagattttgctagcgatccagcgatgcgaaatatcgatgatattattttacattacacattcttcagagctcattatggtgatggtacagctgtaagtgactctaaaaaggagcctgagatgaatgcagatgaaaaagcagcgtcattggctaatgctgctattttatccccagaagttatagacacaaggaaagacaactcaaattaa

SEQ ID NO: 78900 - DNA, 672 bp, Saccharomyces pastorianus
atgaagaaacaaatattaatagttgctgcacaaagtattttatgttctactgtttttggcgagcgaagtaatgtaggcctttccactgaagagctaggaggtgactcaattttatacttcaatgaagaccctatagtgattgaaatcgataagaaagctattgacaagaagactctggaacagttggcaagcacaagagatgttgttcttactgatttaccggacactcttgagtttatagacttcaatgagtacgcgaaaatgaagtcaaaatcagatatgctactagagtatatcaacgaatacgaatttgatgattttgaaagaagttctgaaggcggtcttgatgaagaagaagaagaggatttaatttatgacttcaatgcccaagctgaagatttgggtaagcttggttcaaatatatatgaagtagtcgaagaaaaggatattgttaatacttacgatggaaaccttatcaatgcaagtacaactgaatcaacgactactactcggcctttcgtgacttctcactcctacgttgcttcttctacaccttattcgaatatttcagcattgaatgaggactacgataatgcgggcaactttttgactcctacaacagtggctcttgcggtacttttaaccattttattatttatacaggcgtattaa

SEQ ID NO: 78901 - DNA, 1689 bp, Saccharomyces pastorianus
atggattcgcaagtgcccaataataacgaaagcttaaaccgcttcaatgacatcatccaaagcctgcctgcaagaactaggctgaccatatgctcattatgtctgctggacaatatctccactcaactactgaggtttcttgtccttaatgccaactctcccaatattatagcggttttgacggaccagacggctttcctaagctcaggcgaaacagaaatttttcaaacgttagtcaagctctttaagcagatcagaatgatttaccacaccagatctccgttactgtctgttcacgacgtggcgcctggtttatggtttcccaactcccctcccccccttatattgagaggccacgaagcgtttattattaccgccataagaaaggcgaatctgctaacatttctattgacgtcgctgaactgccttaattacgggtttgagctgctacagtcgatatttctcgatattttctgtccaaatacaaacactgtcggtaacaactccctggaacaaagcggaaagtttttgaaatcacaggctatcctatatcttgatctgaaaacacaggcttacattgccggcttgaaagagtttcaggacgagacgaacgaaatttctttagaaaagaaacaagagctactagacttaatcttcccatccaatctggctgatattctcgtgcagagaagaaccggcgattctggagacattacacttttgactccatcggagaaggacttcgtcgaaaggtgcgatcgtcggagagaaaatttaaagatcgtccaagattttaactctctgacccagagctacgaatgggctcaatttatcagagagttgctggattattgtaataaaaatatgggtctcatcatatggggcagaaagggtcgcggaaaatcaccattatatgactttgatgtcaacgagtttgatcctcaagtactcttttctacagggaccaggaccgtagaattcatggacgaccaaaatcagccaagcagtgcgtctgcttttttgtcaactgctcgtccgaatcattacagcacacatacacctaccacagatgtgtcttccaaaaaccccgctatcacacaatccattgtggatgccgctgttgcggcctcgatgagcaacagcagctctggtcctcattcctctcataacaacagcagtaacagcaacaataatggtagtatcggattaagaaaaccaaaggcgaaaagaacttggtccaaagaggaagaagaagcattagtggaaggcctgaaagaggttggcccatcgtggtctaagattctagatttatatggtcccggtggtaaaatcacggaaaatttgaagaacaggacgcaggtacaactgaaagataaagcccgtaattggaaattacaatacttgaagagtggcaaaccattgcctgactatttgataaaagtgaccggtaacttggagaaaatctacaaggcaaagaaaaaattctctcaatctccaaattcgtcaactattatggaacaaaacttatctcagcatccttcatcagctgcatctgctactgaagacactcaaactcatcaagaggattcacatgggcaaaatagtgataatatgccatctaacggactttttggcaatagtacatcggacaatacaggttttgatcctcatttagaagatgggatgtag

SEQ ID NO: 78902 - DNA, 2691 bp, Saccharomyces pastorianus
atgacgcaatccctaggtatcgaacagtataaactgtcagtcgtatctggtgggaaacccgctttgaataatctcagttcagtaaccggcaataagaatatcgcccgcctatcacaagaccaacgaaactatattataccctttaacaatcagatcaaggtgtattctgtggaaactagacaatgtgttaagactctaaagtttgcaaataactccttgttatccggaatatttctgcaagaagaagagaataatgaatcgattgtaaagattctgctgggtgatataaccgttccgcaacaagaagacgctcatctgattaccgtattcaccaataatggtcatgtaattgttttaaattataaggggaagctggtcgagtcccctaagcatttcaaaatctctttggcagatgaaaagcttgcaaatgttttccatagcgagggcaactatagaattttgacaacgttcaaggaccctagtcaaaaggcacacaactctttgcaatcgtacaggttatatgcattaacctttgacgatgctaaaaagcaatttgaagtggctcatcaggcagaatggtacaacattatcttgtcaaatatttcttccaatggtaaactgctagcgcatatgtgcaaagacgtctcaacaaaagatcacgaacacaaatccatctcagttgtttcgctttttgatgattctgtaaatctaagctttcccctcggttccatcctttcttcacagactcaatccctatcctctaacacaaggtacgtttctagcatggccatagacaatatgggtcaacaactggctgttggatttgcctccggagttataagtatcgtaaacctggccgatctacaaataagactgctcaaatggcatatagactctgtgctgtcactctcattctctcacgatggatcctatttgctatctggtggttgggaaaaagttatgagtttatggcaattggaaacaaactctcaacaattcctgcctcgtttgaacggtattataatcgactgtcaggtattgggacctcaagggaactactactctttaatcctacaaatgactgaaaacaattcaaattctgactaccaatttttacttttgaatgcttctgatttgacctccaaattgtcgattaacgggccattaccggtgttcaatagcaccataaaacacattcagcaaccaatctcggccataaataccaagaactctaactcaattacctctctcaatcactctaagaagaaacaatctagaaaactaattaaatcgagaagacaagatttcaccactaatgtagaaataaaccctattaacaagaacttgtatttcccacacatttctgctgttcaaatttttgacttctataaaaatgagcaagttaactatcagtatttaacatcaggtgtcaacaattctatgggtaaagttagatttgaactgaatttacaagacccaataataactgatttgaagttcaccaaagatgggcaatggatgattacatacgaaattgagtatccgccaaatgacctcttatcttccaaggacttaactcatatcttgaaattttggaccaaaaacgataatgagacaaattggaatttgaaaacgaaagtaataaatccacacgggataagtgtcccaattaccaagatattgccttcaccaagatcagttaataatagtcaaggctgtttaacggcagacaacaacggtggactgaaattttggtccttcgactctcatgagagcaactggtgcttgaaaaaaatttctttaccaaactttaatcatttcagtaactccgtttctttagcttggtctcaagacgggtctctaatattccatggtttcgatgacaagttgcaaattttagatttcgacacttttaaaaagtttgaatcattggaaaatacaaagacggtcagtgagttcacgttagactctgaaatccaaaccgtcaagttgattaatgacacaaatttaatagtggccaccaggactacattaaacgccatcaacttattgcggggtcaagtcataaatagttttgacttatatccgtttgttaacggagtgtataaaaatggtcacatggataggcttattacttgtgacgaaaggacaggcaacattgccctggttataaatcaacaactaactgatctcgacggcgtaccaactatcaattacaaatcccgtattattatattcgattctgacttatctacaaaattgggtaattttacgcatcatgaatacatatcttggattggttggaattatgatactgatttcatatttttggacatagaatcaacactaggtgttgtcggaaccactgtgaatactcaactatctgatgaagttaataacgaaggaatattggatggcctggtaagtaacaccatcacaacttcggcttccaatagcgatatttttgcagaacaattgcataaactgtcgtctaggggcaaaaaaagtgacactagagataaaaataccaatgataacgacgaagatgaagaagatatcgctttggaatttataaatggcgaaaagaaagataagctagtcaatatgaatagttttacgagcatgtttgacaacattcaaaacgtgcaaatggatacatttttcgatcgtgtgatgaaagtaataacatag

SEQ ID NO: 78903 - DNA, 1305 bp, Saccharomyces pastorianus
atgttactgaaaaacttacacagtctcttacaactaccaattttttcgaatggagcagataagggtatagaaccaaactgccctataaacattccattatcatgttccaataaaactgatatagacaactcgtgttgttttgaatatccaggtggaatatttttacaaacccaattctggaattactttccaagcaaaaacgatttaaatgaaactgaattagtgaaggagttagggcctctagattcatttacaattcacggattatggccagataattgtcatggtggctaccaacaattctgtaataggtccttacaaattgacgatgtttactacttattgcatgacaagaaatttaataataatgatacatccctgcaaatatcgggcgaaaagctgcttgaatacctagacttatattggaagagtaataacgggaatcatgagtccttatggatacacgagtttaataaacatggcacgtgcattagcacaattagaccagagtgctatactgagtggggtgctaatagtgttgacagaaaaagagcggtctatgattattttagaataacttataatctattcaagaaattggacacattttcaacactagaaaaaaataatattgtcccaagtgtggacaattcctattctttggagcagatagaggcagcactaagtaaagagtttgaaggaaaaaaagtcttcataggctgtgatagacataattccttaaacgaagtatggtattataaccacttgaagggttcccttttgagcgaaatgtttgtgcccatggactcacttgccattcgaacaaattgtaaaaaagatggtattaagttttttccaaaaggttatgtcccacctttcaggaggagacctaataaaggagcaagatacagaggagtcgttcgtctatcaaatattaataatggagatcagatgcaaggctttctaatcaagaatggacactggatgagtcaaggtacaccagcgaattacgagttgattaaatctccctatgggaattactacttgagaactaaccaagggttttgtgacattatttcgtcttcatctaatgaattggtctgcaaattcaggaacattaaggatgcaggtcaattcgattttgatccaacgaaaggaggagacggatatattggttattctggtaactacaactggggcggtgacacctatccaaggagaaggaatcaaagccccattttctctgtagacgatgaacaaaattccaagaaatataagtttaaattaaaattcatcaaaaattaa

SEQ ID NO: 78904 - DNA, 1542 bp, Saccharomyces pastorianus
atgagtgactattccctgaagcattcggtcactcagtatttggaagaaattcctcaacaagttcaaaataggctttatacctcaccagctacatgtctggctatctatagaattttaccaccactagctaaattttttatcatggcaatggttttcaacgaaaatgaagtacctttgttggatttagataaatgggttaactctaatggtaaattgcagtttcagaatgcaatcaaatcgatgaagtctttgcatcttcttataccaaataaatcatctggtactttgatgatcaacctaaacccaacattcaaaatcagcctgaggaacgcattaacgggtggggaagttcaaaactcattcggtgtggttgtagaggaaaacgtagttagcctggacttgttggatgaatattcagctaataaatgggaaactatattacatttcatggttggcactcccctcgctaaaatcccatctgaaaaagtactgaaccttttaaaacacagtaaactaatggaagaggtaaactctactggagagttcaaaatcactaatgaaggcttccaatttcttttacaagaaatcaactcccaattatggacattattattgcaatatttaaaaatgatcgaaacgtccaaaatggatttagtcgatgttttacattttattttcatgttaggcgcattggaagttggcaaagcctataaaatcgatgcattaagcgaaacacaaagaattatgttacaagatatgcgagactatggtttggtattccagaagcattcaaatgatagcattttttatccaacaaaattagctttgatgctgacttccgataccaagacaatcagatctgcctccaatgcgatggatagtgtactgagacagaatagagaagagccgtcagtaaatgaagacggcgccaacgggaaatccacaacagatatcactacatcagatgatttgaacaaagcaggtctaaaaaatcaagatatacccgatggctcattgattgtagaaacaaatttcaaaatctattcatattctaattcacctctgcaaattgctgttttgtctctttttgttcatttaaaggcaagatttgtgaatatggtattgggtcaaataacaagggaatccataagaagagcattgaccaatggtatcactgccgaccaaatcattgcctatctggagacacatgcacatcctcaaatgagaaggttggcagaagagaaactagaaaaaaaattagagctggaccccaactgtaaggagcctttacaagttttgcctcctaccgtcgtagatcaaatcagattatggcaattagagttagatagagtcattacatatgaaggttccttatattctgattttgagactagtcaagaatacaacttactaagtaagtacgctcaagatatcggtgttttgttgtggaaagacgacaaaaagaagaaatttttcatctcaaaggaaggtaattctcaagtacttgatttcgctaaaagaaagttgaaaaagaaacaataa

SEQ ID NO: 78905 - DNA, 1674 bp, Saccharomyces pastorianus
atgaagtgccaaacatgtcacttacccctgcaactagacccatctttagaaggtcttagtttaacccaaagaaatttgctactttcaaataattcaattatcactgcaacgaatgaaaatgtcatcagcaacaagggcatcgaagccgcagataattgtgggcctcaaataccgaaggagaggctgaggcgattaggggagattcagaacataaaagacttgaatttaaaagatgataaattaatcactgattcgtttgtttttcttaatcacgatgatgatgataatgctaatattacgagtaatagcagagaggaccagcgttatggaaatgccaacggaaatgataataaaaaagctaatagtgatacttccgatggaaccagtacctttcgagatcatgacgaagaggaacaagaagctacggatgaggacgaaaaccaacaaatacaattgaattccaagactttgtccacacaagtcaacgcaatgactaatgtatttaacattctatcttctcaaacaaacatagactttcctatctgtcaggactgctgtaacatcttgataaacagactaaaaagtgagtatgatgatgcaataaaagagagagatacttacgctcaatttttatcgaagttagagagtcaaaacaaagaaatatcagaaagcaataaagaaaagcagtattcccataatctttcggaaaaagaaaatttgaaaaaggaagaggaaagactcttggatcaattattacgtttggaaatgacagatgatgacttagatggagaactagttcgtttacaagaaaagaaagttcaactggaaaatgagaaactccaaaaactgagtgatcagaatttaatggatttaaataacattcaattcaacaaaaatttacagtcattaaaactgcaatacgaattatccttgaatcaattagataagttgaggaaaatcaatattttcaatgctacattcaaaatctcacatagcggcccctttgccactataaatggattgagattaggcagtataccagaatcagtggtaccttggaaggaaatcaatgcagcactgggccaattgattcttttgctggctaccataaacaaaaacctgaagataaatttagtagactacgaattacaaccgatgggttcattttccaaaatcaagaaaagaatggttaacagtgtcgaatataataattccactacgaacgctcccggtgattggttgattctgcctgtctactatgatgagaatttcaatttggggagaatcttccgcaaggaaacgaagtttgataaatcattagaaacaacattagaaataataagcgaaatcactcggcagctttctacgatagcgtcatcatattcatctcaaacactcgcaacaagccaagatgaatcttcaatgaataacgcaaatgacgttgaaaatagtacttccattctcgagctaccctatatcatgaataaggacaagattaatggattatccgtcaaattgcatggtagcagtcccaaccttgaatggacaacggctatgaaatttttattaaccaatgtaaagtggttgttagcgttttcttccaatttactatccaagtcaattaccttaagccctacagtgaatcacaatgataagaccatcagcggaaactaa

SEQ ID NO: 78906 - DNA, 1035 bp, Saccharomyces pastorianus
atgacattggcagagttgcttggacggtcgagaatagctcaagtagctaacaatcataaaccattgacatacactggcaaaaaatttcatccaacacatcaaatcatcgaaactaagccatcgacattatacagacaagaatgggggttgaaatccgctattccttcgaaaattaaatctcgatatttggtgtacaacgatttggatacgttggaaagaattaccacattcgaacctagaggcggtacgcaatggaataggctaagatttcaagaaatgggagtaccaattgtgtctaatataggcagacaaaatccatttttcaaggacatatctcgtcctgaggatgagtctcatgctaaattgtccttattcaaagaaatgaaaggaggtacagataattcgcctgctgctatggagaagcgtttgaagaagataacagcactaattagatcgtttcaagatgaatttaaagagtggctggtggaaaatcatccggatgaattgaaattgaattctaataagctggaagactatgtagtgaagtttctaaacaaaaagttggaaacaaaaacgaataaaaaatttaacactgaaatcattggtacaggtggattatcatacagcttgccaggaaagctaaaaaactcaccaaatggtgtcattcaaaggactgtagtacccggtagagtcttgaacgttgttaaggagaacaacgacaataaatggctggcagctattggtgggtttgtggccgatgtggtatttttccaatcaccacctagttcctttaactccatgggagatttcatcagaatgaaaacgttcttgttcgagatcttggaggcatctatggagaaaaatggttctgtttcgatgcacgctagattactcgaaccacaaaatgacaagaccagagaatttttcaataagagaccaatttataaaccattgacctctagaagggcacgtcgaccatcagtgggaaacattcaggaggccaataaccttttgaatataatcaagggaaattga

SEQ ID NO: 78907 - DNA, 867 bp, Saccharomyces pastorianus
atgactgccgacaacaatagtatgccccatggtgcagtatctagttacgccaaattagtgcaaaaccaaacacctgaagacattttggaagagtttcctgaaattattccattacaacaaagacctaatacccgatctagtgagacgtcaaatgacgaaagcggagaaacatgtttttctggtcatgatgaggagcaaattaagttaatgaatgaaaattgtattgttttggattgggacgataatgctattggtgccggtaccaagaaagtttgtcatttaatggaaaatattgaaaagggtttactacatcgtgcattctccgtctttattttcaatgaacaaggtgaattacttttacaacaaagagccactgaaaaaataactttccctgatctttggactaacacatgttgctctcatccactatgtattgatgacgaattaggtttgaagggtaagctagacgataagattaagggcgctattactgcggcggtgagaaaactagatcatgaattaggtattccagaagatgaaactaagacaaggggtaagtttcactttttaaacagaatccattacatggcaccaagcaatgaaccgtggggtgaacatgaaattgattacatcctattttataagatcaacgctaaagaaaacttgactgtcaacccaaacgtcaatgaagttagagacttcaaatgggtttcaccaaatgatttgaaaactatgtttgctgacccaagttacaagtttacgccttggtttaagattatttgcgagaattacttattcaactggtgggagcaattagatgacctttctgaagtggaaaatgacagacaaattcatagaatgctatag

SEQ ID NO: 78908 - DNA, 3387 bp, Saccharomyces pastorianus
atgacagataatttgaccgcaactcatggtggtagtaccacccttgaattgttggcgcagtacaatgatcataggtccaaaaaggataaatctatagaacatatagaaaaaggaacatgttcaggaaaagaaagaaatccgtcctatgatgaaatttttacggaaaacattaagctaaagctacaagtccaagaatatgaaactgaaattgagagtttgaaaaaggttattgatatgttacaaaaaaacagagaagcttccttagaagttgtgcttgagcaagttcaaaatgactcaagagattcatacgttaacgatcaatcatttgtgttacccccaagatctgctgaaaggaaagcgcatatcaagagtcttaatttgccaataccgacattgtcccctccattgcaacaaggttcagacgttgcacttgaaacaagtgtaacgcctacagtacctcaaatagatgttacatcaaatacttcgataagtaggaagcatttacagaacatgatactaaacgatgaaatagaagcaaatagtagcttctcatctcccaaaattatcaatagatctgtctcaagccctacaaaaatacattcagaacagttggctagcccagctgcctctgttacctatacgacgtctaggataaccataaaatcacctaataaaggttcgaaatctccattgcaagaacgtttgcgttcccctcaaaatcctaacagaatgacggctgtcatcaacaaccatttgcattctccattaaaggccagtacctctaataatttagatgagctgactgaaagtaaaagtcaacaactaactaatgacgcgatacaaaaaaatgaccgcgtttattcttctgtaacatcctctgcatacactactggaactcctacttcagcagccaaaagtccatcatcccttttggaagtcaaggagggtgaaaacaaggctttgggtttctctccagcatctaaagaaaaactcgacgacttcacccaattacttgactcctcatttggcgaagaggatctagtcaatacggacagtaaagatcctctgtccataaaatccacgattaacgaatctttacccccacctccagcgcctccaacttttttctcacctacttctaatggaaatataaaaaactctactcctttatcaagccatttggcttctccggttatcttgaataaaaaggatgataattttggtgctcaaagtgcaaaaaatttaaagaaacctgtgttaacttcatcactccccaatccttctacaaaattgtcaacaacaagtcaaaatgcttctcttcctccaaatcctcccgtggaaagttcatcaaaacaaaaacaacttggagaaacggcatccatccattcaaccaataccttgaatacatttagctcaacaccccaaggttcgttgaagacgcttagaagacctcatgcaagtagtgtgagcaccgtgaagtctgtggcccaaagtcttaagtcggatattccattattcgttcaaccggaggattttggcactatccagattgaagtactgagcacattgtacagggataatgaagatgatttatccattctaattgcaatcatagacaggaaatccggtaaggagatgtttaaattttcaaaatctattcataaagttcgcgaattagatgtatatatgaaatcacatgttcccgatttaccattgcccacgttacctgatagacaattatttcaaactttatcacctacaaaagtggatacgcgaaagaacatattgaatcggtattatacaagcatattcagtgtccctgaatttcccaaaaatgttggtttaaaaatcgcccaatttattagtacagatacagtaatgacacctccaatgatggatgataatgtgaaagacggatcacttttgctgagaagaccaaagactctaacaggtaatagtacatggagagttcggtacggtattttgcgcgatgatgttttacaattgtttgacaaaaatcagttgactgaaactattaaattgagacaatcttctatagaacttatacccaatctccctgaagatagatttggaacgagaaatgggtttttgatcactgagcataagaaaagcggactgtcaacctcaacaaagtattatatttgtactgaaacgtcgaaggaacgtgaattatggctttctgcgtttagtgattacattgatccttcacaaagtttatcgttatctagctcgaggaatgcaaacgatactgattctgcatctcacttgagcgcaggaacacaccattctaaatttggaaacgcaactatctcagcaaccgatactccatcatatgtcactgatttgacccaagaatataatagtaataacaatattagtaatagtagcaataacattggtaatagcgatggtattgactcaaacccatcttctcactctaacttcctagcaagttcaagcgggaatgcagaggaggagaaggatagtaggagagccaaaatgagaagtttatttccttttaaaaaattaaccggcccagcgagtgcaatgaaccatataggtattacaatttcaaatgattcggattctccaacatctcctgactctatcattaagtcaccaagcaaaaaattaatggaagtaccctcttcgtcgaattcttctacgggtccacatgtgtccactgcaatatttggctcgtcactagaaacgtgtttaagattgagttcgcataagtaccaaaacgtttacgatttaccgagtgtagtttatcgttgcttagagtatctttacaaaaaccgtggtatccaggaagaaggtatatttagactaagcgggtccagtacagttatcaaaactttacaagaaaggtttgataaagagtacgatgtagatttatgtcgatacaatgaaagtattgaagctaaagatgatgaggcatctccaagtctttacattggtgtgaatactgtaagtgggttactaaagttgtacttgagaaagttgccccatttattatttggtgacgaacaatttttgtcgtttaaaagagtagttgatgaaaatcataataatcctgttcaaatatcattggggtttaaggaacttattgaatctggtctagttcctcacgctaacctatcgttgatgtatgctctttttgaactgctggtaaggatcaatgagaatagtaagtttaataagatgaatctaagaaatttatgcatcgtgttttccccaactctaaatattccaattagtatgcttcgaccattcatcactgactttgcgtgtatatttcagggtggtgaaccagttaaagaagaggaaagggagaaagtagatatacatattcctcaggtttga

SEQ ID NO: 78909 - DNA, 420 bp, Saccharomyces pastorianus
atggttcagttgagcacatacttaccatcacctccctcgacaaatatgtcctgcacattctcgagtgtgatgagtgtctgctttatgaccatgtcggcaactgtgctgccgatatgtggcaaagctgtaacatcccatctgcgaagtaactcttgcttaacgcgtgtttcctcatttttaaacacatcgagaccacagcttgccacttttccagattcaagagcgtctagtagcacatcttcatctatgcatgtgcctctcccaacgttaactatcctgacaccatctttacaccaggccaaacttttacgattgataatattgtttgtagaggccgtactgggcaaggccaaaatgatcaaatccgcattcttccaagtatttggatcgtctagatcagaatggtacttagcgttgtaa

SEQ ID NO: 78910 - DNA, 1185 bp, Saccharomyces pastorianus
atgagtcagtttggcacgacagatatcgtttccggttcagaaacaccaccttattctggggcaagttaccaggacgcccaggatgacaatacccatccacattcatcagacgccggtgcagagaagttcagtgcaggcagtggaagcgagtcgcatactgaatcctcgagaagtgatgatgaggattctcaagcaaaaacaaagatggtggataatattaccatcttaaaatatatattggattctctatctggtagagacaaattagccaaaattatcaaatacgctctggatatattaaaactgtttatcgaaaagtctaagcgaaatttaactgttttggacccttccatattaacgtactataccaagattttgaaaaatctgactgtaaaagtcgcactaaggcatccaatcacggtaattaaagtacttctcctgtctcttttgagaaattttgacaagaaaattgattttatcagtcaacaattaagtacttttagatatattttaaggtttggcggcacaccattccgagtgtgcagtttcttggggaaattcaataaaaccagaaagtgcaactttcaaattgaccaaattaagaaaatatggttcaatgaagcttcattgagagaatttttggacttgtattatggtatctttgatgaattagacttgctatacaaattgaaaatatggacaaataaatcattctattcctttgtcagtagacaagagtctcttgcatggcaatacgacattcttttaagcttgaaggaccattggctcaacctgcaaagcttacagaagagacaattagaattggaagtgcaactaaaagttcaaaataacgcgttactactctcacccatactgatgcatcaggcccataaagacgatggctcacaatcgccaattaggaaacagttgttaaatgacctaaatgttaataacaacgcagaggtgttaatacacaaacaactaaaggccatcaaggatgaaaagacacttgtttatttagatattgcaagattatcgtttgattgtatggctaatacatcagatattctaaatttaaaaactccaaagggaacgtatgccgttctgtctctgggatccggcttaactggactggttaaactttggataacaacaaagaggtcactttgctcttcaaaagattaa

SEQ ID NO: 78911 - DNA, 507 bp, Saccharomyces pastorianus
atgaaagaagcatctgatagagaagaagcaccaaaaatggtggaaaaaaactatagtactggttttaggaaagcccacggagagaaggatcaatcagtgaccaagccaatctcgttagatggtagaacaggtgaagtaattgttagaaaatccaccgggaaaactaaaatacgtaaaggtcaaacggaagaagagtatacgcagcaattgcagcactacttcgaagtagaacaaggccctgtgcggacaaaggtaggatggatggatgaggtagatcccttggttgagatccgagaaggcaagtacgatatctccaataagcatcagcgacaggtgcttagtggtttctgccatcgtttattttaccaacgtaagtacaaggagtgtctggatctcagcacctattttctggggctctttgaaccgttcaacgtgaagaataaaatgaagagggagcttgaagagttggaatatatgatcgagcgatgtcgtgggcatgtattataa

SEQ ID NO: 78912 - DNA, 747 bp, Saccharomyces pastorianus
atgataagaaatcagggatggtcattactttacagaatttatccggtgcggaggttcacaagatactccagagtagatatgacttttgaaggaaacactcaagatatctctacttctgtcgaagaaagaatgaccactgtttttggaggacgcttaaagggtgaaccaccaagatccacaagtagagtgcttagcggcggaacgaagaaaatagcaggtgtccaagtgcctgcaaaaccacaagaacccgataactgttgcatgtcaggttgcgttaactgtgtctgggagatatatagcgaggatttaagagactggaaacatagaaggaaagaggctgcggaaaagatcgcaggaactaaggagaagtggcctaaagactggaatccacctttgggattgttacatatggaaaatgtccctgttgagttacgtgaaaagaagctggaaatcgatagcaaaaaagcagaacaacctcatgatttatctgctatcagaagtttgttccctaaaagaaaagggcctctgcccaagagtgtattggcagccaagaggaaaaatattgctttgagacacaattacgaacagaaagatggagcagaccaatcagtcagtgaatcagatgctgatgaaggctgggaagatattcctgtctacgttaaagcctttgcagagtttgaatcaaagaaaagattacaaaaaattcgccgacaggaagaaataaaaaagaggacagctttggtttga

SEQ ID NO: 78913 - DNA, 303 bp, Saccharomyces pastorianus
atggcgttgaggaagttcgtggaggacctcttaacagtggacctcttagcccgctacctctatcgttcagtatttcacctcttttacgaaatgacatggtacatgcgatatttaagagccgaatttgttatacaacgttgttctctgcacctcatctctaaactatttagcctcatcgacagtttcatatgtcgtttttgttattttaacagtttagagttcattccatgcgctttacccggtctggcgtcaaaagccatcaatagcatagctactattgcgtctgagagaagtcgaccatag

SEQ ID NO: 78914 - DNA, 1371 bp, Saccharomyces pastorianus
atgtcatttcgtaaaagaggtgaaatactgaacgatagaggtagcgggctaagaggtccactgttaagaggtcctccacgaacttcctcaacgccattgaggacagccaacagaagagcccctggaaatgtgcccttgtctgacactacagcgagattaaagaagttgaatattgcggacgaatccaagacaaaaatggggctggatagctcccatgtgggcgttagaccttctcctgcaacctctcagccgacgacatcaactgggagtgctgacctggacagtatactaggccatatggggctgccgctgggaaactctgtactagtagaggagcagagcacgacagaatttcactctattctcggtaaactgtttgccgcacagggtattgttcacaatagaatttcagatagcagtgctgataaaactagaaacggcgacgctcatgtcattgtcttgtcattgaaccaaatgtttgcaaaggagctacctggtatctacaagggatcacgtaaacaaatgaagaaaaacctaatctctgaagaagaatcaaaagttactgttcaaaatttgaacgagacccagagatcgacgccttccaggtacaaagacctgaaaattgcatggaaatataaactggcagatgaaaagagattgggttctccggatcgagaggacatccaacaaaattctgagtacaaggactacaatcatcagtttgatattacaacgcgtctgatgcccgctcccatagcatctgaactgacatttatcgccccaactcaacctatctccactattttgagccaaatagaacagactattaaaaggaatgacaagaaactgataagaattgttattccttctcttctacatccggcaatgtatccgcccaaaatgtttgaatcatctgaaataataggtttaatgcacggtgtgagaagtcttgtcaagaaatactatgagcgggttgtactgtttgcttccatatccatagacattatcactcccccattactggtattgctgaggaacatgttcgattctgttatcaatctagaaccctttaaccaggagatgactgagttcttagaacgtgtttataaatcgcaaccggggaagattcaacatgggctagtccacatattgaaattaccagttttcacggaccgtggagagatgagagttttaaagtctgaatgggcatttaagaatggcagaaaaaagtttgaaatagaacaatggggcatacccgtggatgatgctgaaggttcagctgcctcggaacagtcacattcacactcgcactcggatgaaatctcacataatatacctgcaaagaagaccaagatatctttagactattaa

SEQ ID NO: 78915 - DNA, 549 bp, Saccharomyces pastorianus
atgttaaacagacgctctaatgctctcattactttgagtagaactaaattctttcccataacaaccgttgcctattaccacaggcgcctccccaaccaacaacgaagagctgtttcaacgtcaccgaagaaagaaatcaagagcctagaagacttggctaatttggattctttggatggtgttgatactgaactgatacgcgatttgattaatgagcatactacaaaattaaatatcaaaaaggagttagatatgctcaaaaaattctcgcaagaggaagaatcaggacatgagatccctgtaaaaagatttattaggcctctttggatgttcattctaatgggatcttccgtttatttactgcttcacttctcgtggtggaaactagagcatgaggagagagaaagtcagctaaagaaagaggtagaaatcctggaacaccaattaaatgagttaattgtacaggataaaacccacaatactagtagaggaaagggcagtaatgaatcaacacatatgaagccttggtataggagatggttttggtga

SEQ ID NO: 78916 - DNA, 342 bp, Saccharomyces pastorianus
atgcctcctcttccacaaaattatgcgcaacagcagccttcgaattgggacaaattcaaaatggggttgatgatgggtactaccgtcggtgtctgcacaggcatcctatttggtggatttgccatcgcaactcaaggcccaggtcctgatggtgtagttagaacactagggaaatacattgctggttcagcgggtacctttgggctatttatgtccatcgggtctataatcagaagtgatagtgaaagtagtccaatgtcccatcctaacctgaacctacagcaacaggcaagactggaaatgtggaagcttcgtgccaaatacggtatacataaggactga

SEQ ID NO: 78917 - DNA, 207 bp, Saccharomyces pastorianus
atgagaccacgtgaccaaggctttttggttttagggtttacttactcggtactcctaattagtcttgctacattttactggttacgtaacaatgactctttcctgcactactggtgtgtattactgctatgccctgcgactctctggctgtgggccctcatagcctggtgtgacagtgaaatgttcgcaagtagtaaagatgaataa

SEQ ID NO: 78918 - DNA, 1092 bp, Saccharomyces pastorianus
atgggagaggtatacgaaaaaaataacataaattttgattcaatagccaaaatgttgttaattaagtataaggatttcatactgtctaaattcaagaaagctgcacctgtagagaatataaggtttcagaatttagtccatacaaatcaattcgcacaaggagttctaggtcagagtcaacatctctgtacagtctatgaaaatccttcatggcattctatagtcctggagacattggatctggatctaatatataaaaatgttgataaggaatttgccaaagatgggcatgcagagggggaaaatatatacacggattatctagtaaaggagctgcttcgctacttcaaacaagattttttcaaatggtgcaataaaccagattgtaatcattgtggccagaacacttcagaaaatatgacacctctggtcagtcaagggcccaatggagaggaatctaaattcaattgcggaactgttgagatctataaatgcaaccgatgcggaaatatcactagatttcctcgttataacgatccaattaagttgctggaaactagaaagggaagatgcggtgaatggtgcaatttatttactttgattttgaagtcgtttgggttagatgttcgctacgtctggaatagagaagatcatgtttggtgtgaatatttttcaaattttttgaataggtgggttcatgtcgactcctgtgagcaatcattcgaccaaccatatatctattcaattaactggaacaagaaaatgagttactgtattgcgttcggtaaagatggcgttgttgacgttagtaaacgctatatcctccaaaacgagctgtccagagatcaaatcaaggaagaagatttaaaattcctttgtcaatttataacgaagaggttgaggtattcgttaaatgatgacgagatataccaacttgcatgtcgcgatgagcaggaacagatagagctgattagaggaaagacacaagaaacgaaatccgaaagcgtcagtgccgcttcgaaatcatctaatcgtggtagagaaagtggatcggcggattggaaagcacagcgtggggaggatggtaaatag

SEQ ID NO: 78919 - DNA, 852 bp, Saccharomyces pastorianus
atggtagccgagcaaacacaggagaacatgtcagccgtaggtccaggtagcaatgcaggtgctagtgtcaatggcggatctgctacagccattgctactcttttacgcaaccataaggagttgaagcaaaggcagggtttattccaggccaagcagacagacttcttccgttacaagagatttgttagggcactgcattctgaggagtatgccaacaaatctgcaagacagccagagatatatccaactataccttctaacaagatcgaagaccagcttaagtcacgtgaaatctttattcaacttataaaggcacaaatggtgatcccagtgaaaaaattgcatagtcaagaatgcaaagagcatggattgaagccaagcaaggactttccgcacttgattgtttcgaacaaagcacaattggaagccgatgaatactttgtttggaactataaccctagaacctacatggattacttgatcgtcattggtgtcgtgtccatcatattggcgctcgtatgctacccattgtggccgcgctccatgagacgcggctcctattatgtgtctctgggtgccttcggcatcttagcaggcttctttgctgtcgctatcctgagattgatattatatgttttgtcattaattgtctacaaagatgttggtgggttctggatctttcccaacctgttcgaagattgcggtgtactagagagttttaagccactttacggttttggtgagaaggatacttatagttacaaaaagaaactgaaaagaatgaagaagaaacaagccaagagagaaagcaataagaagaaagccatcaatgaaaaagccgaacaaaactga

SEQ ID NO: 78920 - DNA, 1944 bp, Saccharomyces pastorianus
atgcaactttcatggaaggatatccctactgtccctccagcaaatgatttgttggatattgtcttgaacagaacccagagaaagacaccaactgtgatcagacctggtttcaagattacaagaatcagagcgttctatatgcgtaaagttaaatacacaggtgaaggtttcgtggaaaaatttgaggacattttaaagggttttcctaacatcaatgacgtgcatcctttccatagagatttgatggacaccctatacgaaaagaatcattacaagatatctttggcagctatatctcgtgcgaagtcccttgtggaacaagtcgccagagattatgtcagattgctaaaattcggtcaatctttatttcaatgtaaacaattgaaaagggccgctttaggtagaatggcaactatagtcaagaaattgagggacccattggcctatttggaacaagtcagacagcacattggtagattaccatcgatcgacccaaataccagaaccttgctgatctgtggttatccaaatgtcggtaagtcctcgtttttgagatgcattaccaaatcagacgtcgatgttcaaccatatgctttcacaaccaagagtttatacgttggtcattttgactacaaatacttgagatttcaagctattgacacccctggtatcctagatagacccactgaagaaatgaacaacattgaaatgcaatcgatttatgccattgcccatttacgttcttgtgttttgtacttcatggatctttccgaacaatgtggtttcaccatcgaagctcaagttaaactattccactccatcaagcctctattcgccaacaagtctgtcatggttgttatcaacaaaaccgacattatcagaccggaggatttagacgaagagcgtgcacaattactggaatctgttaaggaggttccaggtgttgaaatcatgacttcttcatgccaactggaagaaaacgttatggaagttagaaacaaagcatgtgaaaaactattggcttctagaattgagaataagttgaaatctcagtctagaatcaacaatgttctgaacaagattcatgttgctcaacctcaagcaagagatgatgtcaagagaacaccatttatcccagaatctgtcaagaatttgaagaaatacgaccctgaagatccaaacaggagaaagttggccagagacatcgaagctgaaaatggtggtgctggtgtcttcaatgttaacttgaaggacaagtacctattagaagatgatgagtggaagaatgacatcatgccagaaatcttggatggtaagaatgtttatgatttcttggaccctgaaatcgctgctaaactgcaggctcttgaagaagaagaagaaaaattggagaacgaagggttctacaattctgacgatgaggaagaaatctacgacggtttcgaagcatccgaagtagatgatatcaaggagaaagctgcatggattagaaatagacaaaagacgatgattgctgaagcaagaaataggaagtccttgaagaacaaagctatcatgccacgttctaaactaactaagtcctttggtaaaatggaagaacacatgtccactttgggccatgacatgtcagccttacaagataaacagaaccgtgctgctcgtaagaaccgttatgttgaaagaggttctgatgttgtttttggcgaccaagatgctttgacagcttccactgaaaacggtgtcaagttgagacaaaccgatagattgttggatggtgttgctgatggctccatgagatccaaggccgacaggatggccaagatggaaagaagagaaagaaatagacatgccaagcaaggtgaatctgatagacacaatgctgtttccttatcaaagcatttattcagtggtaagcgtggtgtcggtaagacagatttccgttga

SEQ ID NO: 78921 - DNA, 1377 bp, Saccharomyces pastorianus
atggttgccaattgggtacttgctcttacgaggcagtttgaccccttcatgtttatgatggtcatgggtgtcggcatttcatcgaatattctatatagcttcccatatcctgcaaggtggctaagaatatgctcctacatcatgtttgctatcacttgccttattttcattgctgtgcaggcactacaaatattacatttgattgtctatattaaggagaaaagcttcagagaatattttaatgactttttcagaaatatgaagcacagtttattttggggtacttatcccatggggttagttacaattataaatttcttaggagcactctcgaaagcgaacacgacgaagagccccactaattccagaaatttgatgatatttgtttacgtcttgtggtggtatgatctcgcagtctgtctagtaatagcgtggggtatctcgtttctcatctggcatgactattactctttggaagggattgggaatcatccttcatataatatcaaaatggcatccgaaaacatgaaaagtgtattgctactggatatcattccgctggttgtcgtcgcttcaagttgtggaacattcacaatgtcagaaatattcttccatgcgtttaatagaaatattcaactgataacgttggtcatatgtgccttaacgtggctgcatgccattatcttcgtcttcatactgattgcgatatacttctggagtctttatattaataagataccaccaatgacacaggttttcaccttattcctgcttttgggcccgatgggccaaggaagttttggagtcttattgcttacagataatataaaaaaatatgcgggcaaatattacccaacagataacattacaagagaacaagagatattgactattgcagttccatggtgtttcaaaattctaggcatggtttctgctatggcattgctcgctatgggctattttttcaccgtgatttctgtcgtttcaatcctgtcgtactacaataaaaaagagattgaaaacgagacaggaaaagtgaagagagtttataccttccacaaaggtttttgggggatgactttcccgatgggtactatgtctttaggaaacgaagagttatatgtgcagtataaccagtacgttcccttatatgcatttagagtcctaggaaccatatacggcggtgtttgcgtttgttggtcaattctatgccttttatgcacattgcatgagtattctaaaaagatgctgcatgctgcccgtaaatcttcattattttcagagtcaggtacggaaaagacgacagtttctccgtataacagcattgaaagcgtggaagaatcaaactcggctctagattttacgcgtttagcataa

SEQ ID NO: 78922 - DNA, 1029 bp, Saccharomyces pastorianus
atggttttagttaagcaggtaagactcggtaactcaggtcttaagatatcaccgatagtgataggatgtatgtcatacgggtccaagaaatgggcggactgggtcatagaggacaagacccaaattttcaagattatgaagcattgttacgataaaggtcttcgtacttttgacacagcagatttttattctaatggtttgagtgaaagaataattaaggagtttctggagtactacagtataaagagggaaacggtggtgattatgaccaaaatttacttcccagttgatgaaacgcttgatttgcatcataacttcacttcaaatgaatttgaagaattggacttgtccaaccagcggggtttatccagaaagcatataattgctggtgtcgagaactctgtgaaaagactgggcacatatatagaccttttacaaattcacagattagatcatgaaacgccaatgaaagagatcatgaaggcattgaatgatgttgttgaagcgggccacgttagatacattggggcttcgagtatgttggcaactgaatttgcagaactgcagttcacagccgataaatatggctggtttcagttcatttcttcgcagtcttactacaatttgctctatcgtgaagatgaacgcgaattgattccttttgccaaaagacacaatattggtttacttccatggtctcctaacgcacgaggcatgttgactcgtcctctgaaccaaagcacggacaggattaagagtgatccaactttcaagtcgttacatttggataatctcgaagaagaactaaaggaaattataaatcgtgtggaaaaggtgtcgaaggacaaaaaagtctcgatggctatgatctccattgcatgggttttgcataaaggatgtcaccctattgtgggattgaacactacagcaagagtagacgaagcgattgccgcactacaagtaactctaacagaagaagagataaagtacctcgaggagccctacaaaccccagaggcaaagatgttaa

SEQ ID NO: 78923 - DNA, 954 bp, Saccharomyces pastorianus
atgctgttcagctggccttatccagaagccccgattgaaggttattggggcaagccaacttctctgattgattggtgcgaggagaattatgtcgtatccccctatattgcagaatggtcaaatactattaccaatagtatattcttaatgaccgccttctattctacatatagcgcttggcgtaataagttagaaacaaggtatatattgataggaatggggttctcgctggttggtattggttcgtggttatttcatatgactttacagtatcgttatcaattgctagacgaactaccaatgctgtatgcgaccatcatcccatcgtggagtatttttgcagaaactcaagaaatcttgattaaggatgagaagaaaaggaaggaaagctcatttagaatccaaatggtcatttcttttatcatgtgtggtatagtcaccattttaacctggatttacgttgtcgtccaaaagccagcaattttccaagtcctttatggtatattgacgcttctagttgtggttctttctggctggctgacctactatcacgttcatgattcatttgcaaagaaaaatctttttattactatggttatgggcatgattccttttgtcattgggttcatttgctggcaactagatattcacctgtgttctttttggatctatatccggagaacatatttggccctgccattaggtgttctattggaactgcatgcttggtggcatcttttgaccggtactggtgtctatatcttcgtcgtgtatttgcaatatttgagaatattaacccatggaaatccaaatgacttcttatttatatggaggtggggatttttccctgagctggtaagaaagggcttaccgattggtacttcttattcactggagtatctggggccaattgtaaatacacaggtagatgatgaaacaaaaaagaataactaa

SEQ ID NO: 78924 - DNA, 1674 bp, Saccharomyces pastorianus
atggctcgtcatggaaaaggcccaaaaactaacaaaaaaaagctagcacctgaaaaggaaaggtttatacaatgttgtgctgatatcacattagagttaacagattctttaacctcgggaacaacaagagaaattaatctgaatggtttgattactaaatattcaaagaaatataaactaaaacaacaaccaaggttaaccgatatcattaattctattcccgaccaatacaaaaaatatttattacccaaattgaaggctaagccagtaagaacagcgtcgggtattgcagtggtagccgttatgtgtaaaccacatcgttgtcctcacattgcatatacaggtaatatttgtgtttattgtccaggtggtccagattcagattttgagtattctacacaatcttacacaggctatgaaccaacttcaatgcgtgccatcagagctcgttatgacccttatgaacaagcacgtggtagagtggaacaactgaaacagttaggtcactccatcgataaagtcgaatatgttctgatgggtggtacatttatgtcattaccaaaagaatatcgtgaagattttattgtgaaattgcataatgcactttctgggttcaatggtaatgatattgatgaagctattctttattcgcaacaaagtttaacgaagtgtgttggtataacaatcgaaactaggcctgattattgtacgcaaacacatttggacgatatgttaaaatatggctgtaccagattagaaattggtgttcagtccttgtacgaagacgttgctcgtgatactaatagaggacacaccgttaggtctgtttgtgaaacttttgctgtgtctaaagatgctggttataaggttgtttctcacatgatgccagatttaccaaatgttgggatggaaagagatattgaacagttcaaagagtattttgaaaatcctgattttaggactgatgggttgaaaatctatccaactttagtcattaggggtacaggtttatacgaactttggaaaacgggcaggtataagtcttatagtgccaacgccttagtggacttagttgctagaatcttggccctagtgcccccatggacaagaatctaccgtgtccaaagagacattccaatgcccttggttacctcaggtgttgacaatggtaacttaagagaattggcattagctagaatgaaggacttgggtacgacttgtagggatgttcgtactagggaagtgggtatccaagaagtgcatcataaagttcaaccagatcaggtcgagcttatcagaagggattactatgcaaatggtggttgggaaacctttttatcatatgaagatccaaagaaagatatactgattggtttgctgagattgagaaaggcttcaaagaaatatacatatagaaaagaattcacctcccagaggacttctattgttagagaattgcatgtttatggttctgtggttccacttcattcaagagatcctcgtaaattccagcatcaagggtttggtactctattgatggaagaagcggaaagaatcgccaaggaagagcatggttcagagaaaatttctgttatttctggtgttggtgtaagaaattactatggtaaactaggatatgaactagacggtccatacatgtcgaaaagaatttaa

SEQ ID NO: 78925 - DNA, 1401 bp, Saccharomyces pastorianus
atgcaattcgctgggaagaaaactgatcaagtgaccacatctaatccgggctttgaagaagaagaagaagaagaagaactacaacaagattggtcgcaactcgcatcgctcgttagcaaaaatgctgctctttcacttccaaagaggggtgaaaaagactatgaaccagatgggactaatttgcaagatctgcttctctataatgcaagtaaagccatgtttgataccatatcagactcaataagaggcacaacagtaaaatctgaagtaagaggatactatgttccccataaacatcaagccgttctacttaaacccaaaggcagctttatgcaaacgatgggaagggctgatagcacaggcgaactctggcttgacttccatgagtttgtttatttggcagagagaggcactattcttccttattatagattagaagcaggctctaacaaaagctcaaagcacgaaacagagattttactcagtatggaggatttgtattcgctgttttcatcgcaacaggaaatggaccaatattttgtgtttgctcatttaaaaaggttgggttttattctaaaacccagcaatcaagaagcagcagtcaagacttcctttttcccattgaaaaagcaacgaagtaatttacaagcaatcacttggagattactttcattgtttaaaatacaagagttatcgctgtttagtggtttcttctattctaagtggaattttttttttcgtaaatatacgacttcaccacagttataccagggtttaaataggcttgttcgttccgtggctgtaccaaagaataaaaaagagctattggatgcacaatctgatagggaatttcaaaaggtaaaggatattcccttgacatttaaagtatggaaaccccattctaatttcaagaaaagagaccccggtcttcctgatttccaagttttcgtttacaataaaaatgacgatcttcagcattttcctacctataaagagctgcgatctatgttttcctcacttgattataaattcgaatttttaagcgaaatcgaggatgatgacgattgggagacaaactcctacgttgaagatatcccacgaaaggaatatattcataagaggagcgcgaaatctcaaactgaaaaaagtgagtcgtctatgaaagcaagttttcaaaaaaaaactgcacagtctagcacgaaaaagaagagaaaggcgtacccacctcacatacagcaaaatcgtagattgaagacgggatatcggagctttattatcgctattatggataatggccttatttcgtttgtaaaaatgtccgaggctgattttggatctgaaagtgtatggtatacacctaatactcaaaagaaagtagatcaaagatggaagaagcattaa

SEQ ID NO: 78926 - DNA, 327 bp, Saccharomyces pastorianus
atggatggatcttacctcactcaccgatattgcgcgctcaagcggccctatactgcacacctattacttcttgatttttcaaaggacgaagttacaaaaaatgtttggaggtggaaaggtacggatgttaaacttcataaaatgggtagaaaaagcatcgttgctgcagtgtacaatcaagctcacccgagccatccacctctctaccatctcggtaacttgaatggtgacaaatatgtcgcctcacctcctagtcgaatgaaggcagtcagcctatcttttgcgtttactttcttatattattatattccgcttcctactaattag

SEQ ID NO: 78927 - DNA, 735 bp, Saccharomyces pastorianus
atgagcatgagtatgggtgtccgtggcctagcgttaaggtccgtttctaaaacattatttagccaaggtgttcgttgtccttcgatggtgattggagcccgttatatgtcttccactccagaaaaacagacagatccaaaagcaaaggctaactctatcatcaatgccattccaggtaataatattttgacaaagacgggggttttggggacttctgctgccgctgtcatttatgccatttccaatgaattgtacgttatcaacgatgaaagtattttattgctgacttttttgggtttcactggtttagtggcaaagtatttggcgccagcatataaagattttgccgatgcaagaatgaagaaagtctccgacgttttaaatgcctcgagaaacaagcatgtcgaagctgttaaagatagaatcgactctgtctctcaactacaaaatgttgctgaaactacaaaggttttgtttgatgtttccaaggaaactgttgaacttgaaagcgaagcctttgaattgaaacaaaaggtagaattagctcacgaagcaaaggcagtcttggattcgtgggttagatatgaagcttccttgcgtcaattggaacaaaggcaactagcaaaatctgtcatctccagagttcagtcagaattgggtaatccaaaattccaagagaaagttttgcaacagtctatatctgaaattgaacaattgctttctaaattgaagtaa

SEQ ID NO: 78928 - DNA, 843 bp, Saccharomyces pastorianus
atgacaagatctccctggaagcgcctactatggttgagacaggagtacccagataattatacagatccaagttttattgagttgagagcaagacaaaaggctgagagtaaccagaagtctgatagaaaattatcagaagctgctcgcgctcaaattaggtcggattttataagtttctaccgaaccatattgaacacttctttcatttacatcacttttacatatatttactattatggcttcgatcctattccgccaactattttcctttcatttattacattgattatatcaaggacgaaagtcgaccctctattgtcctcattcatggacgtaaagtcttcgctgattatcacatttgcaatgttgactctctctccagtcctcaaatctctttctaaaacaactgcatctgattccatatggacattgtctttttggctgaccctatggtacattttcgttatttcgtcaacaaagtccaaagataaaccctctaacctttccaccaatatacttgtcgcccttgttgctgtcctatcatcgaggctttcgaccacaatcgacgtattctgttttcttttaatttgtattcagttgaatatcattctacccacttatttatcggtgacgaataaggtagtaccaataatttcaaatattattgtatactcatttttgaatgttgctctaggttggatttatatgctgttgattttctttgcttcagtattttatattactgttttacctaagtggttcatctactggaaaatcaattatcataaacgggataacgatctactaagtacatgggatgcaagaacaccaatattggattag

SEQ ID NO: 78929 - DNA, 2265 bp, Saccharomyces pastorianus
atggcacatgaaaagtttagtatacctgagaacttcacattagcgcagtctttgcaattgctttactctgttgtcaaaaatcaatataaaaacctagcagacctaataatcaatggcaaaggtaataaggacacagtaacgtatgggaaaatccacaaaaacttagacactttactggtatacgtcaatgaaggtctacgaaaaattgaaaagacttataccttaaagaaagggttaggaaatcttgtagttgatcatcctgaattgaggagcatcattgaggatttccaaattcttggccaggatataaggatcgcacgtcgtaaagcagaaacgcttatggccgaaggaaacggtagtccctctttgtcatcctcctcttccgttttgggccttgggacaggaaatggtttgcgttttccaaaactttggagaatgggttccaaaagagataaattgaaagaagcagacgaaaaggaggctagaatcaacaaacaggctgataatatcagacgtgctaggaaattagaagaagagaaaaagttaggagcaaaacttcagtatgagagggacttagaacttcaaagggaaaaattgatcgagttaaaggttaaagaaaaggtcgaatttgaagtggcccaaaagttggaggaggagagagttaagagagaggaagaagaacgcaaacatagagaacaagcggagaaaaaacgtatatcaaccctgaaacatgagaggaaaacaaattacaaatcaagggctagcctcgacaacttctcttccagtagcaaatcttctggaaagattgacaactccctaattaaaagaagatcacttgacgttgtacggacttcaggcgaaagagtacgaacgccagtaagaaaatcaatggaggcagcagaaataggtatggctgcgcagttagcctggtctcagtatcaaaacggggcaaatcattcaaaagtgagtaacaacggatcgcattcaaatgaacttcagatacgttataagccaacaccacctttgaaaaaaaggtatgactacaaaaagccaacagttaatcgaccgattataaaatcacctactcttaacaggcaaaacagcaagtcttcacggaatatacccacaaatagcaagctgaaggctagtaaatccaatactaacaaagtttctcgtaggaatgagcaaaatttggagcctagttcaccagtactcgtttcagcgacagcggtacctgctgaatccaaacccatgcgttctaaaagtggtacacccgataaggaaagctctgctagttcatccctcgattccagaaaggaggatatattaaaatcagtgcagggagtagatcgaaacgcttgtgaacagatacttaatgaaattcttgttacggatgaaaaagtttattgggaggatatcgcaggcttacggaatgcgaagaattctttgaaagaagcagtggtttacccatttctgcggcctgacttattcaaagggctaagagaacctgttagaggtatgcttttgttcggcccaccaggtacaggtaagacaatgattgctaaggcagttgcgacagagtccaattccacattttttagtgtaagtgcatcttctttgctatcgaaatacctcggtgaatctgagaagctggttagagcattgttttacatggccaaaaaattgtcaccctcaattattttcatagatgagattgactctatgttaacagctcgctctgacaatgaaaatgagtcctcgaggagaattaaaacagaacttcttattcagtggtcctccctatctagtgctactgcacaatcggaagaccgaaataatacgcttgacagcagagtacttgtcttaggagcaacgaatttgccatgggcgattgatgatgcagcaagaagacgattttcacggaaactatacattcctttaccagattatgaaactagactatatcatttgaagagattaatggccaagcagaaaaatagcctgcaagatttagactatgaattaataacagaaatgaccgaggggttttctggttctgatcttacgtcattagccaaagaagcggcaatggaacctattagagatttaggagataagttgatgtttgcggattttgataaaatcagaggaattgaaataaaagattttcagaatgctctgttgacaataaaaaagagcgtgtcgtcagaatctctacaaaaatatgaggagtggtctagtaaattcggtagtaatggttcctga

SEQ ID NO: 78930 - DNA, 486 bp, Saccharomyces pastorianus
atggactctaatgtgtttatcactattttcggagaaattgacgtcttacgatcttttacagatatcaaatccaaaattaaactggtaagactttcgtgtaagggggcaagtgaattagacgagttttcaagtcgactatgccttgtagtgttatcaactgtaggattgtcgccttttgcattatttgacagcttagtttctaattctagaaggaccgttcttatccgtttcaaatattctacaaatcgaggtattccagccaggccttgcaaagatgatgttatgaagcaatcattcccacgattaattaagcccactgtcgtgtacttcccaatactctgcttagaatccccaaagactagcgcacttaggctgggtgcaatggcatatagagaagcagcaattatcaaaccacatgaaacttttttaatcagtgaagtcggagattctgttacattttttatccaagacatattgtgcttgtag

SEQ ID NO: 78931 - DNA, 471 bp, Saccharomyces pastorianus
atgagttcccggtttgcaagaagtaatggcaatcccaaccacattaggaaaagaaatcattctccagacccaataggaattgataattataaaagaaaaagactaattatagatttagagaatttatccttaaatgataaagggcccaagaacggacatgcagatgataacaatcttattcataacaatatagtattcacagacgctattgatgataaggtcctgaaagagatcatcaagtgttccacaagtaaacgcggcgacaatgacttgttttatgacaaaatatgggaacgtttgagagaaaaaaggctacaaataataaaatgggtagattataaggaaattgcttatctaagctggtggaagtggttccataatcaaatgacttcgaaatacacttatgatggagaggctgataccgatgttgaaatgatggcagtggatactgatgtggatatggatgcgtaa

SEQ ID NO: 78932 - DNA, 597 bp, Saccharomyces pastorianus
atgcaacaagatatcgtcaacgatcaccaggaggaggcccaagggtggaagtgggaacaaatcaaagagataattgaatcgggggagcttgcccgtttgaaacgaagccgccagatgactgacaaataccacgagcataagaaaaggactgctggcctggacatgaaccagtacgttttgcaaaaactaggctggtcgctagacgaaccgcagctcgaaaatgctgccgcgaaggcttttagttcttctactctatatgctgtgcgtgccaacgatttcccgtataacttcgagcctggtgttgtacaccttgttctctggtccaaggttgccctgccagtacattccccagataaggccgtgcgcaaagcggcccgcgctcgcatgaatgcatttttgcaggcacagccgctactgcgtccacttctaagctcgggtcacgtggcctggtttgtcaactacccggaactacaaagtgttgcccggattttccacgctcacgtgctgcttttcttcccacgggaacgctattccgcggaacaggtaaaaacgaccgttgatgatatcctttcacacggtttcgagccacttgcctga

SEQ ID NO: 78933 - DNA, 729 bp, Saccharomyces pastorianus
atgcaaaaacacaatataaaattaaaccaaaaccaggatatttcccaattattccacgatgaagtacccttattcgacaactctataacttcaaaggataaagaagtcattgaaactttatctgaaatatactctataataatcacactagaccacgtagagaaagcctacctaaaagactccatagatgacacccaatacaccaatactgttgacaaattactaaagcagttcaaggtctacctgaattctcagaataaagaagagataaacaagcatttccaatccatagaagcgttctgcgatacatacaacatcactgcttcaaacgcaataacaagactggagaggggcataccaattacagcagaacatgcgatatccactaccacatcggctccctttggtgataataaacaaagttcttctagcgacaaaaagtttaatgctaaatacgtcgctgaggccactggtaatttcatcactgtaatggatgctttgaaactaaactataatgcaaaagatcaattacatcccttattggctgaactgctaatcagcataaatcgcgtcaccagggatgattttgagaatagatcaaaactcattgactggattgtcagaataaataaactgtcaattggtgacactttaactgaaacacaaattagagaacttctgtttgatctggaactagcctataaaagtttttatgctttactggattaa

SEQ ID NO: 78934 - DNA, 906 bp, Saccharomyces pastorianus
atgtccagtaatatagaacctcagacaacagctaaatgtatactgtatacaacaaaggggaacattgccattgaattatgggctaaagaatgccctgagacatgtaagaggttcttatctatgctctcagatggcacgttcaccaatggagaatttaaagagttaaagccaacacagtggctaatgtttaatgcaaatagtactggtgagtaccgtacagttgctgaggaaaaaaatcctcgtatacgcttcaatagagatgggctcttgggatgggatagacgaaggaacacatggtttataactgtgctggcggattctaagcacgtactgaacgattgtaatgtatttggcaaaattgttgggaaatctatttacatctttagacagatcttgggcggcgaaattgaagcttcctcccgtgacaataatgtcaaacgattcatgtatcctgcagttttgaaggatgttgagattaccataccattctttgaggacatctttggatcaaaaagaagactggaagataatgaaaaaaaagaacaagagccggcaaagaaacttgtgaaatcagcaaaagtaaagatggtttatgaagatgagcaagaggatcatgatggtgatgttcaaaagcttaagccaagaaagagaatgattctcccagcatggatcaaagatgatagtcgcagtgaaggaatcaaactagacacattcttagatcagccacaagaggcaccaattagggaaaagacggagttgcatgataatgttgatgaggcaaccactaaagaaacggaaagtcaagaaaacatcaaggaagaaccaatggataaaagagagcgggaaactttggcaatgttgtcaaaatttcaagaacgaataaaaaacaagaatattctaaagtga

SEQ ID NO: 78935 - DNA, 1242 bp, Saccharomyces pastorianus
atgagagcattcccccgagtactgccatttcgccatcagagatcatataataacatccttcttcgaacagtaaggctttttggttcatcattttcttcttttgatttctctaggcaaatgcctaaggtggaccctgacaataccgctgcaatgctactacagaaaaacttgatccaaagaaacaacatgctctatgggtatggatcagggacaatacgatgtactttgctagactcaactggacgagccaaatcaccattagtagagataaaacgtgaggatctagtatcaaaacatggcttgttgcccagagatctacgtaaaattgaaaaatcaaggaagaatgacttagtccctagtttgctcgtgcgagaaaattccatactaatcagtttacttactgtgaaagccctaattaagcctgatatggttattatcttcgattcagccggcagtggaataactttaaactcagaagctcacaaggattttattaacgatatgaaattgagactaaaaaatcaagaaacaagtgagctaaatagcgatccacttccttatgaattcagagctttagaaacgatcttcatttcggcattatctaaccttaccagtgaaatgaaggtgttgctaaccatatgcaagggggtgcttcaagatctagaatttagtataacaagagataaattaaggttcttactgggtcaaaacaaaaaattgagtagcttcaataaaaaggctgttctagttaaagatatgctggatgacttgctagagcaagacgatatgctttgtgatatgtacttaaccgacaaaaaggctggaaaaattagagttcaagatgatcatactgaaattgaaatgcttctggaaacatatcataactatgtcgatgaaatagttcagaaaagcgaaagcgccatatctgacgtgaaaaccacagaagaaatcatcaatataatcctagattctaacagaaacgaattaatgctgttagggataagatacgccataggaatgctttcgttgggaggcgctctattcctgggttctatctatggtatgaatctggaaagtttcatagaagaaagtaattatgcgtatttaactgtcaccattttggggttaatatctactgtttggctctatgcgaagggaatcagacatttgcataaattacaacgtatgtcattattgagtaaaataaaaacagattccgttcacgaactgttgaagaaatag

SEQ ID NO: 78936 - DNA, 453 bp, Saccharomyces pastorianus
atgtttctcccaaaattcaatcccataaggtcattttcccccatcctccgggctaagactcttcttcgttaccaaaatcggatgtatttgagcacagagataagaagagctattgaagatgccatcgaatcggctccagtggttcttttcatgaaaggtactcctgaatttcccaaatgtggattttcaagagcaaccattggattattaggaaatcaaggcgttgacccggccaaatttgcggcttataatgttttagaagacccagagctacgtgaaggtatcaaagagttttcagaatggccaactattccacagttgtatgtaaacaaagaattcataggtggatgtgatgttattacaagtatggcacgctctggtgaattggccgatttgctagaggaggcacaggcattggtacctgaagaagaagaagaaaccaaagatcgttga

SEQ ID NO: 78937 - DNA, 606 bp, Saccharomyces pastorianus
atggaatctcaattcatattagattacaatgttccgtcaaaaaataaggggaacaatcagaagtctgttgctaagctgttgaaaaataagcttgtaaacgatatgaaaactacgttaaaaagactaatttataatgaaaataccaagcaatataaaaataataatagccacgatggttacaattggagaaaactaggctcgcagtatttcatactgtatcttcccctatttacgcaggaactgatttggtgtaaactgaatgaaaactatttccatgttgtattaccatctttactgaatagtaggaacgttcatgataaccacagtacctatataaataaagattggttacttgcccttttagagctaacttccaacctgaaccaaaacttcaaattcgaatacatgaaattgagattgtatattttaagagatgatttaattaataatggtttggatcttttgaaaaatcttaactgggtcggtgggaaactgattaaaaatgaagatagagaagtcttgttgaactcgaccgatttagctacggattctatttctcatttattaggtgatgaaaactttgttattttagagtttgaatgctaa

SEQ ID NO: 78938 - DNA, 597 bp, Saccharomyces pastorianus
atgtttcatttagtcaagggactttacaataattggaataaaaaggaacaatattcaattctaatattaggtctagacaatgcaggcaaaacgacgttcttggagacattgaaaaaggaatactctctggcgttcaaagccttggaaaagatacagcctacggtaggacaaaatgtggcgacaatacccgttgacagtaaacagatcttgaagttttgggatgtaggtggtcaagaatcactgagatcaatgtggtccgaatactattccctatgtcatggtataattttcattgtggatagttcagatagagaacgattagacgaatgttccacgaccctacagtcagttgtaatggatgaagaaattgaaggtgtacccatcttgatgctggccaataaacaagatagacaagatagaatggaagtacaagatataaaagaagtatttaataagattgcggaacatataagcgctagagatagtagggttttaccaataagcgcattgactggagaaggtgttaaagacgctatagaatggatgattgttagactagaaaggaataaaaagtcaagaccaccgatttataaatga

SEQ ID NO: 78939 - DNA, 1188 bp, Saccharomyces pastorianus
atgtcactttctcttgtatcgtaccgcctaagaaagaacccgtgggttaacatttttctacctgttttggccatatttctaatatatataatttttttccagagagatcaatctctgttgggacttaatggccagtccatttcccaacacaaatgggcacacgaaaaggaaaacacattttattttcccttcaccaagaaatacaaaatgccaaagtactcttataagaaaaaaagcggctggttgttcaacgatcacgtggaagatattatcccagaaggtcatattgcacattatgatttgaacaaattgcactctacgtcagaagcagctgtcaataaggagcatattttgatattgactccaatgcaaacatttcatcaacaatactgggacaatttgctgcagctaaattaccctcgggaattgattgaattggggttcattacaccaagaacagccactggtgacttggccttaaagaaattggagaatgctattaaaaaggttcaaacggacaagaaaactcaaagatttagtaaaattactattttgcgacagaattcccagagttttgataagttgatggagaaggaaagacacgctttagatgttcaaaaggaaagacgtgcagcaatggctttggcgcacaatgaattactattctccaccataggacctcacacttcttgggtgctgtggctagatgccgatattatagagacaccaccatctttaattcaagacatgaccaaacacaacaaagctatcttagctgcaaacatttatcaaagattttacgatgaagagaagaagcaaccatcaatcagaccatacgatttcaacaactggcaagaaagtgacaccggtttagaaatagcctctcagatgggtgatgacgagattattgtcgagggttatgcagaaattgccacttataggccattaatggctcatttctacgatgctaatggcgtaccaggtgaagagatggcgctggatggtgttggtggaggctgtactttggtcaaagcagaagttcacagagacggtgccatgttccctaatttcccattttatcacttgattgaaacagaaggttttgctaagatggcgaagagattaaactacgatgtatttggcttaccaaactatttggtttatcacatagaggaagagaaccattga

SEQ ID NO: 78940 - DNA, 300 bp, Saccharomyces pastorianus
atgaccgaagaaactattactatagattctatatcaaatgggatactgaataacctgttaaccacattgatccaggacattgtagctcgggaaaccactcaacaacaattgctgaagacaagatatccggatcttcgcagttattatttcgacctgaacggatctctcgatattaatggactacagaagcaacaagagtcctctcagtatattcactgtgagaattgtggcagggatgtgtccgcaaacagactagcagctcatttacagagatgtttgagtaggggtgctagacgttga

SEQ ID NO: 78941 - DNA, 300 bp, Saccharomyces pastorianus
atgtctcaagatttcgttacgttagtatcaaaagatgataaggaatatgagatatcacgatctgctgcgatgatttcaccgacgttaaaagctatgattgagggacccttcagggaaaggaaaggccgaatagagctcaagcagtttgactcgcatattctagaaaaggctgtggaatatttaaattataatttgaagtacagcggcgttagcgaggacgatgatgagattccagagtttgaaataccgacagaaatgtcgttagagctgctacttgcggcggactatttgagtatatag

SEQ ID NO: 78942 - DNA, 549 bp, Saccharomyces pastorianus
atggtagcctccacgacggtaccatatctgccaaagatctttttcaatttaactggatcacgacaactccatggcatatttctgataattaatttcggtttaccttttagcatggagtcttcaccatcagcatcgtcctcatcttcattgttctggcccgttattttctcagatgactcaggtgtgctcttttcaaccacttctgatgttttctttgaacgatctcttcttttagcaatgtctaccctcaagatatgtccgttaaatttggtctttctggccttagctagggcttcttttgtgtcatcctctacagcaaaactaacgaacccgaagcccctggaccttttattcgtgtccttaacaactaccgcatgcttgatcggagcaaaattggaaaagaaatctgccagctgctcatctgtgacatcctggggtatagacctcacaaacaaagtcttcatatctaggccgtcgtcattttgttttgagacattactagaaggcacttcaacattttctattgtttcttccatctcactttggtag

SEQ ID NO: 78943 - DNA, 2058 bp, Saccharomyces pastorianus
atggaagaaacaatagaaaatgttgaagtgccttctagtaatgtctcaaaacaaaatgacgacggcctagatatgaagactttgtttgtgaggtctataccccaggatgtcacagatgagcagctggcagatttcttttccaattttgctccgatcaagcatgcggtagttgttaaggacacgaataaaaggtccaggggcttcgggttcgttagttttgctgtagaggatgacacaaaagaagccctagctaaggccagaaagaccaaatttaacggacatatcttgagggtagacattgctaaaagaagagatcgttcaaagaaaacatcagaagtggttgaaaagagcacacctgagtcatctgagaaaataacgggccagaacaatgaagatgaggacgatgctgatggtgaagactccatgctaaaaggtaaaccgaaattaattatcagaaatatgccatggagttgtcgtgatccagttaaattgaaaaagatctttggcagatatggtaccgtcgtggaggctaccattccaaggaagcgtgatggtaaattgtgtggatttgcgtttgttactatgaagaaaatcagtaattgtagaattgctttggaaaacaccaaagacttgaaaattgatggtagaaaggtggctgttgattttgctgttcaaaaaaacagatgggaagattacaaaaaagcccagccagaaatgaatgacaaagatgataacgagtcaggaaatgaagatgctgaagaaaaccatgacgacgaagaagatgaaaatgaagaggaagatagacaagtagatcaagcttcaaaaaacaaagaatcgaaacgtaaagcacaaaacaaaagggaagatttttctgtttttgttcgtaacgtcccttatgatgccactgaagaatctttggctgcgcacttcagtaaatttggcagcgttaaatacgcattacctgttatcgataagtctacggggttggctaaaggtacggcctttgtagccttcaaagaccaatatacatataacgagtgtatcaaaaatgcgcctgcggctggctctacctctttattgataggtgatgatgtcatgcctgagtatgtgtatgaaggtcgtgttctgtccattactccaacgttagtaagagaggatgctggaagaatggcagaaaagaacgccgccaaaagaaaggaggccctaggtaaagcgccaggcgaaaaagatagacgtaacttatatttgcttaatgaaggtagagttgttgaaggctcaaaaatggctgatttgttaaccaacactgacatggagatcagagaaaaatcctacaaattaagagtggagcaactgaaaaagaacccatctttgcatttgtcgatgactaggttggctatcagaaatcttcctagagcaatgaatgataaagcattaaaggcgttagctcgtaaagctgtcgtggaatttgctacagaagttaaaaataaggaaagacatccattgagtaaagaagagattatcagatctacaaaggaaaaatacaagttcatgggtccagatgagattgaagctcaaaaaaagaaagacaaaaaaagtggtgttgtcaagcaagcaaaagttataatggaagttaaaggatcaactgcgggaagaagtagaggttacggttttgtagaattcagagatcataaaaacgctttgatgggcttaaggtggttgaattgtcatgccgttacctccgatgaaattttagagggtttgaatgatgatgaaaagaaacaagtagacaatgacttaggcaaaggaagacgtctttgtgttgaatttgcgattgagaactctaacgtcgtaaagagaagaagggaacaattgaagcaagcaagaaccaagagaacgagaccagataatgaagatactggagatgtcggagaatccgagaataagaagccaaagaaagaagaagcaacgacgcccaccaatcccgatgacaaaaagatgggcgatgatataaagagaataatcgggttcaagcgtaagagaaagcacgcaaaaaaatag

SEQ ID NO: 78944 - DNA, 1668 bp, Saccharomyces pastorianus
atgtataatggcaaggatagagcacaaaactcctatcagccaatgtaccaaaggcctatgcaggtacaaggacaacagcaagctcaatcgttcgttggaaagaaaaacacaatcggaagtgtgcatggaaaagccccgatgctaatggccaataatgatgtttttactattggaccttataaggcaagaaaagatagaatgcgggtatctgtcttagaaaagtacgaagttattggctacattgctgcgggcacatatggtaaagtttacaaagcgaaaagacaaatcaactccggtaccaattccgctaatggttctagtctgaatggtaccaatgcgaaaattccgcagtttgacagcacgcaaccaaaatcaagctcttcaatggacatgcaggcaaatacaaacgcattaagaagaaacttgttaaaggatgaaggagtgacccccggaagaatacgaactacgagggaagatgtatccccgcactataattcccaaaaacaaaccctcattaaaaaaccgctgacggtattttatgccattaaaaagttcaagacagagaaggatggcgtcgaacaattgcattatacgggaatatctcagagtgcctgtagagaaatggcattatgtcgagaattgcacaacaagcatttaaccacattagtggaaatttttttggaaaggaaatgtgtccatatggtgtacgaatatgcggagcatgatctgctacaaattatccacttccattcccatcccgaaaaaaggatgataccaccaagaatggttcggtctattatgtggcagcttttagacggcgtatcgtatctgcatcaaaattgggtgcttcatcgagatttgaaacccgcaaatataatggtgaccatagatggatgtgttaaaattggtgacttaggtttggccagaaaatttcataatatgctgcaaaccctctatactggggataaagtggttgtcactatatggtaccgtgcacctgagttgctattgggagcacggcactatacccctgcggttgatttatggtccgttggctgcatttttgcagaactgataggattacagcccatatttaaaggtgaagaagctaaattagactctaaaaagactgttccatttcaagtgaatcaactacagagaattttggaagttcttggcactcccgatcaaaaaatttggccttatttggagaagtatccagaatacgatcaaattacgaagtttccaaagtatagggataaccttgctacatggtatcattccgcgggaggaagggacaagcatgctttaagcttgctttaccacttgttaaattatgatccaattaaaagaatagatgcatttaatgcgttggaacataagtacttcacagaaagtgatattcctgttagtgaaaatgtgtttgaaggtctaacttacaaatacccggcaagaagaattcacacgaacgataatgacatcatggatcttggatcaagaacgaaaaacaatacacaagcttcaggaatcaccgcaggtgccgctgcaaatgcgttaggtgggcttggtgttaaccgtagaattctggccgcggcagcagcagccgctgctgcggtgtcaggaaacaatgcatcagatgagccatctcgaaagaaaaacagaagatag

SEQ ID NO: 78945 - DNA, 951 bp, Saccharomyces pastorianus
atgctgaaagaggagtataatttgagcggtgctgataacatggcatctgctgagttgtcatttaaaaagcaaaaagtggtattgaaaaagttcatgatagcgcaagtgactaaggggattatgcagcggtatgcgagcctattagttaccatgcctagtgatgatgacaatacaattattggcacaaatcatttgaaaacaaccaaatttttagaaataatcctacacagagccaaatcatcgcatttacagttcaaaaaggtctgttgcattgtcatcaagtttctagattgctgctcgaaggaaactaactacatgaagtttttaaagttcagcttacacaaactatttgtagctgctttcatcttaagtgtgccaaatgttgtaggcgatgaccgcgacaggattaccacgagggatgaaacctatcatctctattcccagataacaggcttgccactggaagaagtgataaattgttgttctattgtgaggcctgtacttattcggcggagtagacaacaacgcaggcaaatgttatctcggcgtgaacaacattcgtacttcctcagaagttcttttatgaactccaattcatcagtatcaccttttttctctaccaataggtcagctgatgatctacatgtacatacaagggcatactcgcttcatagtcattccgatggggaaggccacgataggcggtctgaacatgaagaaacgcatagcatgggggctgatgccgatacatatcgacaaactacgtttatcccagacacaccaaatggtttgcattctagatcattaattgagtgtgggatcgaacccacccaagtaagtgactctggtgaatggtcgggtcaaagtaacggatatgttttggtgacagaattacaggagtttaacaaaatgggtaaaaagttagtacaagaagcttttaggatagtttaa

SEQ ID NO: 78946 - DNA, 534 bp, Saccharomyces pastorianus
atgaaactggcgcaagacatgaatgtagatgaaatatttctcaaacaagcggcagaagctatagcggtaatctcatcaagtcccactcatacggaccccataatacgagagctactccacagaattcgacaatccagcccattgagcgcagttataccagcaccagaaaatgttttaaaggctggggagccggaaaatatggctagaggtcttataagggttccagaaacacaaacaaaaagaacaggaggtaacaaccacagcaaggaaggcgcacagctctacagctgtgcgaaatgtcagttgaaattcagcagaagttctgatctgagaagacatgaaaaggtacactcactcgtgctgccgcatatttgctcaaactgtggcaaagggtttgccaggaaggatgctctaaaaagacattctaacacactgacctgtcaaagaaacagaaagaaactaagtgaaggttcagacgttgatgtagatgagctcatcaaggatgcgataaagaatggtaccggcctgttgtaa

SEQ ID NO: 78947 - DNA, 474 bp, Saccharomyces pastorianus
atgccaattgaccaagaaaaattagctaagctacaaaagttgtctgctaacaacaaagttggtggtaccagaagaaagcttaacaagaaggcaggctcttctgccggtgccaacaaggatgacaccaagttgcaaagtcaattagctaagttgcacgctgtcaccattgacaacgtcgccgaagccaactttttcaaggacgacggtaaggtcatgcacttcaacaaggtcggtgtccaagttgctgctcaacacaacacttctgtattctacggtctaccacagggaaagaacttgcaagatttgttcccaggtattatctctcaattgggccctgaagccatccaagccttgtctcaattggctgcccaaatggaaaagcacgaagccaaggctccagctgatgctgaaaagaaggatgaagctattccagagttagttgaaggtcaaacttttgatgctgacgtcgaataa

SEQ ID NO: 78948 - DNA, 348 bp, Saccharomyces pastorianus
atgaaaagtttctccatttttttttgtaagcttgataatgaaatgggcaatagcctgtttgaactgatatttttgctttcacttttcaatttcaagtggtataatttatcgactttctctggcgtcaagtttatcactggatgcttgcatgtggtttgccattctaaaagtcttgaatctactgtttttcgagtggtcattcctatcttacatagaataaagtctctgtctacccattgtctcttcttgttaccattagtccgaattattgactcatcaataaatagccattttaaatccaccgtcttttcagatacgtatgattcaaagaggttactgtatgtatag

SEQ ID NO: 78949 - DNA, 1704 bp, Saccharomyces pastorianus
atgactggcgacggtaatgcacatatttctaaaaacaatcaaaatcaacacaaagatcgcttcaagtttattgtgaatgataaaagtattctaggacctcaatggttaagcctttaccaaacggatgggaaagtaacattcgcaaagtcccacttcgagcaagcaatgatgaacgttattagagaaccaaatattaactctactgtcatattaagagcggatattttgaaagagatcaatcatgctgcagaagctgggtctgagccaaaatttgacgagtccgtattaaaaaagtttgagatcgataatggtaatgaaagcggtgaagaagatgtcaagaagataaatattgaagatttaaacataaggtcgtgtgaaacatctgagagtttaaaattgtcacccgttcatgaatttgtaagaaggatcattcctaggaatttttacaaagatgctatcataaaccaaacatgtttaatcctaaatagcaaagaccctaattttcaggagacctcattgattgtatatacgccgcacattaactctgagaaagactgtccgttttatattccaagaacgcaaagtgtaggcattttgttacaccagtcagttctttctgtacactacattcccttccccgaggataaaactgcctttacagatgaatctgagcgtgttgtaagaaccgcttataggttattacaaactgctaacaaacactcaaagggtgtgatgcagggttatgaaaagagggtcaatcacgatcaagtggtaaataaagtcaattttcagaacacatacattgttttgaagaaaaaatactccaagttcctggtggagaattgggcagagtctacagacccaaaaaaacatgtttttgaagacatagccattgccgctttcctgattgaattatggattaaagtgtacggtccagacttccgttcaaaaatgcaatttagagatttgggatgcggcaatggtgctctttgttatattttactgagtgaaagtattaaaggtctcggcatagatgcaaggaagcgcaaatcgtggtctatctacccgcctgaagtgcaatcatcgttaaaggagcaagttataataccttctatccttttaagaccccatcctgctttgaaaagacaagtacctcatttggaacacaatgggagatttttcccagtcaaggtgacgcacgaagtgattgcccccgcaaccgtcgtgtattcaagtgaggacttactaaaatctccgcaggtcaatacagcagagttcccaccagatacttttattataggtaaccactcagatgagttgacttgctggatcccattactaggtcatccttatatggttataccttgttgctctcataacttttctggccagagagttcgttttaacgtaaggaaacgttcgcctaggtcaaatgaaatcaaaaaccagaataacagtaagagcacctactctggtttggttgatcacgttgaatatatttcatctcgtgtaggctggaaagtagagaaagagatgttaaggataccaagcacaagaaatgcagccatcataggtgtagaaaatgcaaccttaaagcattttccaacgcaagcggtgtacgatatgatttgggaagacggtggagctgaagggtggattcagaacacaatgtccttattgaaaagaaacccaagaaaccattaa

SEQ ID NO: 78950 - DNA, 750 bp, Saccharomyces pastorianus
atggcatgtactagtgatgatcctaacaaatatcctaacaaatatcccgaaattgtgagtattaagcacctgttccaacattcggggtccaagcatgaatttagtgctggtaaacgattttcaaaatccattggtaaaatattcaaacgaaactctgctttgaaaacttctagaactgaaacggcaaatcataaaatggaattgaaaaaaagagagggtgttaccttattgccacctgtcccagaatcattatttcataaactcaattcttggttggaaactttttcttccaccaagaacatgaaaatcgaagaaaacaaaattgttattaatgaaaaagagattcgagattcaatctcttactaccctgataagaatggaggaagtgctgtattttgttacttgcccgaccttgtgctatattataagccgcctataaaagtcacaggcaagcaatgtccaataaagagaagtccttgggaatcgatggaaatccaatatcaaaagtttatgtaccccttagaaaggttggaaaggcagtttgaggaagttccatttaggccctggtattttgcaatgcgattaaaggaattttacagatgctgtgaaaggtcttttactaacgcggcaaatagaggaaaggcaaggttattgcgggggaagcaaaggacgaaaaaatcgtatcataagacagtcaatctggtatcagcgaagatttccacccattcaaatgcgccgtcgccgggctga

SEQ ID NO: 78951 - DNA, 726 bp, Saccharomyces pastorianus
atgtctttttcatctatcttatcacaggatatcacagatgacattacaccaccagcgtattccgccaccttggggtcgagagaacagattgttttcagagcttaccaaaatgaaccttggttggctggtactgcttcgaatcttatcttagataaaaaacttgttattgtagacagagaactgttgttccaggtgttgatggtagagaatatcaccaaatccaagctaacacagatcgatgatataaaaaccaagctggatccgaaaaaacagaaagtggatagactacgatcaggcgcgcaaggaaatggcgctaagaagtacgaggtcatcactcaagtggacatggaagatgacgggaatgtggcggacaacaactgcgccaaggaaaataatagcaacaataatagcagtgccgccaagaataaagcagtgtttaaattgacactacaaagtaagtcgggcgacgttttttttgctatcaactcgactccaatatcttggagctcttgcatgctgggttctaaaattgtgatactgccgggaactgtgttcaataggggcgttttcatattgaaggactcacaagtcatttttctcggcggcattaatagagtttggaatgaaaatagagatcagaaattttgtgattatttggaatctaaattacaacgtgacaaacaacttgtaaatggcggctccaagaaaaggaaagccaatgattag

SEQ ID NO: 78952 - DNA, 564 bp, Saccharomyces pastorianus
atgttatataacaaagagcagggaacaagcggcgctagtagctctggtcgtagaacgaaattccacttcgatcgttttgtacaaatggttctgttcattgccgctaatcccaattattgctgttcagtagccagtatcccgaaatctggtgtcacgccagatttaaaaagagcagatattcttgaacagaagatcaaaagcttaaatagtgcgctgagtccaaaattgaaggaagaaagtcgtcttggtgggcctttgcataacccctctattctaccagccccatctttttcatcactaccaatgtcatccaatggaaagaaaactttagcaggatatagacctaaaagtaggaagaaacaaactattctccccaacggtcaaccaaaagagtgcgccacttgtggtgacacctggacttctcagtggagaagtggacctaatggaaatgttgagctatgtagtcgatgtggcatagcatacaggaaaaaaatggagaaaaaaatacgatcgcaacaatccactgaggatggtactaaaaattttatatttaaaaataaatag

SEQ ID NO: 78953 - DNA, 366 bp, Saccharomyces pastorianus
atgacctgtggtctagtacgaataaggttagccagatttggaagaaaaaatagtccggtctataatatcgtagtggctaattcccgtaaggcgagggatgctaaaccaatcgaggtactaggaacctacgtgccggtacccagcccagtgaccaagagagaattgaagaggggcgttgtacctattaaagacgtgaagcttgattttgatagaacaaaatattggattggtgtgggagcacaacctagcgaaacagttactaaactattacgaaaggctggtatattaaatgatgcatgggccactagtaagaacagcaatgtgaataggaaagttgtatttgaaagaatggaaacattggagtga

SEQ ID NO: 78954 - DNA, 570 bp, Saccharomyces pastorianus
atgtcttctttatcgctatatactgttcaggctgttttaatactagatcagcaaggagaacgaatttatgcaaagtattatcaacctcctcatagatctgatgaaggacaccaattgctcttcaattcggtgaagaagcaaaaagagtttgagaaacaactataccgtaagactcataagcaagattcggagattttaatcttcgaggatcatttagtcctttacaaagaatacattgatatcacgatatatttagttgcttcgctggaagagaatgaaattgttcttcagcaaggattttcagcaatcagaggagctttggatttgattttgaactcaggaatggacaaaaaaaacatccaagaaaactatgatatggttttattagctattgatgaaaccattgataatggtgttatcctcgaaactgactctaacactattgcatccagagtttctaaaccacctacgaacgaaccccaaatggcattagatttggataagggtttcttaggcgcgtggggtttcgcaaagagcaagtttcaagaaaggttacagcaaggcttatga

SEQ ID NO: 78955 - DNA, 1125 bp, Saccharomyces pastorianus
atgtctgccaatgatttcaagcctgaaacgtggacttcaagcgccaacgaagccttaagagtttctatagttggagaaaacgctattcagttttcaccattattcacgtatccaatttacggtgactccgaaaagatctacggctataaggatctcatcatccacctagcatttgattcagtaacattcaagccgtatgttaacgtcaagtattcagcaaaattaggagacgacaatattgtagacgtggaaaaaaaattactctcatttctaccaaaggatgatgtaattgttagggatgaagctaaatgggtagattgctttgcagaagaacgaaaaacacataatttatctgatgtgtttgaaaaagtatcagagtattcgttgaatggggaagaatttgttgtatataaatcgagtttggttgacgattttgccaggagaatgcatcgtcgtgttcaaatcttttcattactttttatcgaagccgctaactatatagatgagactgacccgagttggcaaatctattggttgttgaacaagaaaacaaaagaattgattggtttcgtcactacttacaagtattggcactaccttggagcaaaatctttcgatgaggatatagataaaaaattcagagccaaaatatctcaatttttgatctttccaccttatcaaaataaaggccacggatcctgtctttatgaggctataatccaatctttgctagaagacaaaagtattactgaaattactgtagaggatccaaacgaagcatttgacgatcttcgcgacaggaatgatattcaaagactgcgaaaacttggttatgatgctgtctttcagaagcactccgacctttctgatgagtttttggagtcaagccgaaaatctttaaaactggaagaaagacagtttaatcgtcttgtggaaatgcttcttcttttaaacaattctccatcatttgaattaaaggtaaagaataggttgtacattaaaaattatgatgccctagatcaaactgatccagaaaaggcaagagaagctttacaaaattcatttattttagtcaaagatgattataggcgtattatagagtcgataaataaatctcaaggttaa

SEQ ID NO: 78956 - DNA, 1551 bp, Saccharomyces pastorianus
atgtttatagccaaaaatctaaaaaataataaaatcaaggtatgcttgcctaaaaagaaatttgctgcgctgagtacagcgtctatacaaactaatgaaagaccaaatccagataaggttttgaaggacatcgcgaaatatgtccatgaaaccccattaaaatcatctttggctctagatacagcacgactctgtttccttgatactctaggctgtggcttggcggctttgaaatttaagcaggctcaaaatattattaaaccaattgtgccaggaacaatagttcccagtggaacaaaaatattgggcacatcttacgttatggatccagtgaagggagcttttgccattggtactctaatacgttggttagattacaatgactgctggttagctgccgagtgggggcacccatcagataaccttgggggaattttagctgtcgcggatcacttgtccagattaaacaaggctacccacggaaagaatggaaaacagtttcttgttaaagacgtattagaggcaatgattaaagcgcatgaaatccaaggtattatagcgctcgaaaattctttcaataaagtaggtttagatcatgtggtactcgtgaaagtagcaacggctggtgttgtctcgaagatgctgggcctgagccaggaacaaactattgaagcattgtcacaagcatttgtagacggtcaatcactgcgtacttaccgtcatgccccaaatactggatctagaaagtcgtgggcggcgggagatgcagtttcgagggctgtaaacttggcttatttagtcaaaaatgctaatgttggcacgataccttcagtattaacagctagaacctggggattttatgacgttttatttaagggtaaacctttttcattccaacaaagatcaaaatatgattcctacgtcatggaaaacgttctgttcaagatatcatttcctgccgaattccatgcgcaaactgcagtagaagctgctgtaaaagcatataggattcttgccaaacaagggaaaacttttaaagatattaaatcgatcagaattagaactcaagaggcggcaatgaggattatagataaatccggtcctctgtataattatgccgatagggatcattgtatccagtacatgatcgcggttccgctgattactggtaatctcacagctactgattattcggatgaggtcgcaagaaatcctgagatcgataacttgagatcgaaaatgtactgtatcgaagatactcatctcactcaaaactatcacgatcctgataaaaggtcgataggaaacgctcttctcatagagctgaacgatgggacgcagttggatgaaatttttgtagagtaccctgttggtcacaaatttagacgagaggaaggaataccattactaatgaataaatttcaaaggcatctgcgcgaacattttgtagagagccctgataaagtcgaccttataatgaaggtaagttcaaaaacaaacttttttaatatgcaaatcgacaaatacatggatttgtttactgagggatga

SEQ ID NO: 78957 - DNA, 1035 bp, Saccharomyces pastorianus
atgtttaaatcattggctgctgtcttgcctagagctagcaaggcaaagttcctccagaaaaattacgcctccactttagctttcattgaaagctcaaaagatggctctgtttcaaggtcatcattgagtttattggctgctgcacaaaagttgtctaaccctatcacagctgtaatcacaggtagcaaagctgaaaaaactgctgaggcgctaaaatcttcatattcatgcagcaatttagaaaagcttgtcatatttgaagattcaaaattagatacctgtcttcccgaacaactaactccgttattagtgaaactgttaaaaggcggcgactattcgcattttgttgtctcaaactcctctgttggaaaaagtgttttacctcgggtgggtgcgctcttggacgtccaacctgtttgtgaggttactgtaatcaaagatcctaagacctttataaggccaatttatgcaggtaacattatttctacaatagaatgccaggcagaaaaaaaactgttgattattagggcatcagcttttccaccaattgcagagggtagtatggattctgttaccattgagaagagaactgatattcctccttgtgacttaaatgttacctgggttaaaactattcttaccaagagtgaaaggcctgaacttacttctgcacagaacgtggtaactggtggaagggcactcaaggataaggagacatttgagaagctattatcgccgctagcagatgttttgcacgctgctataggtgccacaagagcttctgttgataatggactatgtgataattctctacaaattggtcagactggtaaggtagtcgcaccaaatttgtatatagccattggcgtttctggtgcagttcagcatttagcgggaatgaaggattcgaaagttatcgttgccattaacaatgatcctgatgcccctatatttaatgtcgctgactatgggttgcaaggggatctttacaaaatagtccctgaactaactgaaaaacttggtaaatataaataa

SEQ ID NO: 78958 - DNA, 885 bp, Saccharomyces pastorianus
atgcatttcaaagatttaggattgcatgactatactctcaaaaacttgatgtatgagaataattgctgtaaattttatgatgccgtggatgaaaacaacacctcatatgttttaaaatttgttccctcagatgtgacttcggaaggggatactttcccattcgtggatcgctttcaagtaaaggaaggtgtttttttggtatattcctcaaatgactttggaaaagaaggtacggactactttacttatactggtagtggtggaaatgaggttcacatctcgggcacctcttcagaagcaggaataaaaccgcagtttattgaaacttgccatccaaaacatcttaagcggggaacaaaagagcaggaagatataaatagtagtacctcaaagaaaagtgcagttatcaacaatttttcgggtgaaaaaacaccaaatccaaggccacagagttccaacatttcagaaaaagagacgtatgtcggaatattgaacgtcaaaagtaaaaataagaactcatcgaaaatacgaagtgaaaaattggtaagttccgtcatcgaaacaaagcatacgccgggattggcatctattttgtcgaaagaaggcactacatatccgaataatgcggacgggaaacatatcagtatcgtgaatccatcctcaaaaatatatcattcatcccataaacagattgttaaaacgcctatccctaagagtggcctttctccaattgagagatgccctttcaatggtcaaaatattaaatgctactcaccaagaccactagatcatgaaagtccccaacgtgatttcaataataactttcagctgagaatactgaagagctcggtgttgcaaaggagacaatcaacacagaatagttga

SEQ ID NO: 78959 - DNA, 1728 bp, Saccharomyces pastorianus
atgattacaatgattaaaaacaaaactttcaatagaaaaactacgggaacattgaagaagctggttttgtcatcagacaagtcactgcgaagatctttcaacggggcaagcagtactaaagacttcgtgtcctcggaatcaagtaaagtagaagaatggtgggaatcagccagatttaagaatatcagtcgtccatactcagctacggatgttgtaaagcatcggggcagccttcctgctaatacttcaatttatccttcatcttatcaagctcgaaagctgttcaacttactagaagagaatttcaagaatggtactccacttcacacgttgggagttatcgatcctgtacaaatgagtcagttggcccgttgcagaaatatcaaagttgcttacatatctggttgggcttgttcttccacattagttggatctacaaatgaagtatcgccggattttggcgattatccatacgatactgtgccgaatcaagtggagagaatattcaaggcgcagcaattgcacgatcgaaaggctttcttggaggcctccatcaaaggttctactcctgttgattatttaaaaccaattatcgcggacgcagacatgggtcacggtggcccaacgactgtaatgaaagttgctaagttatttgcggagaaaggggctgctggtattcatcttgaagatcagatggtgggaggcaaaaggtgtggccatcttagtggagctgttttggtgcccacagcaacacatcttatgagattgatttccaccaggtttcaatgggatatcatggggacagaaaatttggttattgcaagaacagattcctgtaatggtaagctgttgagttcaagcagtgatccgagagaccacgaattcattaggggtataataagagataacgtggtgccttggagcgaaaaattgattgagatggaggacaaaaaaattcccaactccaccattgctgacatggaacaagaatggtaccatgaaaatgagctgtttacatttgaagaggccttagaaaagcagtttacggcaaccgagtttgaaagctataaagaaaagaaggaagaccttatggtaaacaagctgggtagagcatacctaagcttaagagaaatgaaacttttagctcaagaagtgacaccactaaagaaaattatatttgactgggatgctccgaggaccaaagagggatattacatgtttaacggttgtattgaagcagctattagaagatctttggtgtttgccccatattctgatatgatttggctggaaacgaaaactcctgacctggagcaggcacgctcattttcaagaaaaattcataaacaacttccagctaccaagctagtatataacttatctcctagtttcaattggagcgctcacggctttgatgataaggcattaaaatccttcgtatgggacttggcaaaagaaggcttcacgttgcaactggtttcccttgccggtctgcattcagatggagtatcattctgggaattagccaatagcttccaaagtgacggaatgaaagcatacgtcgaaaaagtgcaaaaacgggaaaaggagactaattgtgatatcatgacacaccagctatggtctggtgcagaatatgttgattccttaatgaaagttgtccaaaacggtgcttcatcccaaactttaagtacatctggtgagagctttaccgaaacgcaattttga

SEQ ID NO: 78960 - DNA, 981 bp, Saccharomyces pastorianus
atggcagaagtactgaccgtcctcgagcagccgaactcaattaaagattttctcaagcaggattcaaatattgcgtttctggctggtggagtagctggcgcggtttcccgaaccgttgtttcaccttttgagagagttaaaatactgctgcaagttcaaagttcaaccacttcttataaccgaggtatctttagctctatacggcaggtttaccatgaggagggaaccaaaggtttattcagaggaaatggtttgaactgcataagaatttttccctatagtgcagtccagtttgtagtttacgaagcttgtaagaaaaagttattccatgtaaatggctataatggacaagaacaactaacgaacacccaaagactattcagcggtgcattgtgtggtggttgtagtgtggtggctacttacccgttggacttgatcaaaacaagactatcgattcagacagcaaatttgagcagtttaaaccgctcaaaggcaaaaagtatatcaaagcctccggggatctggcaattactaagcgaaacttacagactcgaaggcggtctcaggggattatataggggtgtatggccaacgagtcttggtgttgttccatatgtagcactaaactttgcagtttacgaacaattgagagaattcggtgtcaattcctccgatgctcagccttcctggaaaagtaacctctataaattaacaattggcgccataagtggaggggttgcgcaaacaatcacttatccctttgatctgctaagaagaagatttcaagttctcgcaatgggcggaaatgaactgggatttagatacacgagtgtctgggatgcgctcgtgacaatcggcagagcagaaggcgttagcggttactacaaaggcttagctgcaaacctttttaaagttgttccttcaactgcagtgagttggctagtttacgaagttgtatgtgattctgtaagaaattggtga

SEQ ID NO: 78961 - DNA, 954 bp, Saccharomyces pastorianus
atgaatttttccctttcaaggcaaagttcagaaaaacaatcatcatatacagacaagccaagatctcctaatataggaatgtgtacagtcaattataaatcgaacctcccccttcaagtgtccgcagttgatcagctgagcactggtaaggggactcaattttatggccacaatagctacaaaaatgaacgggaatgttataatagtacgaaaataaacttaccaccaatttcatcccttttgcctaattttgaaaataatacaccacctaacgtagattcaagggttcaattccctccacagcaagtttatcaaagcatgaatgttgtacccattgttaatgagatctacaccccaatttccatgaacgcaacatcagatcaatatcctatctactatacggaaagtcagcaaccaataccacatagccagcctcctcatttgacctcctttgctcccttgatgatgccagtcatggtcccaacagtatataaaccattgacaccatacgacaaagaaccaatagcaattgcctccgaacctaacttcactgcaatatcaatggcgagtcacccaaacgctgccttagagctatgccatgataggccaaaatcagtcccacctgggtatggcgtacttccaaccatgcaggaagccagtaacggcagaacaaaaagcgaacctggtgccgtgttgaacggttcagcaacattttctgattggaaaactgacgcccgaatatcatccacaaagctgagaaaacagtgcccagtatgtggaaaaatttgttcgaggccctcaacgctgaagacacattacttaattcatacgggagatactcctttcaaatgtacttgggagggttgcacaaaatccttcaatgtgaaaagcaatatgctgagacatttgaaaagccatgaaaggaaaagaaacaaagtcttacacactacatag

SEQ ID NO: 78962 - DNA, 744 bp, Saccharomyces pastorianus
atgtggagaacaaaaacactagaatctatgctttgtagcccaatgaaatgttcatcgtctaacatagggggatcctatgcgcaatcttcaaaggaagtctcgaacacgaccaaaagggaagtgcatcttccaccttgttcgtcgattatgcacgctccacttactcctgaaataaaccaggccgcactaccacctcccgcttaccattacgcaccttcttctctgcatcagacagaggatcccgtatggagatcaagtcccaactctattatcttttcgccggttatagcaacaccgcaacccttccctttaacgttcgttgaacgtcaatcttgttgccctatttattcaacggcagcttcctcttatactgcccaatctgtacctccatcaatgcagcattttcaggaggaaaaccacagagcggtgagcaacgagcagtactccctcccgaatgtgcatatagggcaaaatcctgggacgctattatcccaaacacaaaccgacttagatcttatacaaaagcaactgcgcgctgtggtaaagctacggaaacaatgtcctatctgtgggaaggtttgttcgagaccttcaacactgaggactcattacttaatacatacgggagacacacctttcaaatgtacttgggagcattgcaacaaatctttcaatgtcaagagtaacatgttaaggcatttaagaacccatcaaaagaaaatagcaaagaaaaaacatcagtga

SEQ ID NO: 78963 - DNA, 738 bp, Saccharomyces pastorianus
atggctaccaggactcaatttgaaaactccaatgaaatcggtgtattctccaaattaacgaatacttactgtttggttgctgttggtggttctgaaaacttttactctgcatttgaagctgaattaggagatgctattcccatcgttcataccactattgctggtacgcgtatcatcggtagaatgaccgcgggtaaccgtagaggtctgctagttccaacccaaactactgatcaagaattacaacatttaagaaatagtttgccggattccgttaagattcaaagggtagaggaaagactatctgccttgggtaacgtcatctgttgtaatgattacgttgctttagtgcatccagatatcgacagagaaactgaagaattgataagtgatgtactaggcgttgaggtcttccgtcaaaccatatcaggtaatatcttagttgggtcatattgttctttaagtaatcaaggtgggttagtgcatccacaaacaagtgtccaagatcaagaagaattgtcctccttattacaagttcctttggtggctggtaccgttaaccgtggtagttcagttgtcggtgccggtatggttgtgaacgattacttggcagttacaggtctggatactacagccccagaattgagtgttattgaaagtattttccgcttgcaagatgcccaaccagaatccatttcaggtaacctacgtgatactttgattgaaacctactcatag

SEQ ID NO: 78964 - DNA, 261 bp, Saccharomyces pastorianus
atgctcttgttccaaatactctgtcgtattgcttcttgtaattatactataagaccaacgagggatgaggcttcttttaattatgcaatattgaatattgcttcacatacagtaaaagaaaaaatctgcacaaaggaacatgggtttaaatctttaattaataaaaattttccgaaaattttcgtttggccctcggaaaaaacgggtaatgctcatccatcgggatttcgtccagaatgcctatattattacataaagtga

SEQ ID NO: 78965 - DNA, 432 bp, Saccharomyces pastorianus
atgagcaaggctacgtgttcctttgagggctgtcatagtgcagttattacgatcaacgatgataacataataaacttaccagagcaggtgcacagcgaattcaagttgctggaaaaaagaactatgcgagatgctacccccagcgagagcaacttcttggtcgtccctgatgtttgggactttgataatgttggtgtatctagagaaattccttcttctatattaggggatttgagtgataagagtgattttgtttttgagtatggtaattccagctggaagatcaaaaagtgcttgaaatatttgatatgcgctgattgtgataaaggtcctatcggaataatatgtcaggtgcaagatcagacaaagaatgaagaaagagttttgcatctactaagcttgcgaagccttcaaattatgggaaggaattag

SEQ ID NO: 78966 - DNA, 2802 bp, Saccharomyces pastorianus
atgtctcaacagtctagctctccaacaaaagaggataataactccagctcccccgttgtgcctaatcctgattctgttccaccacagctttcttccccagctctattttatagctcctcttcatcacaaggtgatacctatggtcgcaacaatagccagaacttaagtcagggagagggaaacatcagagctgctataggttcttctccactaaattttccatcttcttcccaaagacaaaattccgatgttttccaatctcaaggcagacaggacagaattcgttcttctgcgagcgcttctggaaggtctagatatcattctgatctgagaagtgatagagcactgcctacttcttcctcttctttaggccgtaatggtcaaaaccgtgtacacatgcgaagaaatgatattcatacatctgatttatcctctccaagaagaattgtggattttgatactagatccggcgtgaatactttggatacttcttcttcttctgctcctccatcggaagccagtgaacccttgagaataatttggggtaccaacgtcagtatccaggaatgtacaactaattttcgtaattttttgatgtctttcaagtataaattccgtaaaatattggatgaaagggaggaattcattaacaatactaccgacgaagaactatactatatcaagcagcttaatgaaatgagagaacttggtacctctaatttaaacttggatgctagaaacttacttgcttacaagcaaacagaagacttataccatcaactattaaattatcctcaagaagtgatttctatcatggatcaaactatcaaggactgtatggtttccttaatagtagacaataatttggattacgatttagatgaaatagagaccaagttttataaagtaaggccttacaatgtaggttcttgtaaaggtatgcgtgaattgaatccaaatgatattgataaattgataaacttaaagggtcttgtcctgagatcaactccggttatccctgatatgaaggtagcgtttttcaaatgcaacgtctgcgatcatacaatggcagtggaaattgatagaggagttatacaagagcccgctaggtgtgaacgtattgattgtaatgaacccaattccatgtcactgattcacaacaggtgttcattcgcagataaacaagtcattaagttacaggaaactccagactttgtgcctgatggacaaacgcctcactctatctcattatgtgtttacgatgaattagtggattcttgcagggcgggcgatcgtattgaggtgactggcacgttcaggtccatccccattagagctaattccaggcaacgcgtactaaagtcgttatataaaacatacgtcgatgtggtccacgttaaaaaagtttcagataagaggttagacgtcgatacttctactattgaacaagaattaatgcagaacaaggtagatcataacgaggtcgaagaagtaagacaaattactgatcaggatttagcaaaaattcgcgaagttgcggcaagagaagatttatacagtttattagcccgctctattgccccaagtatttacgagctagaagatgtcaagaagggtatattacttcagctatttggcggcacgaataaaacctttaccaagggtggccgttatagaggtgacataaatattttactttgtggggatccttctacttccaaatcgcaaattttgcaatacgttcacaaaattactcctcgtggtgtgtatacttcgggtaaaggttcatctgccgttggtttaactgcttatattacaagggatgtcgacacaaaacaacttgttttggaaagtggtgcattagtattgtctgatggaggtgtttgttgtattgacgagtttgataaaatgagtgattctacaaggtccgtcttgcacgaagtcatggaacagcagactatttcaatcgcaaaagcgggaattatcacaacacttaatgccagaagttctattttggccagtgctaacccaattggttcacgctacaaccccaatttgcctgtgactgaaaatattgatctaccgcccccactactttcgagattcgatctggtctatcttgtccttgataaggttgatgagaaaaatgacagagaactagccaaacatttaacaaatctttacctggaagataagcccgaacatatttctcaagacgacgtgctaccagttgaatttttaacgatgtatattagttatgcaaaagagcacatacacccaataatcaccgaggccgctaagactgagcttgttcgtgcttatgtaggaatgagaaagatgggtgacgattcgagatccgatgagaagagaatcacagctaccacaagacaacttgaaagtatgattcgtttggctgaggcgcacgccaaaatgaaattgaaaaacgtcgtagagctggaggatgttcaagaagccgttagattaattagatcagccataaaagattatgcaacagaccctaaaaccggtaaaatcgacatgaatttagttcaaacaggtaaatcagttattcagagaaaactacaggaggatttgtcaagggaaattatgaatgttttgaaggatcagacatcagactcaatgtcattcaatgagcttataaaacaaatcaatgaacactctcaagatagagttgagtcttctgatatccaggaagccttgtcaagattgcaacaagaggacaaggtcattgtccttggcgagggtgtaaggagatcagttcgcctgaataaccgtgtctga

SEQ ID NO: 78967 - DNA, 348 bp, Saccharomyces pastorianus
atgctaagcaggatccaaaattataccagtgggttagtttctaaagcaaatcttttgtcatcaaaggctttatactatggtaaagtcggtgccgagatttcaaaacagatttatttaaaagagggtcttcaaccaccaactgttgcccagttcaaatcagtgtattcgaacctttataagcagagcctaaactttgctctaaagcctacagaagttttatcgtgtttaaaaaacatccaaaagaatgaactattaaaatatggcgcatatggtattcagttgatagggttttattctgtcggtgaaataattggaagaagaaaattagtgggatataaacatcactaa

SEQ ID NO: 78968 - DNA, 2709 bp, Saccharomyces pastorianus
atggagcaaatcaattcgaacagtagaaaaaagaagcaacaattggaagtattcaaatattttgcaagtgtccttacaaaagaggacaagcctattagtatcagtaatggtatgttagatatgccgacagtgaactccagtaaactcacagcaggaaatgggaaacctgacacggagaagcttacaggagaactaattttaacatacgacgatttcattgaactgatatctagctcaaagactatttattcgaagtttacggaccattcgttcaatttgaaccagatacccaagaacgttttcgggtgtattttcttcgctattgatgaacaaaacaagggatatctgacgcttaatgattggttttattttaataatttattagaatatgataattatcatctcattattctatatgagttctttaggaaatttgacgtagagaatttgaaggcaaaacaaaaaaaagagctcggtagttcgtcgtttaatttaaaggctgcagatgatcgaattaagtcaattaattatggtaacagatttctaagctttgatgatcttcttttgaatctgaaccaattcaaagatactatccgcctgttgcacgaatctattgatgataattttgttaaagataacaaattactacttgattggaatgactttcgatttctgaaattttacaaatgttatcatgaaaatgaagagtatttgagtttaaactctctggtcacaattttacaaaatgatcttaagaatgaaaaaatatttataggttttgataggttggcacagatggactcacaagggcatcgtttagccctaagcaaaaatcaactcacctatcttctaaggttattttactctcacagggtgtctgcagatatattttcctccttgaatctatcaaacaccgaattactaaaagcggacaataattccattccgtacaatgtattcaaggatatattttatttatttcaaaattttgacctactgaaccaaatatttcacaagtatgttactgaaaataatttgaatgagcaggatattagggaacaaatagttactaaaaatgactttatgacagttttaaacgcccagtataacaaagtaaacaatatcattgagttctctccttctcaaatcaacctactattttctatcgtcgcaaattcaaaggaaaacagaagattaagaaagagaaatcaagatcgagataacgagctattaaatgatcaccattatgattcagatattgatttttttatccataatgagtatttgcatggagtaagcagatccagaaaaaatttagaaagttttaatgactattatcatgatctctcggatggatttgaccaagactctggtgttaaaaaagcttcaaaagcgagtactggcctgtttgaatctgtatttggaggtaaaaaagataaagcaacgatgcgttctgacttaacaattgaagatttcatgaaaattttgaacccaaattacctgaacgacttagttcaccaaatggaattgcaaaaaaatcaaaatgagtcattgtatattaattactacttttatccaattttcgattcgttgtacaatttctccttgggttctattgcgggttgtattggtgcaactgtagtatacccaatagactttataaaaacaaggatgcaagcccaaagatctttagcccaatacaaaaactcaattgattgtttgttgaagattatatcccgcgaaggaataaaaggtctctactctggcttagggccacaattaataggagttgctcctgaaaaggcgataaaattgactgtcaatgattttatgagaaacaggttgactgataaaaacggcaagctaagcctttttcctgaaattatttctggcgcttcagctggtgcatgtcaagttatatttactaatccgttagagattgtaaaaattaggctacaggtccaatccgactatgttggtgaaaacatacaacaagccaatgaaactgccactcaaatagtcaaaaaattaggactgaggggcttgtacaatggtgtagccgcatgtttaatgagagatgttccattctctgctatttattttcccacttatgcacatttaaaaaaagatctctttgattttgatccaaatgataaaacaaagaggaatcgattaaaaacatgggagcttttaactgccggtgccattgctggtatgccagctgccttcttgactactccttttgatgttataaaaacaaggctccagatagatcctcgaaaaggtgagacaaagtataacggtatatttcatgctatccgaactatcttaaaggaagagagctttagaagctttttcaaaggtggtggagcccgtgtcctaagaagttctccccaatttgggttcactctggccgcctatgaattattcaagggctttattccctcccccgataacaaattaaaaagcagagagggtagtaagagattttgtatcgacgacgacgcaggcaatgaagagacagtagttcatagtaacggtgaactcccacagcaaaagttttactctgatgatagaaaacatgctaattattactataaaagctgtcaaattgcgaaaacattcattgatttggacaataacttttctaggtttgactcttcagtttataaaaactttcaagagcacctaagaagcattaacgggtga

SEQ ID NO: 78969 - DNA, 3393 bp, Saccharomyces pastorianus
atgcacggcaaagagttggctggcaggctccggaaaagggaaaatgataacgatttatcaccaaattcaagctcttctcctgctgaaagatttaggtgtccacatcccgaatgtaataaaactttctcacgtcaggaacatttatcaagacacaagctaaaccactggccgaaagagatatatgtttgttcttacgtgcttcccactacaaatgcgccttgcaataaaacgtttgtaaggaaagatttactgatcagacatgaaaagaggcattcaaaggtgaaaaacagattaagtcggccaagcaaggaccagatttcctcatcaaataaggacttctccaaaaatgcaccatataatcccagtgaagtacccctttctacgcaaagtggaacttctacgattaacttaataaaaaattctgtgaatccaccaccatctatcacacaagaatcaaaatttcgtccttttcttcaacagcctcaagaacctcaacagattcagcaatcacaacaaccacaacaaattcaacaactgcagcaacttcaattcccgcagcaactgcgggcaccattgcaacaacctatgttgcagcaacaaatgcatccacagcaagcaagtcctacttttccatcgtatgatcctcgaataaggaacaacggtcaaaatggtaatcaattttttaatttgatatttgataaccgtacaggcgttaatggttttgaagtggatgcagcgaataacaacggtaatggcaatgaccaaaatatgaatatcaatccagccgtgcagcagcaacgatatcaagacagaaattttgcaagtagttcatatcagcagccactccagccacttacccaggatcaacaacaggaacagtactttcagcagcaaaagcttgcccaacagcaacagcaacagcagcaacaacaacaacaattaccaccccagaatccatttggagatccattaacatcttcctctagcggtgctaatttgtcagttatgcaggaccttttttctacaaattttttgaacagcgacccattacaatctttcatgcaagaactttctgaagccccgcaagtaagtattgaagatacattttctgacaagaatacaatcccacctaatgaaaaacctgttcaacaagacgaagggttccagaatcctccagttatgtttgagttaccacaagataacattaaaattcccaaagcacaaccgaagttcaacgataaccccagtacttcagtgaaggacaatctttccagtcagaaacttaatatcaacgagctaaaacggagatcatctaaagattcaggagtaggaaacaattcctctctgaactacaaggaacagttgcgtcactctatgaaaagtgtcccgtcatttttccatccggatcccttaacaaagtataagatatcaaaagaaaaatgtcaagaaatgttttcatttgttccagaattacgctatgtctctattgaatctatacacaaatcgttaaaatccttctggttgaacttccatccacaatacggtctgcttcataaaccctcttttcacgttgataaacagcctgcaattttgaatttggcactaattatgactggcgcaagttttttgggaagcgagtatcgtgaacagattagtgacccaatttgtggtcctctaagatggataattttttctcatgctgattttcaaccaccttctaaaacctacatcattcaaagtttattattagtcgaaggatatgaaaaaacaagtacgaacaggtatttacatgaaaggtcttttttacatcacggaacgaccattcaattgctaaggcgaacgccctctttaggcggccatcccttaatggtcaaaaccggcaaaacctctggggaaaattcaattcaagacccacaagaagtttataaaagatggattgattttgaaatgttgaaaagaatagctttctacgcattttatatggacactacacatgctgtagtgtttggatactggaatttatttattaatagcaatcagattcaactaactttaccctgtccagatcaagtgtgggagtcttatgatttgagctatgaaactctgatggagcatgggtatggcagcacaaagagagatgagaataatacatttttgtctgcgttaatgcaattaatgaaaaatgtcattcaaatcttacgaaataataatatacggagaaacaaagtcaacaatggcggtatagagagtacccctacagacttggaaagcactacagattggaatattcagagtctttttggtaaaaagattcttttggcggggataatttcgatcttatttcaatgtcaagaggaagttaatggtgactatttcattactaactttaggggcggaatcactgatcatttaggcctttcgtggaaagatattttatcatttgcaatgaactattggcttcacgaagttcagaaaagctgcactgatccgaaagcatgtaggataagtactccatctgaggagacactaacgaacagaaaaattgacgaggataatggagatggactatgtgatgatgatttggacttgctttcctccgataatccgtcaaattgtaaaattcccgttattcatatctctcaaattgttctacgtattcttcatcatgattattacatatatgcaggagcaccttggagaatgaatgtaccaattggtcgcgatgaatatgacatgatcagtcgcaggattctccagttcgctaaagacccctacaatgggggtgtagctgtagtctatgccttccagttcttatttgaaatgtttatcattaaggaaaataacgttccaaccgtggtgaagagctacaatataaattctgatcctgtgattactagaccctatgcgattgcattaacttcactcctaatttggtcttgtaattttgcattacatggctgtgaagttagcatatgggataatacagaagcctcaaaggatgaatgctttcaaccagatgacagcaatggtggaaacattcttggcaatactgataataatggatcgacgattgcaaacaacaatttaaaggaaaagaacaattacattccaatagaaagttttgaagtttacctattgagaatgtatcggaacttatatgtggatagctcactcgatgtagttagttttcagaatgaagtttgggcaaaagcaagtttacttcaacatatttctaatacccactttctatgcgggatgatgcagtttatgagagatatttttaacaagagctactgggatttagggcgcgaattcggaaaactcttcgataattgtttggaaaggagcctagggaaaacgtcacccacttgtcataacatgtttgatgtttag

SEQ ID NO: 78970 - DNA, 1182 bp, Saccharomyces pastorianus
atgacggatattcaactaaatggaaagagtacattagatactccttctgctaccatgacagcaaaagaaaaagaggcaaaattaaaatcggctgatgagaataacaagccaccgaactacaaaagaatttctgacgatgatttatataggcactcttcccagtatagaatgtggtcattcactaaagatcaacttcaggagaaaagggtagataccaatgcccgagcgattgcttacattgaggaaaatttattaaaatttagagaagcacacaacttaacagaagaagaaataaaagtactagaagcaaaggctatccctttgacaatggaagaagaactcgatttggtgaatttctacgcaaaaaaagtccaggtaatagcacagcatctaaatttgccaaccgaagtagtggccactgcgatatccttttttaggcgttttttcttagaaaactctgttatgcaaatagatcctaaaagtattgtacatactactatctttctagcctgcaaatcggagaactattttattagcgtggattcgtttgctcaaaaggccaaatctactagagatagtgttctcaaattcgagtttaagttgttagaatcattaaaattttcactgttgaaccatcatccttacaaaccgcttcatgggtttttcttagatattcagaacgtcctttatggtaaggttgatttaaattacatgggccaaatatacgataggtgtaagaagagaataactgccgcattattaaccgatgtcgtatatttctacactccaccccaaataacactagcaacattattgattgaggatgaagccttagtcacaaggtatttagaaacaaaatttcccagcagagaaggtagccaggaatcagtaccgggaaacgaaaaagaagaaccacaaaatgatgtcagtacaactgagaaaaacaaagagaagtccacagagagcgaagaatattcgatagactccgcgaagttactaaccataatacgcgagtgtaaaagtattattgaagattgtaaacctccgagtactgaagaggccaagaaaattgcggcaaaaaactattattgtcaaaatccatcaacactgattcagaaattaaaaaggaagttgaatggagaagatacttcgtccaccgttgagaaaaagcaaaaaacatga

SEQ ID NO: 78971 - DNA, 2247 bp, Saccharomyces pastorianus
atgaataggggatcattagatgatgggcctaaactacgtgaagaaaagcacttccaagatttttatcctgatcttaatgccgatactttactgccgttcatcgttcccttagtggaaacaaaggataacagcaccgatactgactcagatgatatttcaaatcggaataacagagagatcgggagtgtcaaaagcgtacaaactaaagaattgattttcaaggggagagtcaccactgaaccactagtactgaagaagaacgaagtggaatttcaaaaatgtaaaataactacgaatgagttaaaaggtaagaaaaatccatactgcgttagatttaatgagagctttatatccaggtactatcatataaacaaagtaagaaataggaagagttataaacaacaacaaaaagaattcgatggtgtggagacaccctacttcaccaaattctctagtaaagaagccccgaatattactatttcgacgagtacaaagagtgcaattcagaaattcgctagtatttcacccaatcttgttaatttcaagcctcagtatgacatggatgaacaggatgaattatatttgcactaccttaataagaggtattttaaagatcaaatgtctcacgaaatatttgaaattttaatgactacactagaaactgaatggttccatattgaaaaacatataccctcaacgaatagtctgattgctaggcataatattctaagggactgtaagaattatgagctatatggttctgatgatggaacaggtttatcgatggaccaggcgtgtgcagtttgtttaggcacagacagtgacaatctgaatacaattgtcttttgtgatggatgcgatattgctgtgcatcaagaatgttacggtataatttttatcccggaaggaaaatggttatgtagacgatgtatgatctcaaaaaataactttgccacttgtctaatgtgtccaagtcatacaggtgcattcaaacaaacagacaccggttcttgggtacataacatttgtgctctatggcttccagagctatacttttcaaacttacattatatggaacctatagaaggcgttcaaaatgttagcgtatcacgatggaaacttaactgctacatctgtaaaaagaagatgggtgcttgcattcagtgctttcaaagaaactgttttacagcatatcatgtcacgtgtgcccgtcgagctggtctctacatgagtaaagggaaatgcactattcaagaattggcctctaatcaattctcccaaaagtattcaatcgaaagtttctgccacaagcatgcacctagaggatggcaaacgagtatagaaggtattaataaagctagaaaatacttctctctactctctacattacaaaccgaaactcctcagcataatgaagctaatgataggacaaattcaaaattcaacaaaacaatttggaaaacacctaatcaaacgccggtagcaccacatgtttttgctgaaatattgcaaaaggtcgttgatttttttggcttagctaacccaccagcaggcgcatttgatatttgcaaatattggtcaatgaaaagggagcttacaggaggtaccccattaactgcctgttttgaaaataattcattggggtccttaaccgaggaacaagtgcaaacaagaatagattttgccaatgatcagctcgaagacttgtaccggctcaaagagctgactactttggtgagaaagagaacacaagcttcaaacagcttgtccagatcccgaaagaaggtttttgatatagttaaatcgccccaaaaatatcttttaaaaatcaatgtactggatatctttataaaatctgaacaattcaaggctcttgaaagattggttactgaacctaaattattggttattttagaaaagtgtaaacattgtgattttgatactgtccaaatttttaaggaggaaattatgcatttttttgacgttttggaaactctacccggtgcatcaagaatactccaaactgtctcatcaaaggcaaaagagcaagtaacaaatttaattgggctcatagaacatgtagatattaagaagttgctatccagagattttataataaatgatgacaagatagaagaaagaccatggagtggcccggtgattatggaagaagaaggtttaagcgatgcagaagaactgagtgcaggggaacaccgtatgctgaagctaatccttaacagcggataa

SEQ ID NO: 78972 - DNA, 1434 bp, Saccharomyces pastorianus
atgacattgaataggaagtgcgtagtgatacataacggatcgcacagaacggtggctggatttagtaacgttgaattgccacaatgcattataccctctagctatattaaaagaacagatgaggggggggaagctgagtttatattcggaacctacaatatgatagacgctgcggcagaaaaacgcaatggtgacgaggtgtatacattggtagatagccaagggttaccgtacaattgggacgcattggagatgcagtggagatatctgtacgacacccaattgaaagtttcacccgaggaactgccactggtgattacgatgcctgccaccaatggtaaaccggacatggccatattagagcgctactatgagctggcgttcgacaaattaaatgtaccagtattccagattgtaatcgagccattagcaattgccctatccatgggcaagagttctgcattcgtgattgatatcggcgcgtcaggctgtaacgttactcccatcattgacggtattgtggtgaagaatgctgtagtgagatctaaatttggcggtgatttcttggattttcaagtacacgaaaggttggctccactgattaaagaagagaacgacatggaaaacatggccgacgagcaaaaaaggtccaccgacgtttggtacgaagcaagcacgtggattcagcaattcaagtctactatgttgcaagtaagcgaaaaggacttgtttgagttggaaaggtattacaaagagcaagcagatatatacgctaagcaacaggagcagttaaaacaaatggatcagcaacttcagtacacggcgttaacgggaagccccaacaatccgttggttcaaaagaaaaattttctattcaagccattaaacaagactttaaccttggaccttaaggagtgctaccaattcgcagagtatctcttcaaacctcaactgatatcagacaaattctcaccagaggacggactgggaccgctaatggcaaaatcagtcaagaaggccggcgctagtataaattcaatgaaggccaatacctccaccaacccgaacggattgggtacaagccatataaacaccaatgttggcgatcataacagtactggcagcagcagcaacatatcaccagaacaagtatactcgctactgttgacgaacgtcatcatcacaggatctacctctctgatcgaaggtatggagcaacgcataataaaggaactgtcaatcaggttcccgcaatacaaattgacaacttttgccaaccaagtcatgatggaccgtaaaatccagggatggctgggcgcccttacaatggccaatctgccatcatggagcttgggaaaatggtactctaaggaagattacgaaacgctgaaaagagacagaaagcagtcgcaggctacgaacgcaacaaactag

SEQ ID NO: 78973 - DNA, 1113 bp, Saccharomyces pastorianus
atggctgaagcaagcatcgaaaagactcaaattttacaaaaatatctagaactggaccaaagaggtagaataattgccgaatacgtttggatcgatggtactggtaacttacgttccaaaggtagaactttgaagaagagaatcacatccattgaccaattgccagaatggaacttcgacggttcttctaccaaccaagcgccaggccacgactctgacatctatttgaaacccgttgcttactacccagatcccttcaggagaggtgacaacattgttgtcttggccgcatgttacaacaatgacggtactccaaacaagttcaaccacagacacgaagctgccaagctatttgctgctcataaggatgaagaaatctggtttggtctagaacaagaatacactctatttgacatgtatgacgatgtttacggatggccaaagggtgggtacccagctccacaaggtccttactactgtggtgttggtgccggtaaggtttatgccagagacatgatcgaagctcactacagagcttgtttgtatgccggattagaaatttctggtattaacgctgaagtcatgccatctcaatgggaattccaagtcggtccatgtaccggtattgacatgggtgaccaattatggatggccagatactttttgcacagagtggcagaagagtttggtatcaagatctcattccatccaaagccattgaagggtgactggaacggtgccggttgtcacactaacgtttccaccaaggaaatgagacaaccaggtggtatgaaatacatcgaacaagccatcgagaagttatccaagagacacgctgaacacattaagttgtacggtagcgataacgacatgagattaactggtagacatgaaaccgcttccatgactgccttttcttctggtgtcgccaacagaggtagctcaattagaatcccaagatccgtcgccaaggaaggttacggttactttgaagaccgtagaccagcttccaacatcgacccatacttggttacaggtatcatgtgtgaaactgtttgcggtgctattgacaatgctgacatgacgaaggaatttggaagagaatcttcataa

SEQ ID NO: 78974 - DNA, 1437 bp, Saccharomyces pastorianus
atgggcgcaaccaaaattttaatggacagtactcatttcaatgagatccgtagtataatccgttcgaggtcagtggcatgggacgccttagccagatctgaggaattgagcgaaattgatgcgtctactgcaaaagcgttagaatccattctggtgaagaagaacattggtgacggtttatcatcttcgaacaatgcacattccgggttcaaagtgaatggcaagacgttgataccattaattcacttactttccacctcagacaacgaagactgcaaaaaatctgtgcagaacctaatagctgaattgttgtcgtctgacaagtatggagacgataccgtgaagtttttccaagaagaccccaagcaattggaacaattatttgatgtgtcactcaagggagacttccagactgtgctaatctctgggttcaacgtggtctcactcttagtgcaaaatgggttgcacaatgtgaaactagtggaaaagctgttgaaaaacaacaacttgatcaatatcttgcaaaacattgagcagatggacacttgttacgtgtgcatcagactattgcaagaactggccgtgataccagagtatcgtgacgtgatatggttgcatgagaagaagttcatgcccaccttattcaagatcctgcaacgtgccacggactctcaattggccacgcggatagttgcaacaaactccaaccacctgggtattcaattgcagtactactctttactattgatatggttgctgacctttaacccagtttttgcaaacgagctagtccagaaatacttgagtgatttcttggacctcttgaaattggttaagataaccataaaggagaaagtgtccagattgtgcatatccatcatcctgcaatgttgctccacgcgcgtcaagcagcacaagaaggtgattaagcaacttttgttgctcggcaacgcgttgcccaccgtgcagagcttgagcgaaagaaagtattccgacgaagaattgcgtcaagacatcagcaacctcaaggaaatcctagaaaacgagtaccaagaattgacctccttcgatgaatacgtcgccgaattggactccaagttgctgtgctggtctccaccacatgtcgacaacggtttctggtccgataacattgacgagttcaagaaggacaactacaagatctttagacaattgatcgaactcttgcaagcaaaggtccgtaacggcgacgtcaacgcgaaacaagaaaagatcattatccaagtcgccttgaacgacatcactcacgtggtcgagcttctaccagagagcatcgacgttctcgacaagactggcggcaaagccgacatcatggagttgctgaaccattcagattctagggtgaaatacgaggccctcaaggccacgcaggcaatcattggatataccttcaaataa

SEQ ID NO: 78975 - DNA, 204 bp, Saccharomyces pastorianus
atggtcgcctttttagaactaacttctgacgtttctcaaccttttgtcatcccatctctttcgccagtctctcagccaagctcaagaaagaactctgacgcaaacgtcgatgacctgaatctggctattgccaatgccgctcttttggatgcctctgcttcaagccgctcacactccagaaaaaactctttgtctctgttgtaa

SEQ ID NO: 78976 - DNA, 336 bp, Saccharomyces pastorianus
atggcttcttttgactatctgtttcatcccgtcgtaccttgcacaatctgtccagactgtcctctttacgaatcaccagccttcccgtcttcttgtcttcatcacccacgtttattgtttaatgataaagccttttgtcctttatttttggttccttttcccgcttcgtttacccggtggttaacctttctcttccatcttgtaatatataataacaaaatgcatcaccatacttacgcaccccatatacatgacctaacggcagctttagacacaacagctccccagaaaaaatgtccaaaagaaacactccaccgctcagatcatcagggataa

SEQ ID NO: 78977 - DNA, 1077 bp, Saccharomyces pastorianus
atgtccaaaagaaacactccaccgctcagatcatcagggataaacactattcaaataaatgctgctagagaaatgcacgctcaaacggtgcgcgctcgaagaatgcccatgccaactagcggcatcactacaccctctgtgcaaccaactgcagccccagcaacaccacctcgacatatttgcaataacccaaacaatccgcagtgtctccactgtgggtctgttatcattccatctccaagggccacgttacccttggaggacaacccctccatctccatcaacgactggaccatctcctccagaaagaagcccattttgaactcgcaggaattagacatctgggaaaacgaaaaactcaaaggtttgactttgccagagatgatttttggtaacaactacatcaggatcgaaaactcaaaacagcattggtccatagagttcaatgccctggatgctttaaaggaggttcaactccaggattcaggtattcgtgttgcgtactccaaacgactgataaattctacaaacaaacgaacaaaattacaactaatggtgcgcaacggttcactaacgaatgtgaacgacgatcccttaaatatcatacacaagtacgactggacctacactacgcggtataagggcacagagagctcacctgagtcgaaattccgactggataacgatcaaaagctgccccttgacaaactggccgtacacgataaaatcctattctatgacgacatgattcttttcgaagacgaattggcagacaatggcatatcaatccttaacgtcaaaataagagttatgaacgaaaggttactgctgctgagccggttctttttaagggtggacgatgttctggtgagggtctacgacaccaggatttacgtggagtttgacgaaaacgtagtgatcagagaatccaaggaatttgaaggtaaatatcaggatgtacttgctaagcaccggctatcccaatctcacgacccaaaagctgccttgagagatagtaattgggtagcacagaacacgccgatgatcaaaagacaatgtgaaataattcagttctaa

SEQ ID NO: 78978 - DNA, 354 bp, Saccharomyces pastorianus
atgatttttatacatataattaaaatgaaatcaagcttcaaccatttctctcaatcttctgatggtagatctaacggtggcggcagcagcagtggagacagtgtaagcaccaccagcgacggtcttcttacaacaggaacaagtccaaataccagcagcacctctcttgacggtcttcttaccacagaaagaacaatcgtatctagcgtgttgttggatttccaacttcttgacttgtcttctcaaagaggaaccataacggacaccgtacttaccagtgataccaaccttcttagttcttttagccctgtattcaaaaaagaaaaaatatcaaaatatgttagtaaatcttga

SEQ ID NO: 78979 - DNA, 1413 bp, Saccharomyces pastorianus
atgcagaatccttacggtcactttactaacaataccacggaggacagggaggcttcatctcaaggaggaccattcggccaaagcctgaataggcccctagattacgccggatctttcccttctctgacatacaataataataatttcattgccaatcaacaaccttctctgcctttgccagaaccacgtttatcttggaacaacgtcaaccaggtttctaaccctttgatggtaacaccgcttccgggattacaaaaacgtatgaacaaaaacattaaaaagaaattaccaagagtatctaagaaggcatcagccctttctaacggggtatccggcaatgtaatgagcaacagtaatatagtagggcatggtgctgtaggttcggcatcgggatggaaagttgaaatgggtggcagtgatgaattagagagaagaaagagaagggcagaaagattcagtcagggaccatcagcgacgacgaatagtaacgataatttgaatgaagactttgccaacctaaatgccattagtagcaaatctcatcaatatgacaaaaagattcatgtggtagggcgttgccaaactctagagaaatcttatctgagactaacttcagagcctaatcctgacttgatcagacccccaaatattctacaaaaaatgtattgcttgttaatggacaaataccaatctaaaacagccacttatacttacctttgcgaccagtttaaatcaatgagacaagacctaagagtgcaaatgatcgagaactctttcactattaaagtgtaccaaacgcatgcacgtattgccttggagaacggagatcttggggaatttaatcaatgtcaaaataggattatggcgttattcgaaaaccctacaataccaaaaaaatcttattccgaatttatatgctattctgttttgtattcgatgttaaccgaagactatccgtcgatttctcatttaaaacttaagttaatagacgatggctcttcggaaatcttggaggacgaacatgtcaaaatgatatttgagttgagcgatatgaaactagtcggcaattatcactacttcatgaaaaactacctaaaactgcacaaatttgaaaaatgtctaattaattcattcttaaatctagaaaagttgatatttttgaccataatttgtaagagttataaccaggtcaatttagattttgttaaaagtgagtttaatttcaacagtatagaagagacaacaaatttcttgaatgagcaaaacttgacggagttcatattaaacaaacaaatcactgacagtaatggcaaaagtagtaatatcaagattttgaataccaagggatgtagggtacagttgatacaaaattatatgaagtctaaaaaaattgatataaagggacaaaaatga

SEQ ID NO: 78980 - DNA, 546 bp, Saccharomyces pastorianus
atgacaaacagtagtgaaaaacaatgggaaagaatccagcaattagaaaaggagcacgtggaggtatatagagagttgttgatcacgttggacaggttgtacttgattagaagacacaatcatgcggtaatattaagccatactcaacagcgcctcttggaaattagacaccaacttcaaattaatcttgaaaagactgctcttcttattagactgttggagaaaccggacaataccaatgtattattcaccaagctacaaaacctcttagaagaaagcaattctctggactatgagctcttgcaatcgttaggtgctcaatcttcattgcacaaacagttgattgaatcaagagcagaacgcgacgaattgatgtcaaaactgattgagttatcgtcgaagtttcccaaaccaactataccgccagacgacagtgatactgctggaaaacaggttgaggtagaaaaggaaaatgaaacgatacaagaattgatgattgctttacagatacactccggatataccaacatatcctacacaatttga

SEQ ID NO: 78981 - DNA, 414 bp, Saccharomyces pastorianus
atgaaacccattccttcatataagtttagagccgccgaattttccacctctgtttctaacatgatctcatcgcaatgttccctttgcattttatctatggcaatttccactagtttctttgctatgccatgcccgcggtatgtggactctacggctagcattcctatatatcctctcagtctcacgtttctatgcgggtccatcttacacactatgcaaccaatgggtatgttaggcgttccactcttgttgtcaacggcaatgtacgttaactcgggccattggttcaagaaatacctatatacgtatatcgagtacggctctgatagatccgcatctattagttttttaatactagcaaactgctcttcgttacgtatgtccaatggcttgtacactatttccatgtcctga

SEQ ID NO: 78982 - DNA, 531 bp, Saccharomyces pastorianus
atggaaatagtgtacaagccattggacatacgtaacgaagagcagtttgctagtattaaaaaactaatagatgcggatctatcagagccgtactcgatatacgtatataggtatttcttgaaccaatggcccgagttaacgtacattgccgttgacaacaagagtggaacgcctaacatacccattggttgcatagtgtgtaagatggacccgcatagaaacgtgagactgagaggatatataggaatgctagccgtagagtccacataccgcgggcatggcatagcaaagaaactagtggaaattgccatagataaaatgcaaagggaacattgcgatgagatcatgttagaaacagaggtggaaaattcggcggctctaaacttatatgaaggaatgggtttcatcagaatgaaacggatgttccgctactacttgaatgaaggggacgcctttaaactgatattgccgttgactgaaaggagctgcactcggtctacgttcctaatgcacggccggctggccacataa

SEQ ID NO: 78983 - DNA, 282 bp, Saccharomyces pastorianus
atggccaccccaagagaacctaagaagagaaccactagaaagaagaaggacccaaatgcccctaagagggctttgtccgcctacatgtttttcgctaacgaaaacagagatattgttcgttctgaaaatccagatatcacatttggacaagtcggcaagaagttgggtgagaagtggaaggctctaacgccagaggaaaagcagccttacgaggccaaggcccaggccgataagaagagatatgaatccgaaaaggagttatataacgccactttggcttag

SEQ ID NO: 78984 - DNA, 456 bp, Saccharomyces pastorianus
atgatgtatcgcacgacgttaaatactgttcaagtgtcacaaattagtggcgccgaattctaccctcacgcctcgtcgcgcgcgatacttttcgaatcacccgccttttgccgcctatttttttcgccgttcgtttatttagcggtgggcaaacaaacaacacagtatttattactggtaccgactgttaaagaaggactgttttgggacgtgtttttttcctgtttttgctcaattgactaccctatacatagtaaagcacagtcgcaatggccaccccaagagaacctaagaagagaaccactagaaagaagaaggacccaaatgcccctaagagggctttgtccgcctacatgtttttcgctaacgaaaacagagatattgttcgttctgaaaatccagatatcacatttggacaagtcggcaagaagttgggtgagaagtggaaggctctaa

SEQ ID NO: 78985 - DNA, 1167 bp, Saccharomyces pastorianus
atgaatcgcacacttacagataataccagagccataaatgtggcctccaacctcggtgctcctcaacagaggacgatttttgccaaggagagaatatccatcccaggatactacgagataatccaattcctgggcaagggagcctatgggacagtgtgctcagtgaagtttaagggtcgaagcccagctgctaggatagcggtaaagaagatcagcaacatctttaataaggagatccttttgaaaagggccatccgtgagctaaaattcatgaacttcttcaagggccataaaaatattgtaaatctaatcgatctagagatagtgaccagctcgccctatgacggactgtattgctaccaggaactgattgattatgatttggcaaaagtcatacattcgtccgtgcagctctcggagtttcatatcaaatactttctttaccaaatcctgtgtgggctaaagtacatacacagtgcagatgtcatccaccgagatttgaagcctgggaacatattgtgcacattgaatggctgtttgaagatctgcgattttggtctcgctaggggtattcatgccggatttttcaagtgtcattccactgtgcagccccatataaccaactacgttgctacaagatggtacagggcgcctgagctgcttctttccaaccaaccgtatagtaagtccgtagacatatgggctgtagggtgcattcttgcagaattctatgctcgaaagcctgttttcatggggcgtgactccatgcaccagatatttgaaatcatcaaagtcttgggtactcctgataaagatattctgatcaagtttggcaccattaaagcttggaatctaggcaaaaacagtaataaccctgtatataaaaaaatcccatggtccaacattttcccctttgcctcgcatgaagcaatcaatctcatagagtcattacttcattgggactcaacacataggttaaacgtggaacaagctatatcacatccgttcctaaacgaggtgcggaagccagacgacgagcctgtttgccttcaaggtcctttcgacttcacctatgaatccgagttgaattcaatgtccaaattaagagactacttggttgaagaagtgaaaaatttcaaaaccgatttgtcctcctcgtctttataa

SEQ ID NO: 78986 - DNA, 1017 bp, Saccharomyces pastorianus
atggatgcaatatctgatccaacgtttaagcatgctagatcaagaaaacaggttactgaagaatcaccatctttgcttaccgttattatagaaattgcaccaaagttatggacaacttttgatgaggaaggaaatgagaaaggaagtataataaaggttttagaggcattgatagtatttctcaatgctcacttagcgttcaatagcgccaacaaagtagcagtcattgctgcatactctcagggaatcaaatatttatacccagagagcacatctgctctaaaagcctctgaatctgaaaataaaacccgtagtgatcttaagattattaactcagatatgtatagacgttttagaaacgttgatgagacgctagtggaagaaatatataaactatttgagttagaaaagaaacaaatcgaacaaaatagtcaaaggagcacgctagcaggtgccatgtcagctgggctgacttatgtaaacagaatatcaaaagagtcagtaactacctcattaaaatcaaggctacttgttcttacgtgcgggagtggcagtagtaaagatgaaattttccaatacatccctataatgaactgtattttttccgcaacaaaaatgaaatgtcccattgatgtcgtaaagattggtggttctaaggaaagcacgtttttacagcaaacgacggatgccacaaatggcgtttatttacatgttgaatctacagaagggctaattcaatatttagcaactgcaatgtttattgatccgtcgttaagacctataattgttaagccaaaccatggatctgtagattttaggacatcatgctatttaacagggagagttgttgccgttggattcatctgttcagtttgcctatgtgtcttatcaatcataccgcccggaaataaatgtcctgcttgtgattctcaatttgatgagcacgtaattgccaagttgaagaggaaaccagttgttccaaggttgaaagcccaaaagaaggtgacgaaaccatga

SEQ ID NO: 78987 - DNA, 387 bp, Saccharomyces pastorianus
atggctcataaattctataggaattatcaacccaataacctcatcgctaattcaaaagtagcaaaagtggcaccattggcgggagcagctcttagcatggtaggaccaaaccctttgaaaaaagcgcctatccctccattggcatataaagtcttggctacactggaaatagaattaccaaatttaggcttttgtaaattatccgtttgcatgacagacttgatgacatctaatggatataccatcaaccataaggcagtgccagacaatgctccaaaaatacaaagtttccatgcaggaatgtcctttctctctagtccacgtcttttgttcatttggttagcaatcaacgcttcatacactaagaaatatgtgccacatccatga

SEQ ID NO: 78988 - DNA, 771 bp, Saccharomyces pastorianus
atggatttcacaaaaccagaaactgttttaaatctacaaaatattagagatgaattagttagaatggaggattcgatcatcttcaaatttattgagagatcgcatttcgccacatgtccttcagtttatgaggcaaaccatccaggtttagaaattccgaattttaaaggatctttcttggattgggctctttcaaatcttgaaattgcgcattctcgcatcagaagattcgaatcacctgatgaaactcccttctttcctgacaagattcagaaatcattcttaccgagcattaactacccacaaattttggcgccttatgccccagaagttaattacaatgataaaataaaaaaagtttatattgaaaagattataccattaatttcgaaaagagatggtgatgataagaataacttcggttctgttgccactagagatatagaatgtttgcaaagcttgagtaggagaatccactttggcaagtttgttgctgaagccaagttccaatcggatatcccgctatacacaaagctgatcaaaagtaaagatgtcgaggggataatgaagaatatcaccaattctgccgttgaagaaaagattctagaaagattaactaagaaggctgaagtctatggtgtggaccctaccaacgagtcaggtgaaagaaggattactccagaatatttggtaaaaatttataaggaaattgttatacctatcactaaggaagttgaggtggaatacttgctaagaaggttggaagagtaa

SEQ ID NO: 78989 - DNA, 477 bp, Saccharomyces pastorianus
atggtgacagggggaatgtcaagcaagtgggatcagaagggtatggacattgcctatgaggaggcggccttaggttacaaagagggtggtgttcctattggcggatgtcttatcaataacaaagacggaagtgttctcggtcgtggtcacaacatgagatttcaaaagggatccgccacactacatggtgagatctccactttggaaaactgtgggagattagagggcaaagtgtacaaagataccactttgtatacgacgctgtctccatgcgacatgtgtacaggtgccatcatcatgtatggtattccacgctgtgttgtcggtgagaacgttaatttcaaaagtaagggcgagaaatatttacaaactagaggtcacgaggttgttgttgttgacgatgagaggtgtaaaaagatcatgaaacaatttatcgatgaaagacctcaggattggtttgaagatattggtgagtag

SEQ ID NO: 78990 - DNA, 420 bp, Saccharomyces pastorianus
atgaagtcatgtgtgcttagcaattacgtagagggattagaaataatagtgtgcggttatcggaaccggctcttgttcccgtttagagcaacccaggtgcaggcgtactttaaagtgttttctttcttttttttcctgctacttacgctaggagctgccgcagctgcaaagccgacgtcggagaggcaggtgatcttcggctcggccgacaaatcccctggatatcattggcctgtcgaggtatcggccgcgtggaactaccgggaattactatgcaaaacaattggaaatctggtaggaaaaccttgttctagaacttggcgattgctgacaaagaagaaaagggcctcttgttgctgcctcttttgttgttcttcctcgtattgtcttgccggtgttctttgtgtcttatgtgtgtag

SEQ ID NO: 78991 - DNA, 1107 bp, Saccharomyces pastorianus
atgaatcctaaatcctctacacctaagattccaagacccaagaacgcatttattctgttcagacagcactaccacaggatcttaatagacgaatggaccgctcaaggtgtggaaataccccataattcaaacatttctaaaattattggtacgaagtggaagggcttacaaccggaagataaggcacactgggaaaatctagcgaagaaggagaaactagaacatgaaaggaagtatcctgaatacaaatacaagccggtaagaaagtctgagaagaagcaactacttttgaaggaaatcgagcaacagcagcagcaacaacagaaagaacagcagcagcagaaacagtcacagccgcaattacaacagccctttaacaacaatatagttcttatgaaaagagcacattctctttcaccatcttcctcggtgtcaagctcgaacagctatcagttccaattgaacaatgatcttaagaggttgcctattccttctgttaatacttctaactatatggtctccagatctttaagtggactacctttgacgcatgataagacggcaagagacctaccacagctgtcatctcaactaaattctattccatattactcagctccacacgacccttcaacgagacatcattacctcaacgtcgctcaagctcaaccaagggctaactcgacccctcaattgccctttatttcatccattatcaacaacagcagtcaaacaccggtaactacaactaccacatccacaacaactgcgacatcttctcctgggaaattctcctcttctccgaactcctctgtactggagaacaacagattcaacagtatcaacaattcaaatcaatatttacctccccctctattaccttctctgcaagattttcaactggatcagtaccagcagctaaagcagatgggaccaacttatattgtcaaaccactgtctcacaccaggaacaatctattgtccacaactacccctacgcatcatcacattcctcatataccaaaccaaaacattcctctacatcaaattataaactcaagcaacactgaggtcaccgctaaaactagcctagtttctccgaaatga

SEQ ID NO: 78992 - DNA, 900 bp, Saccharomyces pastorianus
atggactgcaagatattggtgttaggcgcaggtggtctaggatgcgaaatcctgaagaatttgacaatgttaagctttgttaaacaggttcatattgtagatatagacacaatcgagctaaccaaccttaatagacaatttcttttttgtgataaggacataggcaaaccgaaagctcaagtggcagcccagtatgtaaacacgcggttccctcaattggaagttgtggcgcacgtacaggacctgaccactttgcccccgagcttttacaaagacttccagttcataatctcggggctggacgccattgaacctcgtcgcttcatcaatgagactctcgtgaagcttaccttggagtccaattatgaaatttgcatcccgttcatagatggtggaacagaggggctcaagggacatgtaaaaacaatcattccaggcatcactgcatgctgggagtgctccattgataccttgccctcgcagcaggatactgtgccaatgtgtacaatcgccaacaatcctcgctgcattgagcatgttgtggagtatgtctcaactatacaataccctgatttaaatattgagtctacggcggatgtggaatttctgctggagaagtgctgcgaaagggctgcccaatttagcatctcaacagaaaaattatcaacaagttttatcctgggtataataaagagtatcatacctagtgtaagcactacgaatgcgatggttgcagcgacatgctgtacgcagatggttaagatttataatgatttaatcgacctggaaaacggcaataatttcactttgattaactgctcagaagggtgttttatgtacagtttcaagttcgagcggttacccgactgtactgtttgttcaaattccaattccaactag

SEQ ID NO: 78993 - DNA, 558 bp, Saccharomyces pastorianus
atgcaggctaaattattgtttaccagactaaactttagacgtccctccacaactttacgccagtttcccctaacatgttttttatttcatagcaaagcattttactcggatctggtcactaaggagccgttgatcacaccgaaaagaataataaataagacgcctgggttaaacttatctatttctgagagggcttccaacagactagctgagatctaccgcaatagtaaggaaaatttaagaattagtgtggaaagtggtggatgtcacggtttccagtacaatctaactctagaacccgctaccaagccagatattaagaatgatgtcaaagacaaggagttttcagacgaccttgacgatgatgattccaaggatataatatacgtgttacccgaagataagggtcgagtgataattgatagtaaatcactaaacattttgaataacactacactgacatacactaatgagttgatcggttcttcgttcaaaatcatcaatggtagcctaaaaagtagttgtggttgtggaagtagttttgatattgaaaattaa

SEQ ID NO: 78994 - DNA, 636 bp, Saccharomyces pastorianus
atgcaaaacggcacagaagacaaaagcaatattcctgctcgtagtaatgatgatgtattgccgccgttagccgtcaggcttactatgaaagtaatgcgattaattttcatcggaaaaatgtttgaatattcatttgtaccctttcccccatttagccttttgacatttgataataatgtgggctggttcatagcatattcagcgatcgtttctatttgggggtttgctgtgtggatggaaagagcatatagaaataagattaatctacagcctccaagatgtacgaagataatatgctctcgctgcaatacaagaataaaatcccctaagtggttcaaatataaaaattggttatattttttcctattatacgtttctctaaccatttctaacttaagaattcaactggccttttttataacagaaatgagtcgtcagggtataagcgttcctggaatgaaggaaccagacaacagagattattcagcgcttatcatgtcaacgcgaattattggtgcattaatccattacatgacggctcatttattcaaagagtattatttacataacggcccactagaaaagaatgatagaacttctaccgatgagaagacatcagagaatgaaacgctatag

SEQ ID NO: 78995 - DNA, 1083 bp, Saccharomyces pastorianus
atgtcgagctcctccaaggcttctgcaagttcatccttgtcaagcacagccacctcttcaacttctgcaactagaggcagcgacggatgtgttgtttgcgattcaactgcatcatgccctgtttgcgcttcaggagaatattgtgttatgacttcattaacatgtgacaagtgcccatccacatactgtgcgaaacagtccgattcacaactgagtagtttatcttcctcctcctctagttctagttccagtaattcaaatgagaaaacctcgttgattgtggggttcaccgtgggtattgtaggtggtgcgatgcttattgccttggtggcgttgtatttcatcaacaagagatattggaagcccaaaaggcaaaaaaataaagctttgaaattggaagaggcatcgcaaagttacgggaatgaagaggaatacttcgacgatgaagacgatgatgatgaagacgatgaggatgatggcggtatgagaaaagatgaaagtcacactctgttcaatacgtcactggtacctccaactctcaacgtgccgggaaacagaagttcagcatctaccactcgtacaagggcttctaatattttgcctattgcctacattcctggtgtgacaagcggtttgagtaccgacaaactgcaatcaaaactacgctcgagctctaagagacaaaatgcagctggtgatatcaggtcacatataaccttaggttcttccatcttggatggtctggatgacgaagatgacgagcataaccaggtactcaataaggacgcagacgataacctcataactgctattcgtgctaaacctaaactggttcaaatcgcagaggaagagagtgataaggagattcaggacttggatgtcattgaagaacagacagaggcggatgatctttcacacatggcaaaaagcgaggcaagccatggtaataacgacgaagatgacgatgaagaaggaagttttatactggacttggaaattccagaatcgatacgcgagagcacccagggcagtcgcactgagagcccgtttgaggacaagttcgaaatacacgatgaacgataa

SEQ ID NO: 78996 - DNA, 375 bp, Saccharomyces pastorianus
atgaaatacaacgccaccaaggcaataagcatcgcaccacctacaatacccacggtgaaccccacaatcaacgaggttttctcatttgaattactggaactagaactagaggaggaggaagataaactactcagttgtgaatcggactgtttcgcacagtatgtggatgggcacttgtcacatgttaatgaagtcataacacaatattctcctgaagcgcaaacagggcatgatgcagttgaatcgcaaacaacacatccgtcgctgcctctagttgcagaagttgaagaggtggctgtgcttgacaaggatgaacttgcagaagccttggaggagctcgacattttttgtttgattttcagaaaacgaacgtaa

SEQ ID NO: 78997 - DNA, 372 bp, Saccharomyces pastorianus
atgtcaggacttctcttgatatgctcggctctgaaaagagtagttctaaaaataacagcggtggtatgttccgtattttccataagagtgctaattttggcgacaaaaatcaagaaaacgtgccacgagtgtgggacacacttagaaataatttgggaagggaaatttatcttttgcaaggaagattcaaaaaatggactacaaagcatcaaaatcttaagaagggccaaccttgtaaagatgaagacgccgttaccgttcccttaccatcatctgatccgggaaaggaaacacagttggaaactaaactctgttttgtgcccgaaccaggtgatcagcctttggtacaagcataaccgtgtaaaaggttaa

SEQ ID NO: 78998 - DNA, 432 bp, Saccharomyces pastorianus
atggctagtgttttgttgcctcaattgcgtacgggatggcatgtggatcaggctattgttaccgagactaaacgacttgttgtcattcgttttggtcgcaaaaatgatagacaatgtatgatcatggacgagttgttatcttcgattgctgaaagagtaaggaactttgcagttatttatttatgtgatatagatgaagtttcagattttgatgagatgtacgagctgacggatcccatgacagtaatgtttttctaccagaataagcacatgatgtgtgattttggtacagggaacaacaacaagttgaactttattgtagacgacaaacaagaaatgattgacatattagaaactatattcagaggtgccaggaagaacaaagggctggtggtctctccatacgattataatcataagcgtgtttcataa

SEQ ID NO: 78999 - DNA, 1740 bp, Saccharomyces pastorianus
atggatgaaaacggtacagtaaagcctggctatgaattaaagggactcaattcgggaaattcgaggtcaaatatggataaggatcccatcgttagcaaatttcatagggctggtctcaatgattctgcagacgaggaagatactgatatcaatggtaatcgcaacactagctggataacttcaatgattagtgaagaaaaacgcaaggtggagggaaaatctatgctgaatgatgaggaagatttgcatttatccaaagctactttgaacaaatgcgatgctctagttaagatattagcggatattatcaagctagagtttgttattcaccaatcatggtatatcagatcccttcacaagagtgtcttaattcaatttgaagtagaaacgtctggtggaaataagaatagcgccggtgatagcggcgacgatgatgatgataatcataatggtaatctggacgatagcttttataaagatttaagcttaaaatgcatcaaaaaatgcgagaagtcttcccttgcacttgagtcgctgtcaagggacattgaccaaattagagatttcataatgtccaatacaatagaagacaacagggttgacaggcttttgcagaattcgatgaccctgttattagagtgttggatctactctatgaagagattgcgccgtctaaggatgaagattgcaggtatctttgttaggtccaaacttttgcttattgatcatgaattagtgaccatatggcattttttacaggagcaaaacgagcacgaaacggttaataatgagaacgaactgaaattggcagaaacaataaaatcatacagagcgttcattaagatatttattcaacaattggaggactccgaatcgggatctccatcctcctctttgtttgaagaatgtttacacgtttttttggatatagaatcgatgtacaactctttaaacctgaattggcttttgaacgaaaacaaagcattacaagaaagactactatcaccatcgtcgacatcggagaacgatcatactaataaccttcccgttattgatgagacaaaggaaatcgaagatatcagctcatttgtcaatagcattgtggatgcatccatgttgacacatgatttgactcctattaactcatcagatagcgacaatttatcaaacggagaaatcgatcgtctagatggaagaaggttatcctcttccacgtcagatatgtcattgatgatgcaaaggacttctctgcagaaacaacttcctagcttattaactgccttcaacaacgcaagaagactagaacaagaattgcaaaacgcatgcaaagtaaacgataacaaacatagcacgaaagatactgattcaaatatacgacggaatgaacatgctatgtcttcaagtgtatcctccatcatctcccaaaactccacattagcatcaccgtctcctccgatgtcatcgtcctttatatccacggcgccatcacaatcaagttctcgtatgagtacattaccactgtctccttcctcttcattattggaatcacaatcgcaaacgctgaagaacaatatgtcgcaatggttgaaccaatcgcgatctggcctcaacggcacaaaacttattccaacaaaccacattgggtttcacagcaatgttctgaatactttgtatggtatcggtggtggtccggtatcgaaatcttataaatccaatcaaccttcttcacaaaatacttga

SEQ ID NO: 79000 - DNA, 1347 bp, Saccharomyces pastorianus
atgggcgtagaacacatgagaggctttagtaatgagataatcctgaagagaacgttgactttatccgatttcaccttacgttaccataaaaggggcatcacagctttgcaggtcatcaaagcaccgtcagtttcgaatgtgccagtcttgttatccggtgataactacggttatttcgttatgtgggacctggtgaccaagagaccgattacacatatggaaatcgagggcaactcgcacattatagcgttttggtgggtggaaactaccaatgtgctgtacattctttcgaaagactccatgctgcgaatttttgagcttgattcatctacacaacgatctatagatttagttagaaagcttagccaagccaataaaacggatcatttacaatggactaaaatctatgaaatgcccataaacacactgaattttgcgaatttcatcatcgaagctgaagtgaaaccaaccaaagataataaaagttatagattggtttgctgtcatactgatgattcggaaactatcgatatatatcagataatagaagactccacatttaaattgaaaagaccattcaataatattaatttccccagattcttgaagcagcagaattttttaggaatttcgaaagactccaaattcggtatcataatgagatttgctaaattaaacgatgtcatatttttaggttatgaaaatgggtttgtagtcggatttaaaattacttttgatgaaggccttcaaagggacattgcagaactggtccatgtttctaacgatcattatccgaatccaatacttgatatgtgtgttagcggggatgaactttatagttgttcaacagacgatttcataaccaagtacaaaattccagtgaacttacaacttgagacgaaataccttagagatgatgcgcttttgataaaatgcccaagctcactgagagtcagtgagccatcaaaagtacatcttcccttgaagaatattggtcatattgataaagtaaaagacgattacttagtcgtgagtagttggtcaggtatgaccattgtttataatatgcggacttcagaagtggagcaaacttttgtgaaatcaaagaacaacctggtcgtgagtgatagctctatgggagacctaacaaacggtagcggctcaaataccgaatccagctcgaaatcccataactataaagtgggagccatgacatgtttggaatcgtttgatgtgcagtcagatgggttgaggttaggacaacttagacgtattaaagcgctggcgaaatgtaactggtgtttaattggatatgaagatggtaccataaagctcaataaaatataa

SEQ ID NO: 79001 - DNA, 1038 bp, Saccharomyces pastorianus
atgatgactagggagagcatagataaaagagcaggaagaaggggtcctaatctgaatattgtgctgacgtgtccggagtgcaaagtctacccaccaaaaatcgttgaaagatttagtgaaggggatgttgtatgtgctctatgtggtctagtactatcagataaactggttgacaccaggtcggagtggagaacgttttcaaatgatgatcacaacggtgatgacccaagtcgtgttggtgaggcttcaaatcctcttttagatgggaataacctatctacaaggatcggaaagggtgaaaccacggatatgagattcaccaaagaactgaataaggcacaaggaaaaaatgtgatggataaaaaggataatgaagtacaagctgcatttgctaagattaccatgctatgtgatgctgctgaattaccgaagattgtgaaagattgtgccaaggaagcatataaactttgccacgatgaaaaaactttgaaggggaaatcaatggagagtataatggctgcatccatactgattggttgcagacgtgctgaagtggcaaggacttttaaagaaatccagtcattaatccatgtcaaaactaaagagtttggtaaaactttaaacataatgaagaacattttaagaggcaagagcgaagatggtttcttgaagattgataccgataatatgagtggtgcacagaacctaacttatatacccaggttttgttcgcatctgggcttaccgatgcaagtcactacttctgctgaatataccgcaaagaaatgtaaagagatcaaagaaattgcaggtaaatcccctattactatcgctgttgtttccatctatctaaacatcctgctctttcagatccctattaccgcagcgaaagtgggccaaaccttgcaagttactgaaggtaccatcaaatctggttacaagatactttatgagcatagagacaagcttgtggatccgcagcttattgctaatggtgtagtgtctttggatagcttaccgggcgttgaaaagaaataa

SEQ ID NO: 79002 - DNA, 303 bp, Saccharomyces pastorianus
atgagaagtgaaacaggcgtaagcattaaaaacccaaggccatctcgtcctttttcttgtattaggcgtaaaggagatgttgaaaatattaggaaaagtgatatagggaacgaaaagaaaatagacgctaagttcaacaggcttcagtataatctatattacaagcctctctcgcaccacaaggccggtttattgtacaaagacctcttcttcagaagctgcttctcttatactacctgctcattagactttcagggtaaaaggcaccaagtggaaagaaaggcagtagatatagtactttga

SEQ ID NO: 79003 - DNA, 357 bp, Saccharomyces pastorianus
atgtctccatcagaatccttcaatagctttagcttgttttctacattgtcaatgttcaagtttctcacacaaataactttttcacgcccatttgtgtattctgccctcaacaaaggatgtccagacttcctcatcacttcaaactgtatccatgggaactcctggccccatttatctaatctctttgaagtcaaaaatttcctcatgccttccgaagaccctccccagttacagaattgcaaagtaatctttctgcatggaaacacgaatgctccaactccattacgacctatggaatttcgtgcaatagctttcacaaccatttctccatatattcgtgtctgtgtatctacttag

SEQ ID NO: 79004 - DNA, 423 bp, Saccharomyces pastorianus
atggttgtgaaagctattgcacgaaattccataggtcgtaatggagttggagcattcgtgtttccatgcagaaagattactttgcaattctgtaactggggagggtcttcggaaggcatgaggaaatttttgacttcaaagagattagataaatggggccaggagttcccatggatacagtttgaagtgatgaggaagtctggacatcctttgttgagggcagaatacacaaatgggcgtgaaaaagttatttgtgtgagaaacttgaacattgacaatgtagaaaacaagctaaagctattgaaggattctgatggagacattttacgcagaagaacaaagaatgataacgtggaaagcttgaacagtagtgtgaggggtatatggtcgcctctgcatgctgcgaaaaggcatagaatttag

SEQ ID NO: 79005 - DNA, 528 bp, Saccharomyces pastorianus
atggacggccttagctttgtagataaagggaaaataccagatggttacaaaaatgaaatagatcaattagtaaagaaggaatttgcgaatataaaaagagagcctgttcatcccgaaatacgaggtatacttgcgaagagaaagggggccgataatagtgtttctacgcttacaaatgcattgtacaccgaatacttgaaacaacgtaataacaaaaaaaggcgaacaccggattttaatgacgacgatgatactttatttttggaagagtatagaaggaaatacccgaggattgatacttccagatacataccgaacgagttttccgaagttagcttgttaggaattgtagattcttatttaaaacatcaggaaatagttttggatacacttctaccgcaaacggtatcgaaccaatggagaattaataatgattatattcgtcaaacgtgtactatagtggaagaaatgaacatccagcagaggaaacaaattaacgatttggaaatatacagaaagaggttataa

SEQ ID NO: 79006 - DNA, 864 bp, Saccharomyces pastorianus
atgcaagctattgccgatagtttcagtgtaccaaacagattggttaaggaacttcaatatgacaacgaacaaaacttagagagcgatttcgtaacgggcgcctcccagtttcaacgtttggcaccatcgcttacggttccaccaattgcgtctccacagcagtttttaagagcacacacagatgattcacgaaacccagactgtaaaatcaagatcgcacatggtactacaaccttagcatttagatttcaaggcggtattattgtggcagtagattctcgtgccactgccggcaattgggttgcttctcaaactgtgaagaaagttattgagatcaacccatttttattgggtacaatggctggtggtgcggcagattgtcaattttgggaaacttggctaggttctcagtgtaggctgcacgagctgagggaaaaggaacgtatatctgtcgcagccgcatccaagattttaagcaatttagtataccaatataaaggggccggtttatcaatgggtactatgatctgtggttacactaggaaggagggcccaaccatttattacgtcgactcagacggtacaagattaaaaggtgacatattctgcgttggttcaggtcaaacatttgcatatggtgttctagactctaactataaatgggatttatccgttgaagatgctttatatctaggtaagagatctattttagctgctgcccatagagatgcttactctggtggttctgtaaatttatatcatgttaccgaggatggttggatatatcacggtaatcatgacgtaggtgaactattttggaaggtcaaggaagaggaaggatctttcaacaacgttattggctaa

SEQ ID NO: 79007 - DNA, 2586 bp, Saccharomyces pastorianus
atggaagggcaaaaatcgaatgcatcatgggagagctcgatcatcgagggccaattgtctaaaaatctagcaaggtacaccttgttattagacaaattatcgacactatctcaaatagacaagctgtctgaagtgatagccaatgattacgcaaaacaatctaaacaattaaatgcatttgtgcaacagtcgcaatcatcgctcaacaaagagtcccggaaattagaattacaaagaactaaccttacgactactttgactcagtttcatgagactgtggccaccatttcttcttcgaacgcaagagcaaaagctatacatgacgatattgaaactgtagatcaggaacgcgctttggtcaacaaaacgttacaatttgtaaaagacgtcaggacgctaaagaataatatttcactggcgcattctgctttagaaacaaaggattacttagttgctgcgacagcaatcaatgaaattagaagccttccggataaaaaacttattgtatccgagtttgccaagaaagttgtgccctcgagtgaaattcccgaagaaccagccatactaataaagaattggtgtaaggaactgacaagtttatttcaggagcaattcatggaagcaacaagaacacaggatattaaagagctaaccttaatgttcaaaatgttccctatgattgggcaggacgtacttggtttagacctgtattccaaatatgtctgtgatattattgcggacgaaagcaggaaaattatgtcgaattctatggaaaacagcaccaagtttcaaggatttttttcacaagtactattacatctttttaaaattgtatcgaccatcataaatgatcattcaaaagtcatcgccacgtgttatggaaaaaagcacatggtgcatgtcatggaaaaagtagaaaaagaagctgatcttcaagctagtttgattctagatatttttatggagacaaggaaaatagaaaggactatacatgatataaatgaatgggaacattcacaaaagaatgaagatgtgaatataggcagtaatcagtcggatatcgaaacagacggagaaacggaaaagagctcaattatatccattcatgacttggcattattgataatggaattttctcaaatacttcaaaattggtccatgtattctagattttattcagttaaatggaatgaatttagcgatttgcatccgcatgtattgcaaccacctccaccaatagcagatggtaaatttgccttaaagttaaagcaagataaggtctttgatgagtttcaggtgtttgtgttgaaccatctgcagagatcattcagaaatagtatttcactagaagaattaccgtcactgaacgatcttataactgctgttcccctcaatgaccacgataacatttcataccctgtaacatctgttttagatgacttaattttattagttcggaaaaatctgatatcagtggttaatactggccagtttaagctcttagcaagttttttgaacgagttggtaaaattttttcagaaccgatttctggtaaaatttatgcaaaacaaatttaagttactacaatcgaaactagcctccaatgtatctttgaaaagatacattccaaaaggtgaggagcaatctgcaacatcaagatcggtttctccacctgcaaataagttttctccgctaagcaggttcacttttagaggggcagcagctagcgctttgacaaatattcaatcaaatttacaagccgtagttgcagaggacgaggattccattcttgcgttgcaccattatttgatatatctgaacacgttgtacttgagtaaagtatacgttcacaggctgttatccatagaaatattagaagacgattcgcaaaggattttgagagacaatttcccttttgacaatgatgcagcgcagttacagaatttaattataaactcagaaaaattagtcctggaacaaacagataagctaagcaaatgggctgtcaaatacttgttccaaaatatcctacaaaatagggttcggaacttattgggaactgtttttgttaattcagcctcatcaaattcctcaacgtccaatcaaaaaaatgtgtctcgcgattattctgcaggttcgaaccaaaagaattacatcacaagcatagaagatttcgaagatttgtcgcaaattaacagtttcaatagcaaatggaaccaattgattatcccttacaaaaatattcttcacaacgaagcatatgcagagttgctatctgtcatagtcgactacatcgtaacaacattggagcaaagaatatggactctagaattcaatgaacttggtgttacgaaattagatagagaactgagccttttcatcggcaatatgtgtggcttgaactataatctcagagagaagttcttgaaattgacacaaatcgtgttgcttctcggtttagatgatgacaattttgatttgactacaggtgatatcaaggatgacttcaatggtactttcgattgggtgataaactctcaggaaagaattaaagctagaaatatgaagattgatagaatacagtaa

SEQ ID NO: 79008 - DNA, 627 bp, Saccharomyces pastorianus
atgagcctaattcaccccgatacagcaaaatatccttttaaatttgaacctttcctcaggcaagagtattcgttttcactcgatcctgacagacctatttgtgaattttacaattctagagaaggccctaaatcatgtccgaggggaccgttatgtccaaaaaagcatgtgttaccaatatttcagaataaaattgtttgtagacattggcttcgagggttgtgcaaaaagaatgaccaatgtgaatacttacatgaatacaaccttcgaaaaatgcctgaatgtgtcttcttcagcaaaaacgggtactgtacacaaagtccagattgtcaatatctacacatagatcccgctagcaagataccaaaatgtgaaaattacgaaatgggattctgtcctctggggagttcttgtcctagacggcatattaagaaggttttctgtcaaagatacatgaccggattttgtcctttagggaaggatgaatgtgatatggaacatccacagttcataatcccagatgaaggtagtaaattaagaattaagagagacgatgagataaataccaggaaaatggatgaagaaaaggaaaggcgtttaaacgcaattataaacggtgaagtttga

SEQ ID NO: 79009 - DNA, 213 bp, Saccharomyces pastorianus
atgaaatcactccatgatagtttaagtgttacagacattaagagaagtcggctgcaaatttccatgcagacactttgtcccatcttggaggataccctacagtgtaaaagcctccttagcttagtggtagagcgttgcacttgtaatgcaaaggtcgttagttcaattctgacaggtggcaaaattttttccctaaagttaacacttatttag

SEQ ID NO: 79010 - DNA, 885 bp, Saccharomyces pastorianus
atggataattttgaaagtactgctgaaggaaatttaagtataggaaacaaacgagtatacgaactacgaaaaagaaacttccaaagaaatttggtgaataatttgagctttctcgggtatgttttaatatcattggaatatatcaagtatgatcgtaccgtctggacacttataacaagagcaatagtgcaatctctcataagttctccttttccaagtgatgccaagttacgtaggctagcgaccatcggtgcagataataacacgacgggggttgcaacacttccaggcggaagatctatcaggtttcccggaatgtttggaacagaaatgctttataattcttctagtgaagctgagcaacaagaccatgatgataccgctattgtgtccatgaaaaagcaaatccggaagtttttatttcatggttgcttatcgttgaatatgcttttcattatcttaacaatcctattcccaattgatttttttgaacccctgagtggtagcgagccagtagacgatggccctaagaatactccctcacccttttccaattcagatggtctacttttgggtgagagaagaggtgggctttttctacagatgatcggagaacggctaccaaagagcaacttttccggcaatcttggattagtaatgttcgaatttagcatacttattgtacagtttactttattttcactaacatgtgttgtattggcagatttagattttgaagagccagaaagactagaacctgtaaatagtgatggctacgatggctctgtaatagttgcacgaataccattaaataaaaccatgaatgccattttaaatgacggcaatattaatgacaacaatgagaatgctagcaattctgtctaa

SEQ ID NO: 79011 - DNA, 1008 bp, Saccharomyces pastorianus
atgtcaaatattgtgggtattgaatataaccgtgtaacgaatacaacctccacggattttcctggtttctcgaaggatgcagaaaacgagtggaatgtggaaaaattcaaaaaggacttcgaagtcaatatttcgtcattagacgcaagagagacaaatttcgacttgataaacattgacacatcgattgcgaatgcctttcgtcgtataatgatttccgaggttccatccgtggctgctgaatacgtctatttttttaacaatacatccgttatccaagatgaggttttggctcatagaataggtttggttccattaaaagttgaccctgatatgctcacatgggttgatagtaatttgccggacgatgaaaagtttacggatgaaaatactatcgttttgagtttgaacgtgaagtgcacaagaaatccagatgctccaaagggatctactgatccaaaggaactatataacaatgcccatgtctacgcccgtgatttgaagtttgaaccacagggcagacaatctaccacttttgctgattgtccggttgttccagctgatcctgatattttattagctaagctaaggcctggtcaagaaatttcgttgaaggcacattgcattttaggtatcggtggtgatcatgctaaattttcaccagtttccaccgcttcttatagattattacctcaaatcaatatcttacagccaatcaaaggtgaaagtgccagaagatttcaaaaatgttttcccccaggtgttattggtattgatgaaggttcagatgaagcgtatgtcaaagatgctaggaaggatacggtttccagggaggttttaagatacgaagagtttgctgataaagttaaattaggaagagtgaggaaccactttattttcaacgtagaaagctctggtgccatgacaccagaagaaatttttttcaaatctgtcagaattttaaagaataaggctgagtatttgaaaaactgtccaattacccaatga

SEQ ID NO: 79012 - DNA, 1695 bp, Saccharomyces pastorianus
atgttttcacgaagtgatcgagaggtagatgatttggctggtaatatgagtcatttagggttctatgatttgaatattcctaaacctacttctccacaggcgcaatataggcctgctagaaagagcgaaaatggaagattaactcccggacttccaagatcatataagccgtgtgattcaggtgatcaagataccttcaaaaatcgcatttcattgaatcactcaccgaagaagctacccaaggattttcacgagcgtgcttcccaaagtaaaacccagagagttgttaatgtatgccaactttactttctcgactattactgtgacatgtttgattatgttattagcagaagacaacgtacgaagcaggtgctaagatatcttgaacagcaaagaagtgtcaaaaacgtttctaataaggttttaaatgaagaatgggctttgtatttgcaaagagaacacgaagtactgagaaaaaggaggttgaaacctaagcacaaggattttcagatactgacacaagttggacagggtggttatgggcaagtttatcttgcaaaaaaaaaagacagtgatgaaatttgtgctttgaaaatattaaacaagaaacttttattcaaactaaacgagacgaatcacgtccttactgagagggacatactaaccacaactagatctgactggcttgtgaagttgctttatgcatttcaggatccagagagcctatatttagcaatggaatttgtacctggtggtgattttcgcacattgttaataaatacaaggatattgaagagcggtcacgcaaggttctatatcagcgaaatgttttgtgccgtgaacgcgttgcatgaacttggttacactcaccgggatttaaagccggagaatttcttgattgatgctacagggcatatcaagctgaccgattttggtctagcagcagggaccgtatcaaatgaaagaatcgaaagcatgaaaatacgcttagaagaagtaaagaatttggaatttcctgctttcacagaaaggtctatcgaggatagaaggaaaatatatcataacatgaggaagacagaaattaattacgctaattctatggtcggttcgcctgattatatggccctagaagttctggaaggtaaaaaatacgattttacagtggattattggtcattgggctgtatgctttttgaaagtttggttggatatacaccttttagtggttcttctactaatgaaacttacgagaatttaagatattggaaaaaaactttaagaaggccccgtactgaggatagaagagcagcattctcagatagaacctgggatttaattacaagattaatagctgaccccatcaacagagtacgatcttttgagcaagttcgcaaaatgtcttatttcgcagagatcaattttgaaaccctaagaacaagttctccaccatttattcctcaattagatgatgaaacggatgcaggttatttcgatgacttcacaaatgaagaagatatggctaaatatgcagatgtcttcaaaagacagaacaaattatctgcaatggttgatgactctgccgttgattccaagcttgttggatttacttttaggcatagagatggaaaacaaggttcaagtgggatactttacaatggttcagaacattcagaccctttttcaactttttattaa

SEQ ID NO: 79013 - DNA, 2664 bp, Saccharomyces pastorianus
atgtcccgtatcattgtcaagggtttgcccgtctatctaacagatgataatctcagggagcattttacaaaaagattacgtcaaaaacattcccatcaagcagttaatggtagtggtccagacctcataacagatgttaaaattcttagagataggaacggagaaagtagaagatttggatttatcggataccgtaacgaggaagacgcttttgatgctgtagagtatttcaatggcagttttatcaacacttctaagatagaagtgtccatggctaaaagctttgcagacccaagagtcccgcagcccatgaaggagaagagaagagaagctctgaaaaggtttagggaaaaggaagaaaaattgctacaagaagaaaatcgaaagaaaaagaaagtggatgaaaataagcacagcaacattgatgacgagattcgcaagaacaagcaattacaagagttcatggagactatgaagccaagctcacaagtcacatcatgggaaaaagttggcattgacaagagcatagaggacgaaaaactaaaacgggaagaagaggactccagcgtgcaagggaattctctattggctcatgcattagccttaaaggaagagaataataaagacgaagcaccaaatttggtcattgagaatgaaagtgacgatgaatattcggctctcaacagaaacagggatgaagatcaagaagatgccggagaggaagaaaagatgataagtattagcaatttgaaggatactgatataggtttagttaatgatgacgctaatagtgatgaaaaagagaatgaaaagaggagaaacctcgcccaagatgaaaaggtttctgacctagattggttcaaacaacgccgtgtaagaatcaaagaaagtgaagcggaaacaagggaaaaatcatcatcatacgctactgaacaaaatgaaagtctcgataccaagaaggaagaacaactagaacctgctgtgccgcaaaagacggacgaagaactggctattgaaaaaattaaccaaactggccgtttattcttacgtaatatcttgtatacctccaaagaagaagatttcaggaaactatttagtccatttggagagttagaggaggttcatgtggctttggataccaggactggtcaatccaaaggatttgcatacgttctatttaaggatcctaagaatgcagtgaacgcctatgttgaattggataaacagatttttcaaggaagactattgcatattcttcctggtgaagaaaaaaaaagccatagattagatgagtttgatttaaagaatatgccattgaaaaagcaaaaggaattgaaaaggaaggcagctgcatccagacaaacattttcttggaactccttgtatatgaaccaagatgctgttttgggtagtgtggcagccaaattgggtctagaaaaatctcaattgatcgatgctgaaaactcaagttcggctgtcaaacaagctttggctgaagcccatgttattggtgatgttagaaaatactttgaatccaaaggtgttgatctgaccaagttttcacagttaaaatctacaaatcaaagagacgataaagtgatactggttaaaaattttccttttgggacaactagaaaagagcttggcgaaatgtttttgccatatggtaaattggaaagattgctcatgccaccagctggtacaatagctatagtgcaattcagggacacaacgtcagcaagggcagctttcactaaactatcgtataaaagatttaaggacggcataatatatctagaaagggggcctaaggattgctttactaaaccagctgaggccgatgatttgataaataacacttctgcaaaagaagaagaaaacccggtagaggtaaaaccttcatcaaatgacttaatggaagcaaacaaggatgtaactgaagggtcatctaatgctcatgatgaagacgttattgatggtccaactgtctcaattttcataaagaatctaaacttctccacgacgaaccaaaatcttactgataggttcaaggttttcactggttttgttgttgcccaagtgaagacaaaacctgatccaaaacatcaaggcaagaccttgtcaatggggttcggttttgtagaattcaggaccaaggaacaagctaatgccgtgatagctgcaatggatgggacggtaatcgacggccataagattcaattgaagttatcccatagacaagcatctcagagcggtaatacaaagactaaatccaataagaaaagcggtaaaatcattgttaagaatcttccatttgaagctactaggaaagacgttttcgaattattcaattcttttggtcaattaaaatctgttagagttccaaagaagttcgacaagtctgcaagaggttttgcgttcgtggaatttttacttccaaaggaagcagaaaatgctatggatcagttgcacggtgtccatttactgggccgcagattggtaatgcaatatgcagaagaagatgcagttgacgctgaagaagagatagccaggatgacaaagaaggttagaaagcaagttgccactaatgagatggctgccttaagaaatgggggcggtagaaagaaactggatgtggatgatgaagaaaacgaaggtttctag

SEQ ID NO: 79014 - DNA, 948 bp, Saccharomyces pastorianus
atggatgttttattgtcgcttcctcaaccggaattatttaagaccacggtgattccgttcttggcaaatcgcaatataatcaagtcggaagcgattctctccaacttgcactcaattttttatgttgctatattctaccatatttggtttctttttggcaaatggatcttattcccacctttggttaaatggaaattggactatgaccaaaaacataacgtcaagaaagatgagaagacaacttcggaacgtcaagctcaacattacaaaaagaagtacacttctttgatcaatcaaagttcagtccacttaatatccctactgcaaagcatagtggtcttgtactactcattgaagttcttgcttgatccaaaagcctcggccgagccctaccaaacctcacactctcgagtgtttacagaaaatcgagacactcaagtcatctgtatttttgctattggttatttcgtctgggatatctatatttccaccatgtattctactttccccttcgttgtgcacggaataatctccaccgtcgtgttttgcatcggattgaaaccgtacatccaatattacgccccagtgttcttgatgttcgaactttccaatccctccttgaactttagatggttcggtatcaaatttctaccccagaaaagcaaattctgctctctactgctgctgttgaacaatttgacgctcatggtcgtcttctttgccgctagaatcgcctgggggtggtttcaaattggaaaactatgttacgacttttaccaggtgcgcaatgaacctggtttcttagtctttgacaccattgttatccttgcaggcaatttcgtcctggacatcttgaatgttatttggttttctaccatggtgtctgtggctgcaaaggtcttgaagaagggggagtctgtagacaaagtcactaagaatgaacaataa

SEQ ID NO: 79015 - DNA, 1236 bp, Saccharomyces pastorianus
atgtcgttggaagccatcgtctttgatagatcggagccagaaaatgtttcggtaaaggtacttgatcaattacttttaccatatactactaaatacgttccaattcacacaattgatgatgggtactcagtcatcaaaagtatgcaggtgagaggtgccccggcaattgcaattgtgggttcgttatctgttttgactgaggtacaattaataaaacacaacccaacttctgatgttgctacgctgtattctttagttaactgggaatctacaaaaacagtgctaaataagagactagatttccttttgagtagtagacccacagccgttaatttatcaaattctcttgtagagataaagaacatactgaaatcctcaagtgacctaaaggcttttgacggtagtttatataattacgtctgtgaattgatagatgaggatttggcgaataacatgaaaatgggtgataatggagctaagtatttgattgacgtgttacaaaaggacggtttcaaggacgaatttgccgttctgacgatttgtaatactggatccttagcaacctctggatatggcacggctttaggtgttatccgttctttgtggaaggattcacttgctaaaaccgacaaggcagactcgggattggacaatgaaaaatgcccgaggatgggccatgtcttcccactggaaactagaccttataatcaagggtcaaggctaacagcatacgagctagtttatgataagattccatcaactttaattactgatagttccatcgcgtatagaattagaactagtccaattccaatcaaagcagcatttgttggagctgatagaattgttcgtaatggggatacagcaaataaaattggtactttacaacttgctgtaatttgtaagcagttcggaattaagttttttgtagtagctcccaaaacaactatcgataatgtaaccgaaactggcgatgacattattgtggaagaacgtaaccctgaggaattcaaggttgttactggtacagtaattaatcctgaaaatggttccttgatattgaatgagtcaggagagccaatcactggaaaggtcggtattgcccctcttgaaatcaatgtctggaatccagccttcgacattactccacatgagcttattgacggaattatcacagaagaaggtgtatttaccaaaaattccagtggtgaatttcaactggaaagccttttctag

SEQ ID NO: 79016 - DNA, 1308 bp, Saccharomyces pastorianus
atgggagagaaccacgaccatgagcagagtattaaaagaaattctatgatttataatgaaaatgagaggcaattgtgcaattcaaacctaaagattcttcaaaataaaagggccctttcaaaaaatgacagctctagtaagcagcaggttcaggattctaaaccaagaagggctttaacagatgtaccagtgaacaataatcctttaagccagaacaagagaatagtagcagagagcaaggcggccaaagtacgaagagaagaaaacattagacctattgttagcgccgttcaaaaaagacagatatataacgatcgaacggcagcagagcaagaagaagaagaagaagaagaaggagaagatgatgatgctgcttcgatagtgaacaaaaaacgcagaatagacgctgaaggagtgagtgaaatagtaggctggcaggacctagattatgttgaaaaagatgatactgcaatggtagcagaatattctgctgaaatttttgcatttttatatagaagagaattagaaacgttaccatcgcacaactatttactcgacaaaacgtccaagtattatttgaggccttccatgagaacaatattagtggattggctggtagaggtgcacgaaaaatttcaatgctatccggaaacgttattcctatccataaacttaatggatagatttttagctaaaaataaagttacgatgaacaagttacaattattggcagttacctcacttttcatcgcggcaaaatttgaagaggtaaatttgcccaaactagctgaatacgcttatatcactgacggcgcggcttctaaaaacgacataaaaaatgcggaaatgttcatgctcacttccttagaattcaacattggttggcccaacccactcaatttcctaaggaggatctccaaggcagatgattacgatccggttaatagaaatattggtaagtttattttagagtatgcctactgctgccaccaattcattcatttacctccatctaccgtaagcgcaatggcaatgtatatagcgagaagaataaccaacagaaacaagaacgagctatggaatggaacactacagcattacagtggtggtatcgatccaatacacgatgaagcgtttcagtctctctgcattgatctagtcaaagacatcgctagttccaaaactcatttagattcattgattttgaagtacaagaaaccaaggtatggctctgtttatttccaaactttcaagtggtgtacatccgaaatgcatagcaactttcaaaatctatttaatcttaagtag

SEQ ID NO: 79017 - DNA, 1719 bp, Saccharomyces pastorianus
atggttatcatcctcctaggtctttgcacattaggttttccaagaacagcattctgtccctccataatgacaaattctacagtgagtattaacacgcctccaccatatcttactctagcttgtaatgaaaaattaccaacagttatgtcaattgctggatcagactcaagtggtggagccggtgttgaagctgatattaagactatcaccgcacatagatgttatgccatgacatgcgtcactactttgactgctcaaactccagtgaaggtgtacggcgctcaaaatataccaaagaaaatggtatctcaaatattagacgccaatttacaggacatgaaatgtaatgttattaagactggcatgcttacggtggatgcaatcgaagtcttgcacgaaaaacttttgcaacttggtgaaaatagacccaagttagtaattgatccagttctttgcgccgcttctgactcttctccaactggaaaggatgtggttagcttaatcatagaaaaaatttctccttttgccgacattttaactcctaacatttcagactgtttcatgttactgggcgagaacagagaagttagcaaactacaagacgttcttgaaatcgtgaaagacctttctagaatcaccaattgctccaatattttagtgaagggaggccacattccatgtgacgatggaaaagaaaagcatattactgacgttctttacttaggtgctgaacaaaaattcatcacttttaagggccaattcgttaatactacacgcactcatggcgctggatgcacactggcttctgctatagcatctaacttggctcgcggttattctctttcccaatctgtttatggtggtattgagtatgtacagaatgccatcgcaattggctgtgacgttaccaagaaagctgtgaaggttggaccaattaatcaggtttacgccgtagagattccattagaaaaaatgctcaccgacgaatgctttacagcatctgatgctgtacctaagaagccaatcgaaggttctcttgacaaaatccctgggggtagcttctttaattatctgataaatcatcctaaagtcaagccgcattgggatgcctacgtgaatcacgaatttgttaaaagagtggcagacggcacattggaacgcaaaaagttccagttttttattgaacaagattatttatacttaattgattatgtgagagtttgctgcgtcacaggtagtaaatctccaactctagaagatctagaaaaggaccttgttattgctgattgcgcccgtaatgaactaaatgaacatgaaagaagattaagagaagaatttggagttaaggacccagattacttacaaaaaattaagagaggtcccgcattaagggcctactgtcgttacctaattgacatttccagaagaggaaactggcaagaaatagttgtagccctcaacccttgtctaatgggttatgtttatgctgtagacaaagttaaggataagataacagcagcagagggttctatttatagtgaatggtgtgatacttgcacgtcttcattttgctaccaagctgtgcttgaaggtgaaaggctcatgaatcacatcttggaaacatatcctccagatcaacttgattctttggtgacgatctttgcaagaggttgtgaattagaaactaatttctggaccgccgccatggaatacgaatga

SEQ ID NO: 79018 - DNA, 309 bp, Saccharomyces pastorianus
atgttggcgagagtagcggagagtgtatcgtgcggtttaatgggccaggtgaaaactgggttacttctctttgatggcagcggcttctccgataggcttggtgtcatgcggttttacgtctggagcagccgcatctatgttcttgtcttggtcgtccaagctcaactcatccttgacgctcacaatggcgttctcttcttgctgctcttcttccttcataatttcttcttgctccctcaattgtttcaatttttgcttagcggatgcctcatcttccttaacgacgtttactttaacctcatggtatag

SEQ ID NO: 79019 - DNA, 1038 bp, Saccharomyces pastorianus
atgtctgtcgccgatttgaaaaagaacatccacaagttagatactggctatggtttaatgagtttgacttggagagccgagcctatccctcagtcgcaggctttcgaggccatgcacagagtggttgagttatccagagaacgtgggcacaaggcctttttcaacgttggtgaattctatggtcccgattttattaatttgtcgtatgttcacgacttctttgcgaaatacccagatttgagaaaggatgtggttatcagttgtaaaggtggtgcagacaatgctaccttaacccccagaggcagtcacgatgatgttgtacaaagcgtaaagaattcagttagtgctattggtggctacatcgacatcttcgaagtcgcaagaatcgacacttccctatgcacgaaaggagaggtctacccctacgaatcgttcgaagcgcttgctgagatgatctccgaaggcgttattggcggtatttcattaagtgaagttaatgaagagcaaattagagctattcacaaggattggggaaagtttttgacctgcgttgaagtggaactttctttgttcagtactgacattttacacaacggaattgctaaaacatgtgctgaattggggttgtccatcatctgctactccccactgggcagagggttgttgacaggtcaattgaagtccaacgctgatatccctgagggtgactttagaaagtcgttaaagagatttagcgatgagtctttgaaaaaaaacctgaccttggtcaggttcctgcaggaagaaatagtcgacaagcgcccacaaaacaactccattactcttgcacaactggctttgggatgggttaagcactggaacgaagttccggaatacagtggcgccaaatttatcccaattccaagtggctcttctatttccaaggttaatgaaaactttgatgaacagaaaaccaaacttaccgatcaagagttcaatgccattaacaaatatttgactactttccatactgttggtgacagatacgaaatggcgtaa

SEQ ID NO: 79020 - DNA, 1050 bp, Saccharomyces pastorianus
atgtcgcagtacatcggtaaaactatttctttaatctctgtgactgacaacagatatgtggggctgttagaagatattgactctgaaaagggtaccgtgactttgaaagaagttcgctgttttggtacagaaggtcgcaagaactggggtcctgaagaaatttatccgaatcctacggtatacaattctgtaaagttcaacggcagtgaagtcaaggatttaagcattttagatgctaacatcaatgacatacagccggttgttcctcaaatgatgccacccgcttcacaattccctcctcaacaagctcaatctccaccccaggctcaagctcaagcacacgtgcaaacaaacccccaagccccaaagcccgaatccaatgtgccagcagctgtcgctggatatggtgtttacaccccaacttcgacagaaaccgctactgctagtatgaatgataagagcactcctcaagacaccaatgtaaactcgcaaagtagggaaagaggtaaaaatggtgaaaatgagccaaaatatcaaagaaacaagaatagatcaagtaatcgccctcctcaatccaaccgcaatttcaaagtcgatattccgaatgaagattttgactttcaatctaataatgcaaaattcacgaaaggtgattccactgatgtggaaaaagaaaaagaattagaatcagctgttcacaagcaggatgaatctgatgagcagttttataataaaaaatcgtcttttttcgacaccatctccacttctactgaaactaataccaatatgagatggcaagaagaaaaaatgttgaacgttgacacctttggacaagcttctgccagaccaagatttcactctagaggccgcggtcgtgggcgtggaaattataggggaaacagaggaaacagaggaagaggcggccaacgtggaaactaccaaaacagaaataactaccaaaataatagtggcgcctatcagaaccaaaacgactcgtacagcagaccagccaaccagttttcgcaacctccttccaacgttgaattttaa

SEQ ID NO: 79021 - DNA, 408 bp, Saccharomyces pastorianus
atgtacatactgaatgatattcttaatttacatagaaacatcattttaaaattcaacgttggaaggaggttgcgaaaactggttggctggtctgctgtacgagtcgttttggttctgataggcgccactattattttggtagttatttctgttttggtagtttccacgttggccgcctcttcctctgtttcctctgtttcccctataatttccacgcccacgaccgcggcctctagagtgaaatcttggtctggcagaagcttgtccaaaggtgtcaacgttcaacattttttcttcttgccatctcatattggtattagtttcagtagaagtggagatggtgtcgaaaaaagacgattttttattataaaactgctcatcagattcatcctgcttgtgaacagctga

SEQ ID NO: 79022 - DNA, 1233 bp, Saccharomyces pastorianus
atgagtacagccgatcaagaacaacccaaagtggtggaagcgacaccagaagatgggacagcttcctcccaaaattcaactataaacgctgagaatgaaaatacaaaacaaaatcaaagtatggaaccccaagaaacttcagaaaatgcctccaatgatactaaagacccagataacggagaaaagaacgaggaagccgcaatagacgaaaatagtaacgtagaagctgcagaaaggaaacgtaagcacattagcacagatttctcagatgacgacctagaaaaggaggagcataatgatcagagtcttcaaccaacggtggaaaatagggcaagtaaagatagagattcaagtgctactccaagtagtagacaggaattggaagagaaactggaccgtatattgaaaaaaccaaaggttagaagaacgaggagggatgaagacgatttagaacagtacttggatgaaaaaattctaaggcttaaagacgaaatgaatattgcagcacagttggacatcgatactttaaataagagaatagaaactggagatacttcgctgattgccatgcagaaggtcaaattgttgccgaaggtggtaagcgtactgtcaaaggcaaacttggcagacaccattttggataataacttacttcaaagtgtcagaatatggttggaacccttacctgatgggtctctgccatcttttgagattcaaaagtcactctttgcagctttaaacgatctaccagtgaaaactgaacacctgaaggagagtggtttggggagagtagttatcttttatacaaagtccaagcgtgtcgaagctcaactagctaggttggctgaaaaattaattgcggagtggacaagacctattattggtgcttcagataactacagagataagagaataatgcaattagagtttgattctgaaaaattgaggaagaaatccgttatggattctgccaagaataggaaaaagaaatctaagtctggtgaagatcctacctctcgtggttcttcggtacaaaccttgtacgaacaagctgctgcaaggagaaacagggctgccgcaccagcacaaaccactactgattacaagtatgcccctgtgagtaaccttagcgcagtacctacaaacgcaagagcagttggtgttggttccactttaaacaatagtgagatgtacaagaggttgacttcaagattaaacaagaagcataaataa

SEQ ID NO: 79023 - DNA, 153 bp, Saccharomyces pastorianus
atgtttggtctacctcaacaggaagtctccgaagaggagaaaagagctcatcaagaacaaactgagaaaaccttgaaacaggccgcttatgtggctgcgtttctttgggtttccccaatgatctggcatttggtgaaaaagcaatggaaataa

SEQ ID NO: 79024 - DNA, 513 bp, Saccharomyces pastorianus
atgcaagtaaggttattttcccctaccctggtaaagctcttttttgcttcagatattagaagtttatcgccaaaatatctgaagactcggccttgctgttcagcaacgtcttcttttaacctggacgcaatgatatccttatccaaatctccagcatcaaaattgttgtactcgtcgattgttctttccttgagattgtttaaatctttttcttcagcgttcctattatcagttaaaatgtcattagcttcgcttttcaggttctccagatattgctttgcaagcctccttcttttatcggctggattttccccctcgaattcttcttcagattccaatgcgtcttcttcatccgaaacttctagttgttcatcttcgtttgaggatggatctgtgatttcttcgtctactgtgggttttgacggattaacttctcctttggatcttttcctctttttctgttgggtaacatctgacatcttttctagattttctataattttgaaatgctaa

SEQ ID NO: 79025 - DNA, 1722 bp, Saccharomyces pastorianus
atgtcagatgttacccaacagaaaaagaggaaaagatccaaaggagaagttaatccgtcaaaacccacagtagacgaagaaatcacagatccatcctcaaacgaagatgaacaactagaagtttcggatgaagaagacgcattggaatctgaagaagaattcgagggggaaaatccagccgataaaagaaggaggcttgcaaagcaatatctggagaacctgaaaagcgaagctaatgacattttaactgataataggaacgctgaagaaaaagatttaaacaatctcaaggaaagaacaatcgacgagtacaacaattttgatgctggagatttggataaggatatcattgcgtccaggttaaaagaagacgttgctgaacagcaaggccgagtcttcagatattttggcgataaacttctaatatctgaagcaaaaaagagctttaccagggtaggggaaaataaccttacttgcattagttgtttccaacccgttttaaacaaatacactttcgaggaatcatctaatggcgataagaacaaaggtaggttatttgcctatacagttagcaaagacttacaactcaccaaatatgacgttactgactttagcaaaagaccaaagaagctaaaatacgctaaaggaggagcaaaatatatacctacgagcaagcacgaatatgagaataccacagaaggccattatgacgaaatcttaactgtagcagcctcaccagatggtaaatatgttgtcacaggtggaagagataggaagttaattgtatggagcacagaatctctatcacccgttaaagttattccaacaaaggatcgccgaggggaagttttatcgttggcttttagaaaaaattctgatcagttatatgcatcctgcgcagattttaagataagaacatattcaataaatcaattttcccagttggagattctttatgggcatcatgatatagtggaagatatatctgcgttggcgatggaaaggtgtgttaccgttggtgcccgtgatagaacagctatgctttggaagattcctgacgagaccagactaacatttagaggtggcgatgaacctcaaaagctactaaggagatggatgaaagaaaacgctaaggagggagaagatggagaagtcaaatatcctgatgaatcagaggcacctttgtttttctgcgagggtagtattgacgttgtgagtatggtggatgattctcactttataacaggctccgataatggtaatatatgtctatggtctctggcgaagaagaaacctatcttcacggaaagaattgcccatggtattttacctgagccctctttcaatgacatttcgggggaaaccgatgaagaattaagaaaaagacagttgcaaggcaagaaattgctacaaccattttggatcacatctctttacgctattccatattcgaatgtattcatatctggatcatggagtggatcgctaaaagtttggaaaattagtgataatctcagatcatttgagttgctaggtgaattatctggcgctaaaggtgtagttaccaagattcaggttgtagaaagtggtaaacatgggaaggagaagttccgtattttggctagtattgccaaagaacacagactcggtagatggattgcaaatgttccaggtgccagaaatggtatatattcagctgtcattgaccaaacaggcttttag

SEQ ID NO: 79026 - DNA, 1470 bp, Saccharomyces pastorianus
atggctcggggtgacggacatctatggacagagacatatgatagttccacagtcgtttttatgattttaggtgccgccctggttttcttcatggtaccggggctgggctttctttattccggtttagcaagaagaaaatctgctctggctttgatttgggtagtgataatggctaccttagtaggtatactgcaatggtatttttggggctattctttagcattctctaagactgcgacgaacaacaaatttatcggcaacttggattcatttgggtttagaaacgtctatggcaaaatttcggatgattccacgtatcctgaactgatttatgccattttccaaatgatgttcatgtgtgtcgcattgagtattatagctggtgccactgcggaaagaggtaagctttttccacatatggtttttctttttgtttttgcgactttggtttactgtcccatcacttattggatttgggccccaggtggttgggcctaccaatggggggtattagactgggctggcggtgggaatgttgaaatcctaagtgctgtggctggtttcgtttattcttattttctaggaagaagaaaagaaaacctcctgatcaactttagaccacataatgtttccatggtgactttgggtacttctatactttggtttggttggttgcttttcaatgctgcaagctcactgtcaccaaatatgaggtccgtatatgcgttcatgaacacttgtctcagcgccaccacgggtggaatgacgtggtgtttattagattatcgatctgaaaaaaaatggtccactgttgggttatgctccggcattatctgtggtttagttgctgccacgcctagctcgggttgtattactctatatggctctttgatccaaggtataatagcgggtgttgtttgtaattttgcaacaaaaataaagtattatttaaaagtggatgattccttagatctattagctgaacacggtatcgccggtgtggtgggattgatttttaacgctctatttgcagctgattgggttattggaatggacggcacaacaaagcataagggtggttggttgacgcataactggaaacaaatgtatattcaaattgcctatatcggtgcctctgccggctattgtgctgtggtcacggccatcatttgcttcgtattaggtaaaattccgggtgtccatctaagagtcactgaggaagccgaagcattggggttggatgaagatcaaataggcgaattcgcttacgattacgtggaggttaggagagattattaccagtggggtgtagatacagatgcacttcatactacatgcaatggcgctaattctgcgtctgagacaaatcctactgaggacagccaaaactcctcattgtcatcagctacagtaagcagccaaaacgaaaaaagtaataatcctaaattgcatcacgcaaaagaagcatga

SEQ ID NO: 79027 - DNA, 903 bp, Saccharomyces pastorianus
atggaaaagtacaccaattggagagacaatggtacgggaatagctccatttctaccaaacacaatcaggaaacctagtaaggtgatgacagcgtgtttgttgggtatcctaggggtgaaaaccattataatgctaccattgattatgctgtaccttctaactggccagaacaacttactgggtttgatattgaagtttacattcagttggaaagaggaaattaccgtgcaaggaatcaagaaacgtgacgtaaggaaatccaagcattatccacagaagggcaagctttatatttgcaattgtacctcacctttagatgctttttcagtggtgttattagctcaggggcctgttacgttgttggtgccatccaatgacattgtatacaaagtttccataagagaattcatcaacttcatcctcgctggtgggttagatataaaactctatggccacgaggtagcagagctatctcaattgggcaataccgtgaattttatgtttgctgagggtacctcatgtaatggtaaaagcgtcttaccgtttagtataaccgggaaaaaacttaaggaattcatagacccttcaataaccacaatgaaccccgcaatggccaaaactaaaaaatttgaattgcagaccatccaaatcaaaactaataaaactgccatcaccacattgcccatttccaatatggagtatttatctagatttctgaacaagggcattaacgttaaatgcaagatcaacgagccacaagtactctcggataatttagaggaattacgcgttgcattaaacggtggcgacaaatataaactagtctcacggaaattagatgttgaatctaagaggaactttgtgaaggaatatatcagcgatcaacgtaaaaagaggaagtag

SEQ ID NO: 79028 - DNA, 1146 bp, Saccharomyces pastorianus
atgtcttttagggatgtcctagaaagaggagatgaatttttagaagcctatcccagaagaagccccctttggagatttctttcatacagtacatcattactgaccttcggtgtatcaaaactgcttcttttcacatgctataatgtcaaattgaatggttttgaaaaattagaaactgccttggaacgttccaaaagggaaaatagaggccttatgacggtcatgaaccatatgagtatggtcgatgatccgttagtttgggcaacactaccatataagttatttacgtctttggacaacataagatggtctttgggtgcacataatatttgctttcaaaataaatttctggccaactttttctcacttggccaagtcctttcaacagaaagatttggggtgggcccatttcaaggttctatagatgcttcaataagattgttaagccctgacgacactttagacttggaatggacccctcactctgaggtctcttcttcgctaaaaaaagcctactccccgcccataataaggtcgaagccatcttgggtccatgtttatccagaaggatttgtactacaattatatccgccttttgaaaattcgatgaggtattttaaatggggtattaccagaatgatcctagaagcaacaaagccgcccattgtagtaccaatatttgctacagggtttgaaaaaatagcatccgaagcagtcacagattcaatgtttagacaaattctaccaagaaactttggctctgaaataaatgttaccataggggatcctttaaatgatgatttaatcgacaggtatagaaaagaatggacacatttggttgaaaaatactatgatcccaaaaatcctaacgacctctctgacgaattgaaatatggtaaagaggcgcaagatttaagaagcagattagccgctgaactgagagcccatgttgctgaaattagaaatgaagttcgcaaattaccacgcgaagaccctaggttcaaatccccctcatggtggaagcggttcaacaccacggaaggtaaatcggacccagatgttaaagtcattggcgaaaattgggcaataaggaggatgcaaaagtttctgcctccagagggtaaaccaaagggtaaggatgattga

SEQ ID NO: 79029 - DNA, 2190 bp, Saccharomyces pastorianus
atggaatcacttccacgtactcccacaaaaggcagatctacgcagcatctctcgacaccatcgccgaagaatgatgttttagctatgaatggccacaaaagaagaaatacaacaactccaccgcctaagcacactcttctgaagccgcaacgtacggatattcatagacactcattagctagtcagagtcgcatatccatgtcacctaatcgcgagcttttaaagaattataaaggtacagcaaatttgatttatggaaaccagaaaagcaactccggtgtaacttccttttataaagaaaatgttaatgaactcaatagaacacaagcaatcttatttgagaaaaaggcaacactagatttactcaaagatgaactaacagaaacgaaagagaaaatcaatgccgttaatctcaaatttgaaacccttcgtgaagaaaagataaaaattgaacagcaactgaatttgaaaaacaatgaacttatctcgattaaagaagaatttttgtcaaagaagcagttcatgaatgaaggacatgaaatacatttaaagcagctagcggcatctaataaaaaagagctgaaacaaatggaaaatgaatacaaaacaaaaattgagaaattgaaatttatgaagattaaacagtttgaaaatgaaagagcgtcgcttttagataaaatagaagaggtaagaaataaaatcaccatgaacccttccactttacaggaaatgttgaacgatgttgaacaaaagcatatgcttgaaaaagaagaatggcttacagagtaccaatcgcagtggaaaaaggatatagagctgaataataaacatatgcaagaaatcgaaagcataaaaaaggaaatcgaaaatacattaaaacctgagttggcagaaaaaaagaagctcttaacagaaaagcgtaacgcgtatgaagctatcaaagcaaaagttaaagaaaaggaagaggaaactacaaggctgagagatgaggtggcattaaaacagaaaactaatttagaaactttggaaaagatcaaagaacttgaggaatatataaaagacactgaactgggtatgaaggagttgaatgaaattctgattaaagaggaaacggttagacgcacattgcataatgagttacaagagttaagaggaaatatacgagtttattgtaggattcgtccagctctaaaaaatttggaaaattctgatactagccttattaatgttaatgaatttgatgacaatagtggtgttcaatctatggaagtgacgaaaatacaaaacacagcgcaagtgcatgaattcaaatttgataaaatatttgatcaacaggatacaaatgtggatgtttttaaagaagttggtcagttagtgcagagttcattagatggatataatgtttgtatcttcgcatacggacaaacaggatctgggaaaactttcacgatgttaaatccaggtgatggtatcattccgtccacaatatctcatatatttaactggatcaataaattaaagacaaaaggatgggattataaagttaactgcgaattcattgagatctacaacgagaacatcgtagacttattgagaagtgataataataataaagaagacacaagcattggcttaaagcacgaaatacgtcatgatcaggaaactaagactaccacgataacgaatgttacgagttgcaagcttgagtcggaagaaatggtggaaataatcctgaaaaaagcaaataaattaagatccaccgctagcacagcatcaaatgagcattcctcccgttcacacagtattttcataattcatttgtctggatcaaatgcaaaaactggagcacactcgtatggcacactaaatcttgttgatttggccggttccgaaagaataaatgtctctcaagttgtaggggatagattaagagaaacacaaaatataaataaatctttaagttgcttaggtgacgttattcatgctttaggtcagccggatagtaccaaaagacatataccgttcaggaactcaaaactgacatacctactgcaatattcactcactggggattcgaaaacattaatgtttgtaaacatttcaccaagctcctctcatattaatgagactctcaattcgttaagatttgcgtctaaagtgaattctaccagattggttagtagaaaatga

SEQ ID NO: 79030 - DNA, 564 bp, Saccharomyces pastorianus
atgatggggtccttcctgtcgtatgctttcagatgtgatgataaaatagcatttactgcagcagaaaatccagtagaaccatcatcatgtttgctgtttttcgattttttctttcttgggaagtcgtcgtcctcttcttcttcatcatcatcttcttcagcatcactttgttcgttatctataattttagatgattcatcgctagagctattctgctcgtcttcttcggcttcatcaccttccattattgtatctttttccggctcattacttaactcttggttgccactattccttttttcacgcccaaattctgcattctttctggttcttttcttatccttagtgtctactctgtgcttggagcccatgatcaattatgtactgattttccttcggcttctctatcactttattcatagcatctgtttattacctttccttatatcttatgggcatcgaatcttagatttttttctttcaaaattttccaataagagggtaatggagatacaccaaaatgaatctcaaacaaaatcaaaacaaacactgtttacaatttga

SEQ ID NO: 79031 - DNA, 753 bp, Saccharomyces pastorianus
atgggctccaagcacagagtagacactaaggataagaaaagaaccagaaagaatgcagaatttgggcgtgaaaaaaggaatagtggcaaccaagagttaagtaatgagccggaaaaagatacaataatggaaggtgatgaagccgaagaagacgagcagaatagctctagcgatgaatcatctaaaattatagataacgaacaaagtgatgctgaagaagatgatgatgaagaagaagaggacgacgacttcccaagaaagaaaaaatcgaaaaacagcaaacatgatgatggttctactggattttctgctgcagtaaatgctattttatcatcacatctgaaagcatacgacaggaaggaccccatcatggctagaaacaaaaaggtgctgaagcaaagtgagtcagaaaagctagaatacaaggccaaaaaagcattgttggcagaaaaaaaaaagttattaggtaaagccagaaagacggatattattccaattgcttccggagaagacaggtcagaaaatattagaaaagtccttgagaaggagacagcgctcagaaagatagctcaaaaaggtgccgtgaaattatttaacgccattttagcaactcaagtcaagacagaaaaggaagtatccgaaaatttaagcggaattaagaataaagaagaaaagaaagaattgatcactgaagtttccaaagaaaaatttttggatttagttaaagctgccgcaggaagcgacaatgaataa

SEQ ID NO: 79032 - DNA, 1659 bp, Saccharomyces pastorianus
atggtattgcttatatcagaaattaaagatattgccaagaggctgactgctgcggatgacagaaagcagtacaactccattatcaagttaatcaatgaactagtgattccagaaaatgttactcaattggaagaagatgagacagaaaaaaatttgagatttctggttatgtcgctattccagatatttagaaagctgttttcccgcggcgacttgacccttccttcgtccaaaaagagcacattagagaaggaacagtttgttaattggtgtagaaaggtgtatgaagcgttcaagacgaagctgttagctatcatttcggacatacctttcgaaacatcacttgggttagattcgcttgatgtctatcttcaacttgcagagctggaatcaactcattttgcatctgaaaagggcgcaccatttttccccaataaaacattcagaaagttaatcatcgccctatggtcctcgaacatgggtgaaatagaggatgtcaaaagctcgggtgcgtctgaaaatttaatcatagtagaattcacggaaaaatattatacgaaatttgcagatattcaatactactttcaatcagaatttaaccaactattagaggatccagcctaccaggacttgcttttgaaaaacgttggtaaatggttagctttagtaaatcatgacaaacattgctctagtgttgatgcagatttagagatctttgtaccaaatcccccacaagccatagagaacgagtccaaattcaagtccaatttcgagaaaaattggttatcccttttaaacggccaattgtctttacagcagtataagtctattctgttaattttgcataagagaataatacctcatttccacactccaactaaactaatggatttccttactgattcctacaatttgcaaagctctaataaaaacgccggtgttgttccgatcttggctctgaatggcctttttgaattgatgaaaagattcaacttggaatatccaaatttttatatgaaactttatcaaattataaatccagacttaatgcatgttaaatacagagcaagatttttcaggttaatggacgtatttttgtcatcaacacatttatccgcccatttagtagcatctttcatcaaaaagctagccagactcaccctagaatcgccaccctctgctattgtcaccgtgattcccttcatctataatttaatcaggaaacatccgaattgtatgattatgctgcacaacccagccttcatttccaacccattccagacacctgaccaagtggcgaacttgaaaactctgaaagaaaactatgtagatcccttcgatgttcatgaatcggaccctgagttaactcatgcactggattcctctctgtgggagctggcgtcattgatggaacattatcatcctaatgtagccacgttggcgaagatatttgctcaaccatttaagaagctaagttataacatggaagatttcttagactggaactatgattctttgctcaatgcagaatcttcaagaaagttgaagacacttcctacgttagaatttgaggctttcacaaacgtttttgataatgaagacggcgatagcgaagcgtcatcccaaggtaacgtctacttgcctggggtagcatggtga

SEQ ID NO: 79033 - DNA, 915 bp, Saccharomyces pastorianus
atgactgtaaaagagtatactaaatcgaagttgccatgctcaatattgaatatcaaacctacagtcactaaaagtggcgaggatgcgcctcttctagtatggatccctggtaatcctgggcttttatactattatcaagaaatgctacagcatctacacttgaaacacccagattgggaaattcttggcatatcccatgccggaatgacattgaacgctcattctaatacaccgatattttctttacaagatcaagtagatcatcaggtagaggtaattaacaatttctcatgcaagaacaggaaaattattattatgggacattcggttggggcatacatcgtacaaaaagtatgcctttctaacaaattggttggctccgtacaaaaagttggtctcgttacaccaactgtgatggacattcacacctcggagatgggtatcaaaatgacagcggcacttcgttatattccaccattggctcatgtagtatcattgttcagttatattttcttttattggatcttatcagaagggttttcaagatttattattgataaatttatgggctgtggaagtactggttatcaggcagtactatctacaagaatttttttgactcataggcagtttgttcgtcaatctctaggattagctgcccaggagatggaagaaataactacgaactgggagtttcaagatagatttatcaattattgcgaagagaacggaacttctatttggtttctcttcagtagcaacgaccattgggtttctggtaagaccagatcacatttgtcggattattataaggataaagtcaagcaggaacgcttaaaaattgatgtcactgacaaaatacctcattcatttgtagtaaaacatgcagaatatgctatcaatgcatttttttag

SEQ ID NO: 79034 - DNA, 522 bp, Saccharomyces pastorianus
atgctagccctagctgataacattctacgtataataaatttcctatttttggttatttccatcggtttaatcagttcgttgttaaacacccaacataggcacagctccagagtaaactactgtatgtttgcttgtgcatatggtatattcaccgattcattgtacggtgtctttgccaacttcattgaaccattggcatggccactagttttgttcacactggactttttgaactttgtgttcactttcactgccggtacagtgttggccgttggtatcagagctcactcatgtaacaacagctcatacgttgacagtaacaagattactcaaggttccggtaccagatgtagacaagctcaagccgctgttgcattcctctacttctcttgtgccatctttttggctaagaccctgatgtctgttttcaacatgatctccaatggtgcctttggttctggttctttctccaagagaagaagaactggccaagtcggtgttccaaccatttcccaagtctaa

SEQ ID NO: 79035 - DNA, 1386 bp, Saccharomyces pastorianus
atgcgtggagaatggcaggaatttaagacacctgcaggcaaaaagtattactataataagaacacgaagcagtctcaatgggagaaacctaatttgaagaaaggctctaacctagaaagcaatgcgaaagaatcacagacagagaggaagccaacattttcattagaactggttaatggttggcacttaataatatgcaacgatggtacaaaactttactttaatgatgactctaaggagttcaaaaatgacatcagacaagaggacgacagcaggtgtcgctcattaatcgagtcgttagataaggaaaaactggttcttctgattggcgttgccagaggttacactatgcgggaggaggacattgataaaatcctcgaatcttgcaacgaagagattcatctatttaaaagaaatcaagacgaagttgagagaaaagatgagatcagcgaagaggcgggtgacgtaaaatcccctttacaggaaagccacactgggctagtcagcgggtatggttcatcttcgggggaggaagacgaagaggaagacgaagagaatgaagaacaaattgtaaatcaagatatcagcattatcgatgatctgaatcgtattgatacagatgacattgacgagcgtaatatcttcttcgaattattcgataggtataaactagacaagttttccacgtggtcgctgcaaagcaagaaaatcgaaaacgatcctgatttttacaagatcagagatgacacagttcgtgaaagtcttttcgaagaatggtgcggcgagcgcagtggcaatgccaccgctgaagaaagcgatagcgaagataatagcgaagacgatagcgaagtactagaaccaacaaaataccattatctggcacaaattgttgctaatgcgggaacaatcgcacccgacaccatcccacaagatataaggaaacaacaaaaagcgttatacaaggcctacaaaatcaaggagtatataccgtcgaagcgcgaccaagacaaattcgtttcccaactgctgttttattataagacgttcgacttggaacagcggaaagagattttctgcgattgcctacgggatcacgaacgagactttacgggggcagtcgaatcgctgcgtcaggacaaagagcttatcgaccgatggcaaacacttctgaaagcacccgcggacagtagtagtatagaggatatattgctgagcattgagcacaggtgttgtgtcagcccaatagtggtgacggaaccacgctactacgtcgtgggcattctggagaagaccgtggtctgggtgcggtggctagccgccgaggtcgggccatcaagccggtttaccccagtgggcgcggggaacgagccgataaatccggaatag

SEQ ID NO: 79036 - DNA, 435 bp, Saccharomyces pastorianus
atgttccctgtgctcagatcattcgtaacaaataacgatatacctgttggatatgtaacgccaaaattcccctcattatactggcccatcaacaactcgaagtataatactgcattcttatactatatatctgacatttggaaattttcgctgtactggactttgatctttaatggtgcattttacgttactgctggtgtgtatgctagcttgacccatagaaagaaggctggaagtgtatggatattcgtcatgtacgtcttatacggaggcgttcaaggcttgacgactggtacagttatggggtttttaataggagcgatctatagatctggtttattttctatgtctacatgggtcccactttgttgcgcggtagtccaaatccttttcgatgtggtgctaagttattccatggttggttccgttatgtga

SEQ ID NO: 79037 - DNA, 1851 bp, Saccharomyces pastorianus
atgatcatcaataggcgtattttgaaatcttttgaagagataagtcattcattagaggaatcactacgagaggttgcatttgattcacagcaacaattgattcaagacgtacgtgaggaaaatgaagaactaagtaggttacaagatcaattacaattgatcaggtcaattgttgaaaaaatctgcatttcaatcaaaactgacaatattgactcttattgttcggtgccttttgatttgctatacaatatttgcaaggacattgctgatccctcatcctttgaagacggagatttgcaatatcttgttagccaagccatatttgagtacattatattattgtgctactattctgtgaccaacgaatgcgtccaaggtttacctgccgtgtatgaagctgaacagtactacaaaacagtaagtgattcaatcctaaagtcttttctttactgtttacaaaattcagtatcgacaatacgtcttttatctcaaactgttttgaaggatgtaaataagaaaaaactgtcgcatcaaaaatggtccctaaaggccttgtcagttgatttactagaaaaaatacgcccaagaataaacaaatttatggtgattcggaacttcaggtttgtcgggctaccgaagaaaccaattgaaatagcttcattggtttctgatatacctcgcggtatagtgcacgaaagacttgatatggtcactcaatcatcaaagtattatactattaaactggggcagttgatcactgaattcgatcaacaaccagaagaaaatggtatgttcaccgaagtacatttaccgaactacgaaagacgtctaaaatctttacaggacttctttggattagccatgtctgattcgaatttactagatgtgatccgatgctcagcgaaatttcataaagatcatcctttaagaaggttcactaaaccaagtatattgactagatactggccttcaattttgttgtgtcttttatatggaccatcttctgttatgtcgttgtggaattcccggtattttattcaagatttcattaagaccaatgtcgttgactttgcgaaagggctgatcttgaactggttatgggcacccctgaaacaggtttggtctactgttaagcatgacgagggaagcgccatttcagtgacatcacaggagacattaaactctgacatggattctcttaccagaatgattgttagttttgttgtggataatagtgattcgacgtctaacagccccatagaccctattctattgagtactaaagtcgaacatggtgatttgaccgaatttatggaaatatatgaaacacaactacatcatccgataaagaatatagctacgggtggattagtcaggtctttattgattcaactgcaaaaaacaaaagtcgatggatctatggcattgaatggcattgataaaatgctgaaatcgcaacagttggtgtttggagttgtagcattatctccggctttagtgatactatattcttctatagtggcgttaaaaagatttgtcaaactaggcaatgtctggtctaatgaaaaacggtatagggagcaaataagtataagtttgaataatgtggaaagagttttgaattattctaaacaaggtgcggacgccgatgaggaacacttaaaccagggtctactagtgattgaggtttctaacttatacaaattgggaagttttttgatcccgcgttcaagaaagaaagaatggtttagggacgttgaggaactggtggataccaatcttgactccggagctcatataaatgtcgtcaacaggatataccacgtatatggcaggtttttaatccattag

SEQ ID NO: 79038 - DNA, 759 bp, Saccharomyces pastorianus
atggctgccgcatgcatttgtcaacctaatcttcttgagattaatgtatctgatggaccactggatatgatccgcaagaaaagaaaaatacaacagccgcaactacgtccaccccttcgagagaataaatgccaaccacacttttctgtacgaaaggtaaaccagtcttacataatttctctccataaagaaatcacatgccaactcattgcagaaattgtcaaacaaaagttatcgaggatttgggaaaaagtatacataccatcttatgaactgatatcagacaaagacggtaatcaaatttatgtggaacagagtgtcgacgaaaataggctaacttctgagattatggagaaactggaccccaacaatattgatatagaggcgatcgaaatattattcgacgactatcacctagaattatcacgcttgacaaacggtattattatatctagtgccaatgatcacttttacagggaattctccttcaataacataattgatgacaactttaaaatttgtggaacaagcatgtctgcagacagttttgataagatttatggcgttatgtggattgaagtacctttcaatggcaatggcttacagaatgatagcgccgttaatagggtttcaacatctcacaatcagatagaagaattgaatgacatagagcaggagataagagcttttaatattagtcgaagtaatcaagaaagtatcatcaaaaaggaagtatctagaagattgaatgggcggtaa

SEQ ID NO: 79039 - DNA, 2163 bp, Saccharomyces pastorianus
atgcctttgagaaatctaactgaaacgcacaactttagtagcacaaacctggacacagatggtacaggcgaagagcatgatggtgctcctctttcctcatctccttcttttggacaacaaaatgacaatagcaccaacgataatgctggtctcacaaacccttttatggggagtgacgaagaatctaatgcgcgggatggagaatctctgtcttcttctgttcattatcagccacaggggagtgactcttcactacttcatgacaattctcgtctagatctaagtcaaaataaaggtgtatctgattacaaaggttactattccaggaacaatagtagagctgtgagtacggctaatgataactcatttcttcagccaccacatagagctatagcctcttctccttctttgaattctaatttatcgaagaatgatattctctcaccgccagaatttgatagatatcccttagtgggttccagagtcacttctatgactcaactgaaccatcatggtcgctcgccaacatcatctccaggaaacgagtcgtccgcctcattctcttctaatccgtttttgggcgagcaagatttttctccatttggtgggtatcctgcttcatcgttcccacttatgatagatgaaaaggaagaagatgattatttacacaatcctgaccccgaagaagaggcaagactggatagaaggaggttcatagatgacttcaagtacatggataaaaggtctgctagtgggctagctggtgtattgctcttgtttctggcagccatctttatttttattgttttgccagcgttgacctttaccggtgctattgatcacgaaagcaacactgaagaagttacatatttaactcaataccaatatcctcaactatccgccattagaacatctctggttgacccagacacacctgatacagcgaagacaagagaagctatggatggctctaagtgggaattagtattttctgatgagtttaatgcagaaggcagaacattttatgatggggatgatccatactggacagcccctgatgttcactatgatgctactaaggatttagaatggtacagtccagacgcttccacaactgtgaacggaaccttgcagctgagaatggatgcctttaagaaccatggcttatattacagatcaggtatgttgcagagttggaataaggtctgtttcacgcagggtgctctagaaatctctgcaaatctaccaaattatggccgtgtttcaggtttgtggcccggtctttggactatgggtaatttagggaggcccggttatttggctagtacccaaggtgtctggccttattcttatgaatcgtgtgatgctggtattacacccaatcaaagttccccggatggtatttcttacttgccgggacaaaagttaagtatttgtacttgtgatggtgaagatcatccgaatcaaggtgttggtagaggagctccagaaattgatgttttggaaggtgaaactgatactaagattggtgtaggtatagcctctcaatccttgcaaattgcaccttttgatatctggtacatgcctgactatgattttatcgaggtttacaatttcacaacaacgaccatgaacacttatactggcggtccatttcaacaagccgtgtctgctgtctcaactttgaacgtaacttggtatgaattcggtgagtacggtggctactttcaaaaatatgccattgagtatctgaacgatgacgacaatggttatatccgttggtttgttggtgatactccaacttatactattcatgctaaagccttacatcctgatggtaatattggttggagaagaatcagtaaagaaccaatgtcgattattctaaatctgggtatttccaacaattgggcttatattgattggcagtatattttcttcccagtggttatgtcgattgactatgttagaatataccaaccaagtaatgctatatccgtgacatgcgatccaagtgactatccaacatatgattatattcaatcgcacttaaatgcattccagaatgcaaacttaactacttgggaagatgctggttacacgttccctaagaatatcctaactggtaaatgtactagctcgaagttcaagttatcctcttaa

SEQ ID NO: 79040 - DNA, 81 bp, Saccharomyces pastorianus
atggtctacgttatgagtatggtatctttgctcaaaagattattgacggttaccaggtggaaactccagattactggttaa

SEQ ID NO: 79041 - DNA, 1107 bp, Saccharomyces pastorianus
atgttgtctgcagctagattgcaatttgcccaggggtcagttagaagattgactgtgtcagccagagacgctcctagtaaagtgtctactttggctgtcaaggtccatggtggatcccgttatgcaaccaaggacggtgtagcccatcttttgaacaggttcaacttccagaacacaaatgctaggtctgcgttgagattggtcagagaatccgaattattagggggaaattttaagtccactttggatagggaatacatcactctaaaagctacattcttgagggacgaccttccttactacgtcaatgccttggcagatgtgttgtataagactgccttcaaaccccacgagctgtctgaatctgttttgcctgctgccagatacgattatgcggttgctgagcagtgccccgtaaaaagcgcagaagaacagttattcgctattacatttagaaagggcttgggaaatccattgtattacgacggtgtggaaaaagtcagcttgcaagatatcaaggattacgctgacaaagtctacactaaagagaatcttgaaattacaggtgaaaatattgttgaggccgatttgaaaagatttgttgacgagtcactgttaagcactttgcctgcaggtaagtcattggtgagtaaatccgaaccaaaatcctttttgggtgaagaaaacagggtaaggtttatcggtgactccgttgccgccattggtatcccggtaaacaaagcctccctagctcaatatgaagtattggccaactatttgacctctgccctatccgacctttccggcttagtcagctcggctaaacttgataaattcactgacggcggcctgtttactctgtttgtaagagaccaagacagcgccgtggtatcttccaacatcaagaaaattgttgcggatttgaagaagggcaaggacttatcccctgcaataaattacacaaagttaaagaatgccgtccaaaatgaatctgtttccagcccaattgaactaaattttgacgccgtgaaggactttaagttgggaaaattcaactatgtagctgtcggtgatgtttccaacttgccatatttggacgaattgtaa

SEQ ID NO: 79042 - DNA, 471 bp, Saccharomyces pastorianus
atgtccaacactagcgaagataacattaccgtaaggtttgtaaccgaaaacgataaggagggttggcaaaggctttggaaatcctatcaagatttttatgaagtctcttttcccgatgacttggacgatttcaatttcggcagattcctagatcctaacattaaaatgtgggcagccgtagctgtggaaagttcgagcgaaaaaattattggaatgataaactttttcaaccatatgactacttgggatttcaaggacaagatatacatcaacgatctctatgttgatgagaattctagggtcaaaggcgcgggcggcaaactaatccaatttgtctacgacgaagctgataaactgggcacaccaagcgtgtattggtgtacggatgagtcaaaccatagagctcagctgctatacgtcaaggtcggctataaagccccaaaaatattatacaagaggaagggatattaa

SEQ ID NO: 79043 - DNA, 2634 bp, Saccharomyces pastorianus
atgagtgaaacagtcaaagataaagttataattgatgagaaggtatccacaaaaggtactgttgattacgccgagggtgctgagtactctgagaggctttcaaatcattcatcagacttttctcagtggtatacggatgaacagatactgcactttatgaagaagctgggttatgaaaatcgcactctttatgatattccggaagacgttgcgtatatcctcaaaaaaatgcctgaattgacacttgaggattccttcaaaatactaaaagactctatcatctatttcaaggatgatgagaacattccacacgatcaatatgaggagtggaagagattggttgacttggaggacttggattcaaaagaggggataaatgaatatgatagctttgacattagagcatttgcttctgctattaaattccattcgccttaccaagaggttagagctgttgttgatccagaagatgatcccaccattccagtggagacattccgagcatattttctggcaataatttggtctgtcatcggttcaggatttaatgagtttttttcacacagggtggtttcaatttcactgggtactccaattatccaaatgtttttatatatctgtggtaaggcttgggctaaaactatcccctgttgggctataaccataaggggcagaaagtatggtatcaatatcgataaaccatggacccaaaaagagcaaatgttttcaaccttgttatatgcaatttgtcaaggcacgttctatactcattacaatattctaacgcaaaaactcttttaccattctgctttctcgtttggctaccaatttttactttcgttatccgtacaatttattggatttggatttgctggcatccttagaaaattcgttgtttatccagcccgtgcactatggccaacagtcatgccaactattgctatcaacaaggcactattgggtaaagaaaagcatgaatctggaatgagcaggtataagttctttttcttgactttttttatcatgttcatctataactggtttcccacttacattattaatattctaaacactttcaattggatgacctggatcaagccaagtaacattaatctcgcaaacatcacgggaggagtcactggtcttgggattaatcctatctcatcttttgactggaatgttatttcgtataattctcctttagtttacccattttggtcatacttaacacaatatcttggttgcatattagcagctttaattgttattgcagtatactatagtaattatatgagttgccaatacctgccaatattcacaaattctttgtatactaatactggcgattcctttaaagttactgagatattagacagtgacaataagctagatgtgaaaaaatatcaaagctactcgccaccatactatagtgctggaaatttggtaacatatggtgctttcatttgcgcatatcctctgatgattacatggtcgtttattgtacactcaaagttattgttcaatgctttcaaagattgggctttgaatttgtgggccatgagaaaacttaaatcttgggtcacaatgttcaaaagcgattacagggcgctcgacgattatgatgacccacattctaatgccatgaaaaactataaagaagttccagattggtggtattttgccatattgataggctcacttgttgttggaatagctgttgtagagcactacccaacaaatacaccagtttggggtctttttgtttgtttaggatttaattttgttttcttgattccaactactatccttcaagcaaccactggtttttcgtttggtttgaatctactaattgaaatggtgatggggtacgctttaccaggtaatccaatcgccataatgattttgaaggcttttggttataacatcgacggccaagcagataattacgtttctaacttaaaaatagcgcattattgtaagattccgccaatggcgctattcaggggacaatgtgttatagttctcattcagatatttgtcaatctaggtgttctgaattggcaaatctccaatatcaaagacttttgcacacctcatcaaaacgcaaaattcacctgtcctgatgctgtgacctactataatgcttccgttgtctggggtgcaattgggccaaaaagaattttcaattacatttatccaatatttaaatggtgttggttgataggcgcatgcattggcatattttttggtgtttggaagcgctggggtaagttttatcccagatattttgacccaatgttatttgtaggtggaatgcttaatatgagccctccatataacctgatgtattacacttctggtatgattgttagttacatttcccagtactacatgaaaagacaccatttaaatctgtgggagaaatataattatgttttatcggcaggcttttcaacgggcttggttttatcagctattatcattttctttgctgtccaatataaagacacagcttttaattggtggggcaatacagttccgtatgctggtgccgatggcgttggctatcctctaaagaacataactgatacagcaaatggctatttcggctatgctccaggacactatccatga

SEQ ID NO: 79044 - DNA, 330 bp, Saccharomyces pastorianus
atgaattctctcatccctcttttagtggaagcatcaacatacattgtaagaggagaaagcagcatctcaattgccattggaatagggcctcaagctagcaggagtgtgccgtaccacattctttgcaggggatgtgacggcacggtaacaacttttcgtacgtggcatacgcaaccactcgggccttgcaatacaatcatcataggcagaaaaggtaatgagacaaccggcggcgcagaacagaggaggcagcagcacttaacgtctgattcagcaacaaaagcgtcattggtgggtttttgtgggctgtattactatttcaggaaatag

SEQ ID NO: 79045 - DNA, 1413 bp, Saccharomyces pastorianus
atgggtattgcgaaacagtcttgcgactgctgtcgcgttcgtcgagtaaagtgtgacaggaataaaccatgtaatcgctgcactcagcgcaatttgaactgcacttatcttcaaccgttgaaaaagagaggtccaaaatccattagagcaggaagcttaaaaaaaatagcggaagtgcagatggtgagtatgaataataatattatgaccgctccggtggtatgtaagaaggttccgaaaaacctgattgatcaatgtttgaggttgtatcatgataacttatatgtaatttggccaatgctttcctacgatgatcttcacaagcttttggaggaaaattatgaggactgcagcacttattggtttctggtatccctttcggcagctactcttagcgacttgcaaattgaaatagagtatgaggaaggagtcacttttactggagagcagttatgcactctttgcatgttatctcggcaattctttgacgaccttagtaacagcgacatatttcgaatcatgacatactattgtttgcaccgttgtcacgcgcagtttgctgatacaagaacttcatacagactttcttgtgaggctattggcctcatcaagatagctggattccatcgggaagaaacctatgaattccttcccttcggtgaacaacaactcagaaggaaagtttactatttacttcttatgacagagagattttacgctgtatatattaagtgtgtcacgagcctagatacaacaatagcgccaccactaccagaggttgtaacagaccctcgtctttctctggaaagcttccttgaggtgattagagttttcactgtacctggaaagtgtttttatgatgctttggctactaactgtgtcgatgattcctgcaccgaagactctctaaaaaggatatggaacgaacttcataccacatcacttgatatagagccatggtcttacggatacatcgattttctgttttcgaggcattgggtcaggacactagcgtggaaactagtacttcatatgaaaggtatgcggatgaattttctttcgaatactaataacacacatataccagtcgaaattgctagggacatgttgggagacacgtttttaactccgaaaaacctgtatgatgtacatggtcctggaataccgatgaaggcattagaaatagccaatgcattggtagatatcgtaaataagtatgatcacaatatgaagttggaggcttggaatattttgtgcgatgtatctaagttcgttttctccctgaaacattgcaatcataaaatgtttcaaaggttttcaactaaatgtcagagtgctctaatcgatttgcctatctctagaccactgcgcctaaatgatgattccaaagatgaagacgacataattccttaa

SEQ ID NO: 79046 - DNA, 1413 bp, Saccharomyces pastorianus
atgagtattgtaagacagtcatgtgattgctgtcgcgttcgtcgagtgaagtgtgataggaatagaccgtgtgatcgttgccgtcaacgcaatttgagatgcacttatttacaaccgttaaggaaacgaggtcccaagtccatcggagaaagcaaccttgaaagagcagctgaaatacagatggtgactgtaaacaataacatcatggcagccccagtaatgtataaaaaggttccaaagaaggtgattgatcaatgtttgagactatatcacgatcaactatacgtgatttggccaatgctcagttacgatgatctttacaagcttttggaggaaaattatgaggactgcagcacttattggtttttagtgtctctatctgcagcaactcttagtgatctgcatacaaaaatagaatacaagaagggatttttttttactggagaacaattgtgtaatctttgtatgtcatcgcgacggtttttcgacgatctcagtaatagtgatatatttcgaattatgacatactattgtttgcatcattgttatgcacagtttgctgatacaagaacttcatacagactttcttgtgaggctattggcctcataaaaatagctggatttcatcgggaagaaacttatgagtttcttccaattggtgagcaacaacttataagaaaggtttactatctgcttctcatgacagagaggtactatgccgtatacattaaatgtgtaacaagtttggataccactatatctccaccacaacccgaaatcgtaactgattccagactttctttggatagttttcttgaggtgattaaagtattcactgttcctgggaaatacttttacgatgccttagctaccaacagtgttaatggttcctatactgaagactctctaaaaaggatatggaatgaacttcacacaacctcacttgatatagagccatactcttacggatacatagactatctcttttctcggcactgggtcaggactctaacatggaagttggtactaaataagaaggatatgcggatgaattttttttcgaatactaacgtcacacacattccagtcgaaatagccaaggatatgttacaggatacacttttaactccaatcgacctatatgatgtgcatggtcctggcgtaccgatgaaggcgctagaaatagccaatgcattggtagacgtcgtaagtaagtatgatcacaatatgaagttggaggcttggaatattttgtgcgatgtatctaagttcgttttctccctgaagcattgcaatcataaaatgtttcaaaggttttcaactaaatgtcagagtgctctaatcgatttgcctatctctagaccactgcgcctaaatgatgattccaaggatgaagtcgacattattccctaa

SEQ ID NO: 79047 - DNA, 885 bp, Saccharomyces pastorianus
atggcaaaaccgcgtggaagaaaaggcggtaggaagccttcacttactccacctaaaaataagagagctgcgcaacttagagcatcccaaaacgcatttagaaaacgaaagttggaaagattagaagaactagagaagaaagaagctcagctaacggtaacaaatgatcaaattcacatattaaagaaggaaaatgaacttctccattttatgttgaggagtcttttcactgagaggaacatgccttctgatgaacggaacattagtaaggcctgttgtgaagaaaaaccgcctacatgtaacaccctcgatggtaatgtggttctttcctccacatataattcccttgaaatacaacaatgctacgtatttttcaagcaactgctctcagtgtgtgttggaaggaattgtacagtgccgtcaccgttgaattcctttgatcggtccttctatcccataggctgtacgaatctctcaaatgacataccaggctattcttttgtaaatgatgcaatgagtgagattcatacgtttggtgactttaatggggaacttgatagtacctttttggagtttagtgggactgaaataaaggagccaaataatttcattactgaaaacagtaatgcaatagaaacagcggcagcgagcatggtgattaggcagggtttccatccaagacagtattatacagtggatgcttttggaggggacgtcctattaagtgcaatggatatttggagttttatgaaagtgcatccaaaggttaacacatttgaccttgaaattttgggaacagaacttaagaaaagtgctacgtgttctaattttgatattttaattagcctcaagcatttcattaaggtcttttcgtcaaaattataa

SEQ ID NO: 79048 - DNA, 393 bp, Saccharomyces pastorianus
atggtaagtttcataacgtctaggcaactcaagggcctaattgaaaatcagaggaaggatttccaagttgttgatcttcgaagagaagattttgcacgtgatcatattacaaacgcttggcatgttccagtaacagcacagattacagagaagcaactgaatcaattaataaaaggtttatcggatactttctcaagttctcaattcgtcaaagtgatatttcattgtactgggtccaagaataggggaccaaaagtagctgctaaattcgaaacctacttacaagaagaagatattacaagtaagtttgagagttgcatcctcgttggaggtttttacgcttgggagacccattgtagagagagtaaccttaaattgattgttagtggttga

SEQ ID NO: 79049 - DNA, 1215 bp, Saccharomyces pastorianus
atgtcagaagatcaaaaaagtgaaaattcggtaccttctaaggttaatatggtgaatcgcgccgatatacttactacaatcaagtcattgtcatggcttgacttgatgttgccatttactataattctctccataatcattgcagtaataatttctgtctatgtgccttcttcccgtcacacttttgacgctgaaggtcatcccaatctaatgggagtgtccattcctttgactgttggtatgattgtaatgatgattcccccgatctgcaaagtttcctgggagtctattcacaagtacttctacaggagctatataaggaagcaactagccctctcgttatttttgaattgggtcatcggtcctttgttgatgacagcattggcgtggatggcgctattcgattataaggaataccgtcaaggcattattatgatcggagtagctagatgcattgccatggtgctaatttggaatcagattgctggaggagacaatgatctctgcgtcgtgcttgttattacaaactcgcttttacagatggtattatatgcaccattgcagatattttactgttatgttatttctcatgaccacctgaatacttcaaatagggtattattcgaagaggttgcaaagtctgtcggagtttttctcggcataccactgggaattggcattatcatacgtttgggaagtcttaccatagctggtaaaagtaattatgaaaagtacattttgagatttatttctccatgggcaatgatcggatttcattacactttatttgttatttttattagtagaggttatcaatttatccacgaaattggttctgcaatattgtgctttgtcccattggtgctttacttctttattgcatggtttttgaccttcgcattaatgaggtacttatcaatatctaggagtgatacacaaagagaatgtagctgtgaccaagaactacttttaaagagggtctggggaagaaagtcttgtgaagctagcttttctattacgatgacgcaatgtttcactatggcttcaaataattttgaactatccctggcaattgctatttccttatatggtaacaatagcaagcaagcaatagctgcaacatttgggccgttgctagaagttccaattttattgattttggcaatagtcgcgaggatccttaaaccatattatatatggaacaatagaaattaa

SEQ ID NO: 79050 - DNA, 309 bp, Saccharomyces pastorianus
atgaaggatatgaatagtattagatatgtattcttttttttttccagggacataaagagttgtttttataaggtgcggagttatctcaatttgcttctgattttagaagctattctatgcccggtcgactctttgatttcgatcccaaacggcatcatggtagtttcggagccagattcgccattttccaactctaatccatctcgaagactttttcgaaaggtaaacccttcttcttgtctcagcgtgttatatttggacttatgctgtagcggcttgatcattgccgaagcaggtattggcgtataa

SEQ ID NO: 79051 - DNA, 2130 bp, Saccharomyces pastorianus
atgagtaataaggaagagcatgttgatgagacttccgcaagtggtgtcaaggaggttagttctatagctgctagacatgacaattgttacgcgccttcgttaataacgtcgacgtcgggcatggactcctttcaatcgcacgcgctactgaatgatccaaccctaatagaggattattcagatattattaataataggcctacaagtggaagtaaacttactttaggaaacgaggattcggagagtatgggcggaagtgttgtggtgactccgacttcgaataagagttcgcccttcaattcgaaacttaatatactgagtaatgcggcagaaaagggccatgatgttctgcgaaatagagatgatgacaaagagttagaggaggagaacgtggaaaaacatatgcatagcaacagtaaaagggatcagcgacattacaaagaaaattcttcggaattgcccgactcatatgattattcggattctgaatttgaggacaatttggaaagaaggctacaagagatcgaaactgattccgtggatagcgccgataaggatgaggtgcatttttcagtgaataatacaatgaaccctgacgttgacgattttagtgatggcttgaaatacgccatctcggaggacgaggatgaagaggaaaactactctgatgacgatgactttgacagaaaatttcaagattcagggtttcaaggggagaaagacgatttggaggaggaaaacgacgattaccaacccttatcgccgccaagagaactggaccctgataaactatatgctttatatgcgttcaatggccatgattcttcacattgtcaattagggcaagacgaaccttgtatacttttgaatgaccaggatgcctattggtggctggttaagaggatcactgatggtaaaatcgggtttgcgccagcggaaattctagaaacctttccagaaagactagctcgattgaattgctggaaaaatgaaaacatgtcttctcaatcggttgcttcctccgattcgaaagatgattccatcagctctggtaacaagaatcaaagtgatgcagagagtataattccgacacctgcactgaatggatatggtaaggggaacaaatctgttagtttcaatgatgttgtcggttatgcagacaggtttatagatgatgcaattgaagatacctcgttagatagtaacgatgatggcggtgaaggcaatggacagtcctacgacgatgatgttgataacgacaaggaaacaaaagtaacgcaccgggacgaatacactgaagcgaagttaaattttggcaaattccaggatgatgatacgagcgatgtagtgagcgacgtctcctttagtacatctttgaatacaccactaaatgtgaaaaaagttcggagacaagacaacaaaaacgaaagtgagcctaagacatcatcgagtaaagacagagaagatgattataatgcaaatcggtatgtggggcaagaaaagtctgaaccggttgacagtgattacgataccgatctgaaaaaagtatttgaagcgcctcgtacgccatttgcgaatggtatggcaaaatcagactctcaaaattccctttcaacaattggcgagttttcaccgtcgtcgtcagaatggacaaacgaatcaccatccactccaatagttgaagaaagcagcagtattccatcatctagagcaataaaggacatttcacaatatattcatgcaaaatcgaaaattgaagagacaacaaacgtggaaaacacagaggggcaaattcaagccagcttggggtctagtggaggaatggcaaatcaaactgacgcagaacaacctaaagaggagctagaaaaacatcacagtacccccgaagaagaaaagcaatcaaccttatcgttacactcatcatctgaagaagatttttacatggatgaacaaagggcggtatcatcagcaagcataaatagttcactttccggatcaagggcattgtctaataccaatatgtccgatccggcttcgaagcccaattctttggttcaacatctctatgctccagtttttgacagaatggatgtgttgatgaaacaattggatgaaattattcgtaaatga

SEQ ID NO: 79052 - DNA, 348 bp, Saccharomyces pastorianus
atgaaaatggtattgaggcgacataagttgttagcacagcgaacatggttgcaggttaagttctctggtcgttctgggagagtatttacgttaaaaaataggaatcaattaagcataatcatgccgttttgtgtgctacatatctgtttcccactatataaagtcacgttagaatgcaatttatctaatctactaccccattttagcgtcagtggattggtaaatccctttgctagcaaggtactgtcagaatatttctccttcctttcaaataattgcaccaatatcttgccaatacttcacttgagattgttctacaatatccgctgtcttggaaagcaattttga

SEQ ID NO: 79053 - DNA, 1719 bp, Saccharomyces pastorianus
atgctgaggaattgtttgaggaaattgggaaatcatcaaacgaaatgttcggtaaaaacgttacacaccccaatctatagaacaaaaaaccttcaggttctcagagatacgctctctggtattaagctgttggaaaaaataataacttcatcctcctacaataaaacattaatatatgaacctaagtataaatccaagccacaggtcgttagttctcatgataccatgagacttcacaatgtaatgcgtgagttactggattccctacaagtagatgaagctaccaacacacgacttcaatcaaacaggcctcgaaagctggggagggttggtctacaattattcatggattgcattcgggacaacttaacagcaacttcaacatctttgacatgctctttactggagcactatttcaagtatcccgaaaaagaagtgaccaatgggatcaaggccggattacggtatatcagagattttcttgcgaagaacaagattatagtgaaaagccaaaacgatgttgatgttctggtcgagcaattgactatgtcctcctcagacagccaaagcatcaaaagggttttgaaagccattaattatgaattgttttcggatgacattgtgcgggtcataaacggcaacaaaacttacgatgaggttgatgtatccaagggttggaaatatccagctggtattttagatagtaatgaagcctatttaaggtccctggagttgcctactaagaaattagtttccattgataaagatatgctagttcttatgtatgatgggacgttacgagacgctaataaaattctacccacgataacgtatgcaagaaagttgagaaaatctgtcctcttaatcgttaacggagattgcacgggtgatgcattaacatccgttacaattaacaataacagaaacaagagagaaaataatgaaagccgaatagtggttttgaagtactctaaaaaggcgaacaatgacttagcgccacaggagaatcttgattttataaagttcttacggttgccttgcggatatgacagtatctactcaccagaatatagtcctttagtgccaagcaaaatgtgtgcggataaatattacggcagtatcgaatccataaaggcgaccacaggggaggcattcttatataactccattgacgctgaagcgattccaaataaagttccgaaatccttcctccaaaatacggtcactttaagcattggtggacataacgaaatcgaaatcgacagaagaagaaatgcaatagataattgcttaaataacgtcctatgtcatgggctggccaaaggtttcatcccaggttacggcatctccctactgaaggcaattccaggtttgaatgaactgaaagcaaatgaacccaatttcatgactaaggtaggcatcaatgctgttttatcagcagttattctcccatcagaagtggcgtttaagaatgcatatgggtacaactattatgagatcaatagcctgatagcaggcgctataaacgaaaaattgtttccaatggccaagttttctccaaattcagaaccggtgaacacagtaaaggatggaaacttggagccatggagcaaaatggattcttgtttagccggtgtagaaacgttcattgaattacttacaagctgtaatacaattatcacatgtgtatacaaaaagcctgaacggcacaaagcctag

SEQ ID NO: 79054 - DNA, 1449 bp, Saccharomyces pastorianus
atgagtgagaaagaaacaaattacgtggaaaatctccttacgcaattagaaaatgaacttaatgaagataacttgcctgaagatatcaacacactattaaggaaatgttctttgaatcttgtgactgttgtctcccttccagatatggatgttaaaccactactggctacgatcaagcgttttctgacgtctaacgtatcctatgattcattgaattacgattaccttttggacgttgtggacaagcttgttcccatggctgattttgacgatgttctagaagtttatagcgcggaggacttagtgaaggcccttaggtcagaaatagatccattaaaagtagcagcatgtagagtcattgagaattcgcagccaaagggtttattcgcgaccagtaatatcatcgatattctattggatattctatttgatgagaaagtggagaatgataagctcattacagcaatcgaaaaagcgttggaaaggttgagtacagatgaattgattaggcgtcgattatttgataataatttgccatacctggtgagcgtaaagggtagaatggaaacggtttcttttgtcagattaattgacttcttgactattgagtttcaattcatcagcggacctgagttcaaggatatcatattttgctttactaaagaagagatactgaaatccgttgaagatatcctcgttttcatcgaattggttaattattatactaagtttttgctggaaatacgaaatcaagataaatactgggctttaagacatgtaaaaaaaatactgccagtatttgctcaactttttgaagacacggagaactatcctgatgtcagggccttttctacaaattgtcttttacagttattcgcagaggtgtcacgaattgaggaagatgaatattctttattcaagactatggacaaagattctttaaaaattgggtccgaagcaaaattaataaccgagtggttggaattaattaatccgcagtacttggtaaaatatcataaagatgtggtcgaaaactattttcacgtcagtggctacagcattggaatgttgagaaatctttcagcagatgaagaatgtttcaatgctataagaaacaagtttagtgctgagattgtcttaagactaccgtacttagaacaaatgcaagtagtagaaaccttgacaagatacgaatacacttcaaaatttctgctcaatgaaatgccaaaggtgatgggcagcttgataggtgatgggagcgcaggtgctattatagatcttgagactgtacattataggaattctgccttgagaaatttactggataaaggtgaagaaaagttaagtgtatggtatgaacctttattgcgagaatactccaaagcagttaacggaaaaaattattccacaggcagtgaaactaagattgcagatgattatgttgcataa

SEQ ID NO: 79055 - DNA, 1695 bp, Saccharomyces pastorianus
atggatggtaacaaaaccatgttcagcctttcaacaattggtagaagaagccaaaaaaaaaaaaaaacagaaacgccaaccatgcacttttctttgaagcaattggctgtcgctgcgttttacgctaccaatttaggctctgcctatgtcattcctcaattcttccaggaagcctttcaacaagaagagccaattgagaattatcttccgcaattaaacgacgatgatagctctgccgttgctgccaacattccgaagccacatattccttacttcatgaaaccacatgtagaaagtgaaaaattgcaagataaaatcaaagttgacgatttgaacgctactgcttgggacctctaccgtttagctaactattctactcctgactacggtcaccctacccgtgtgatcgggtccaagggtcataacaagactatggaatacatattgaatgctttcgatgacatgcaggactactatgatgtttctttgcaagagttcgaagctttatccggtaagatcatctctttcaacctctctgacgccgaaaccggtaaaagctttgctaacactacagctttcgcactttctccacctgtggacgggttcgtaggtaagctagtcgaaattcctaacttgggatgtgaagagaaggattacgcctctgtagtcccaccaagacacaacgaaaagcaaattgcccttatcgaaagaggtaagtgtccttttggcgataagagtaatttggccggtaagttcggtttcaccgctgtggtcatttacgacaacgaacctaaatctaaagaaggactacacggtacattaggcgaacctaccaagcacactgtcgccaccgtcggtgttccatataaagttggtaaaaaattgattgccaatattgcattgaacatcgattattcattatattttgccatggactcttatgtagaatttatcaagacccagaacatcattgccgacacaaaacacggtgatcctgataatattgttgcccttggtgctcattcagactctgttgaggagggcccaggtatcaacgacgatggttccggtactatttccctattgaacgtcgctaagcaattgacccatttcaagatcaataacaaggtccgttttgcatggtgggctgctgaagaagaaggtttgctaggctctaacttctacgcttataacttgaccaaagaagaaaactccaagatcagagtatttatggactatgacatgatggcttctccaaactatgaatacgaaatttatgatgcgaacaacaaggagaaccctaaggggtctgaagagttgaaaaacctgtacgtagactactacaaggctcatcacttgaactacactttggtcccatttgacggtagatccgattatgtcgggtttatcaacaacggaattccagccggtggtattgccactggtgccgaaaagaataacgtcaacaacggaaaggtcttagacagatgctaccatcaattatgtgatgatgtctctaacttatcctgggacgcattcattaccaacaccaagttgattgctcactctgtggccacctatgctgactctttcgagggtttcccaaaaagagaaacccaaaagcacaaagaggtggacatattgaatgctcaacaaccacaatttaagtacagggccgacttcttgattatttaa

SEQ ID NO: 79056 - DNA, 582 bp, Saccharomyces pastorianus
atgtcgacgtcactgctcttttcactttcgccgtcatcttcgtcctctatgagattgcgtgcctcgaattcttttcccatattgaacttcttcttagatttggacgctacaccttcattatcatcgtcttctgcctcattatcggagctctcagcaccattgtcaatagtttctaggcccttttgcacaagagatgacccgcttccttctgatttgatgaatcctcttctaaaatcacccttctcacttacaaaattcccagccgccaatggaccgctagagataacgtgtgtgttatttaagtatttggccattcgcctttgctggccgccagcgccggttactcttttattcttgttattgaaatgtttcttgtcattacctctcttagattcctcctctagctttactttggacgcagctgcttctctttcttccttggactttcttgcaactgcttttggtttaaactttaatgagggcttggcagatcctcctccattggaggaggaatcttttaatgatggcaagcgcccatttcctttattactgctcatacttaatgaatgctatcccggttaa

SEQ ID NO: 79057 - DNA, 1866 bp, Saccharomyces pastorianus
atgaattctagctatacacagagatatgcactgccgaagtatatagcaatatcagattatcttttccatcggctcaaccaactgaacatacataccatatttggactctccggagaatttagcatgccgttgctggataaactatacaacattccgaacttacgatgggccggtaattctaatgagttaaatgctgcctacgcagcagatggatactcacggctaaaaggcttgggatgtctcataacaacctttggtgtaggcgaattatcggcaatcaatggcgtagccggatcttacgctgaacatgtaggaatacttcacatagtgggtatgccgccaacaagtgcacaaacgaaacaactactactgcatcatactctgggcaatggtgatttcacggtatttcatagaatagccagtgatgtagcatgctatacaacgttgattattgactctgaattatgtgccgacgaagtcgataagtgcatcaaaaaggcttggatagaacagaggccagtatacatgggcatgcctgtcaaccaggtaaatctcccgattgaatcagcaaggcttaatacccctctggatttacaattgcataaaaacgacccagacgtagagaaagaagttatttctcgaatattgagttttatatacaaaagccagaatccggcaatcatcgtagatgcatgtactagtcgacagaatttaatcgaagagactaaagagctttgtaataggcttaaatttccagtttttgttacacctatgggtaagggtacagtaaacgaaacagacccgcaatttgggggcgtattcacgggctcgatatcagccccagaagtaagagaattagttgattttgctgattttatcatcgtcattggttgcatgctctccgaattcagcacgtcaactttccacttccaatataaaactaagaattgtgcgctactatattctacatccgtgaaattgaaaaatgccacataccctgacttgagcattaaattactactacagaaactattagcaaatcttgatgaatctaaactgtcttaccaaccaagcgaacaacccagcatgatggttccaagaccttacccagcaggaaatgtcctcttgagacaagaatgggtctggaatgaaatatcccattggttccaaccaggtgacataatcataacagaaactggtgcttctgcatttggagttaaccagaccagatttccggtaaatacactaggtatttcgcaggctctttggggatctgtcggatatacaatgggggcgtgtcttggggcagaatttgctgttcaagagataaacaaggataaattccccgcaactaaacatagagttattctgtttatgggtgacggtgctttccaattgacagttcaagaattatccacaattgttaagtggggattgacaccttatatttttgtgatgaataaccaaggttactctgtggacaggtttttgcatcacaggtcagatgctagttattacgatatccaaccttggaactacttgggattattgcgagtatttggttgcacgaactacgaaacgaaaaaaattattactgttggagaattcagatccatgatcagtgacccaaactttgcgaccaatgacaaaattcggatgatagagattatgctaccaccaagggatgttccacaggctctgcttgacaggtgggtggtagaaaaagaacagagcaaacaagtgcaagaggagaacgaaaattctagcgcagtagatacgccaactccagaattccaaccacttctaaaaaaaatcaagttggatactgatctgatctctccgccctactaccagggaccctcatga

SEQ ID NO: 79058 - DNA, 1449 bp, Saccharomyces pastorianus
atgcctctatcaaaggtggagcactacctttcataccatacgcgcttactcttaccccatgttttgtctcttcagtcatcacatcgtgttgcatacatcttttcgctattatctgcggtgtcagctggcttcattactttgatatctctttactctcaaccgtggcagaaacatttaaattattccttatggcaaatcaacaccatcgctagtatgactaatttggggatgtacttgacgccaccaatcttggggatgatcgctgattctcatggccccattactttaagtcttttagccatcatagggttcatacctagctattcatatctggcttacgtttttaatcatccggagttatctctcggaggaaatggtgactcatcattcaatctatccatcatttgtttcgttttcataggtatatcaacaagcgctttatactttagcgctttactgacatgcactaagctatatcctcatacaaaactactatccattagcttaccaacgacatgttatggtatttcttctgtagtcggttctcaactgctaagaatcaaatggttctggtcctctaacgcaagttcttcctcgtccaatagtgacttaaacctgggaagagtattccaaacatttgccctcgtttatgtcgttattgggctacttgcatggatagccaccagcgtggtatcacttttgcattttaatgaagagcaagacaaccaaaaacggctggatgatcaaactgatgtggaacaatcaccgctgttagaacgaagtaatcatgttcaagaaaagtttacgcagacgatgctaaggatctttagtgatcctgtgacatatatcctagcggtatcaattttgttatcacttgggcccctcgagatgtttattgccaatatgggatcactgactaacctgctagtccaattagatgcgccaaccttatctacaaagttgttatccacatacgcgctatcttccacttttacgagattgctcacaggcgtagtggcagacttcttcgccaagaaaaaaatatcaattaaatggatcctgttgactttcctttcattaggggtatgtgcacaactgtttttattgaaaatgacctcttcagcgtcaccctgggggctagtacctacaggatcattggttggaattgtatacggtggacttttcactgtttatccgacgctggtcctgttagtatggggcgaacgctcattcgggactgtttacggtagcttactaattgcacctgctataggttctatgatattttgcatgttgtatgccaaattttacgattctcgctgtatgagtggcggaggagatctgcgaaatccgtcctgtatttcggctgtctacaagtacagcagtatcgcattcgttgtatccgctgttctttcagctgtagtattttggaaattaaaaagtagaaaa

SEQ ID NO: 79059 - DNA, 693 bp, Saccharomyces pastorianus
atgcctgcaggtcagagaaatgctagaattttaagcgttacaacgctattattgttgttagtgtttttcgtagcgcaaaatgcgaacttcttgacggtagagataaaagaggaaacttctaaagcatttagtactaatatggacaatatggctgcaggatcttccagggaatatgctgctatgccgacttctaccacgaataaggggagctctgaagtagacgaagaaattaatgaaataaaacagaaggtgggactccaacagcccatagcatcggttgatgatagtttgtcggccattaaaaacgataaagggtcgcgaataaccaaagcttttaatgttcaaaaagaatactccctcatactagacttgtctccgattataatatttagtaaaagcacctgttcatatagcaagggcatgaaggaactgcttgaaaatgagtatcagtttatcccaaactactatatcatagaacttgacaaacatggacatggggaagagctgcaagaatatatcaagttggtgaccggtagaggaactgttccaaaccttttggttaatggagtatcaagaggaggtaatgaagaaattaagaaactgcacactcaagggaaacttttagaatcattacaagtctggagtgatggtaaattctcagttgagcaacgtgaaaaaccttccaataattga

SEQ ID NO: 79060 - DNA, 366 bp, Saccharomyces pastorianus
atgtctgatattttggatgagattgtcatagaagatgttgtggcaaattgcccccaggagtttctgcaatatcataaatgcataagagataatgaggaaaatcctgggaagtgtaaagatggaagaatgatattatctacatgcattagagaaaaagtgcccagtgtgaaaagtatcatgagcgaatgtagtgagccaatgaagaaatatgaccaatgcattcgtgataatatgggtacaagaactattaacgaaaactgtctaggattcttacaggacttaaggaaatgtgcggaattgcaggttaaaaataaaaatattaagccttcaattaatggagtaaacttggaattaatcaaggactga

SEQ ID NO: 79061 - DNA, 1482 bp, Saccharomyces pastorianus
atggataagtacggacatatagctcatcaagaaggcgatgtttgttattatattccaaggctgttcaaatacaacagttattatagtgggacagaggacgttcgaatatttgttggagatttaaagtaccggatgagagtttctttgcaaatttgcgaaaagtattatgataggcggttgtcgatgttgttctggaaaaatcatcctttacagcaaatacaccttattggctgcatcattggactccagttcaaatggattgggaaacaagaatacattttttttcagttggacgattgtacttcagactcttcattggtgggttatactagtgacatgagattcttaacatgtaaagttaagaaggatagcatcctatcatgggggttgaacataaccgatttgataggcttaactcttcatgtctacgggcaagcaagtttgaactatcaagagcttcaagttgaatatttaagattatgctacagtttaacggaagaaatagatcattggaaaatcacaatgaacatgcgtgagcaacttgacacgccttggtccttaagcgattttgtaattggagaattgttcacgcaagagcaagagtggacacctgaggcatcacagattgaggtagtaaacccggattttgtaggtttagggtacaaaaccccagaaagtaaaagaaatgaaactactttcatcgagcaactgcaagaggaacgcttgaaggatgaattagaaattattagtccatacaatagcacagatacttcgaatagtgtgcattccttgtcatttcggtttgtatcgtctctaaaggattttcctgaaactcacttttcgaatccaggtgatcaaattgacaacggcaatgacgaacagttaaaaaaactagaatatcaaagcgctaatctacctgtgatgattcccaataggacatcagcaaagtcaaacttgatgtttatcctattaggactacaaatgaaagagatttctaattctgacctttacaaactaaaggaagtacgcagcgtagtaactagcttagcatcgtttttgtttcaacaacaaaatgttggcgtcatgaaatcttttgactctttggaaaaggaagcgtttcgagacctggttaatcgtctagtctgccagggtttgatcggactaaaagataaaacaagtgagacatttgatttgcttcctctaaaaaatctttttgaatatgctgaaaaacgtatattagttctaatgaagctacaatgttatacgggcactgtgcaattaagtcatgttcaggaaaagctacatttgccgtacataacaacgaacggcatcgttgatgttttcaaagaatgtcttaaaaggacaaagaaacagtatcctgaggtactaaaaaattggtggattgatcttgatccgaaaaatggtatggaagaccaaaacagtggaatattattacatttggaatacgcagcatattcataa

SEQ ID NO: 79062 - DNA, 3729 bp, Saccharomyces pastorianus
atggccccagctacccctaaaacttctaagactgcacacttcgaaaatggctccacatcttctcaaaagaaaatgaagcaatcgagtttgttatcttttttctcaaaacaggtaccttctggcacaccgtcaaagaaggtccagaagcctactccagcgactttagaaaatacagctactgataagataacaaagaatccacaaggaggaaagacaggcaaacttttcgtagatgtagacgaagacaatgatttgacaatagctgaagaaacggtatcaactgtaaggagtgacataatgcattctcaagagccccaatctgatactatgttaaatagtaacacgacagaacctaaaagtaccactacggacgaggatttatcatcttcccaatctcgaaggaatcacaaaaggagagtgaattatgccgaaagtgatgatgatgactcagatactacattcactgctaaacggaagaagggtaaggtagttgatagtgaaagcgatgaggatgaatatttaccagataaaaatgacggcgatgaagatgacgatattgcagacgacaaagaggacatcaagggagaattggcagaagatagtggtgatgacgatgatttaatctctttggcagaaacgacttctaagaaaaaattttcaaacaacacttcgcattcttcatcgccctttacaagaaatatatcccgtaataactcaaaaaagaaaagcaggccaaatcaggcaccaagtagatcatacactccttctcatagtcaaccatcagcgacttctaagtctagcaaattcaataaacaaaatgaagaacgatatcaatggttagtggatgaacgagatgctcagcgccgtcccaagagtgatccagagtacgatccaagaacactgtacatcccatcttctgcatggaacaagtttactccgtttgaaaaacaatattgggaaattaaatccaaaatgtgggattgtattgtctttttcaaaaagggtaagttctttgaattatatgaaaaggatgcattattggctaatgcattatttgacttaaagattgcaggtggaggacgtgctaatatgcaactagctgggataccagagatgtcatttgaatattgggccgctcaatttattcaaatgggatataaagttgcgaaagtggatcaaagagagtcaatgttggctaaagaaatgagggaaggttctaaaggtatcgttaaaagagaactccagtgcatattgacatcgggtacattgactgatggagatatgttgcattcggatctggctactttttgtcttgccatcagggaagaacctggtaacttctacaatgaaactcagctagattcatcaacgatagtgcaaaagctgaatacaaaaatattcggtgcagcattcattgatactgcaactggtgagcttcaaatgctggagtttgaagatgatagtgaatgcaccaaattggacacattaatgtcgcaagtaagacctatggaggtcgtcatggagaggaataacttaagcacactagctaacaaaattgtaaaattcaattcagcacccaatgcaatttttaatgaggttaaagccggtgaagaattttatgactgcgataaaacctatgctgaaatcatatcatcagaatacttttctacggaagaagattggccagaagttttgaaatcctattatgatacgggtaaaaaagttggctttagtgcatttggtggattattgtattatttgaagtggttaaaactggataagaatttaatttcgatgaaaaatatcaaagagtacgattttgtaaaatcgcaacactccatggttttagatggtatcactttacagaacttggaaatattttccaattcgtttgatggttctgataagggtactttgttcaaattattcaacagggctattactccaatgggtaagagaatgatgaaaaagtggttaatgcatccattattacgtaagaatgatattgaaagcaggctcgatagtgttgactctttgttacaagatattactttaagagaacagctagagataacattttcaaaattgccagatttggaaagaatgttggcccgtatccatagtaggacaattaaaatgaaagattttgaaaaggtaattaccgcttttgaaacgattattgaattacaagactctttaaagaacaacgatttgaagggagatgtttcaaaatacatatcctctttccctgagggacttgtggaagctgtcaaaagctggactaatgctttcgaaagacaaaaagcaatcaatgaaaatatcattgtaccccaaaggggatttgacatagagtttgataagtcaatggatagaatacaggagctagaagacgaattgatggaaattctgatgacttataggaagcaattcaaatgttccaatatacaatataaagattccggaaaggagatatacactattgaaattcctatctctgcaactaaaaatgtcccatcaaattgggttcaaatggctgcgaacaaaacgtacaaaagatactactctgatgaagtaagagctttagcaagatcgatggcggaggctaaagaaatacacaagacgttagaggaggacctaaaaaatagattatgtcaaaaatttgatgcgcattataatacaatttggatgccaaccatacaggccatctctaacatagattgtttgttagcaattacaaggacatctgaatatctaggtgctccctcttgtaggccaaccattgtagatgaggtggactcgaaaacgaatactcaattaaatggttttctgaaatttaaatctttaagacatccatgctttaacctcggcgctactacagcaaaggacttcattcctaacgacattgaattaggtaaagaacagcccagattaggattgttaacgggtgccaacgcagctggtaaatccacgatattgaggatggcatgtattgccgtaattatggcacaaatgggatgttatgttccttgtgaatctgccgttctgacgccgattgatagaatcatgactcgtttaggcgctaatgataatatcatgcaaggtaaatctactttttttgtggaattggcggaaacaaaaaaaatattagacatggctaccaataggtcattattagttgttgacgagttgggaagaggaggttcatcgagtgatggttttgcaattgcagaaagtgtgctacatcatgtcgcgacacatattcaaagtctgggcttttttgccacacattatgggacattggcatcaagtttcaagcaccatcctcaagtaagaccactgaaaatgagcattctagttgatgaagcgactaggaacgttacatttttgtataagatgcttgaaggacaaagtgaaggctcttttggtatgcatgttgcgtcaatgtgtggcatttcaaaggaaattattgataacgcgcagattgccgctgataatttagaacatacttctaggctagtcaaagaacgtgatttagctgcaaataatttgaatggtgaagttgtctctgtgccaggtggcttacaaagtgatttcgttcgaattgcgtacggagatggactgaagaatacaaaattaggttctggtgaaggggtcttgaactatgattggaacataaaaaggaacgttttgaaaagtctatttagtataattgatgctttacaattctag

SEQ ID NO: 79063 - DNA, 2949 bp, Saccharomyces pastorianus
atgtcctcacgtccaagttcagcagtgcctaattcggcatcactcagtgaggaccagagcagtgatagaagtaaatttcctaaggcagatgacttaattgatgaaagagatagaaaactgaccgaactatactgcgtatcccgcttgaaccagctgctagagttaacagatgaaaacaaacttcggaaggaaatagatgcatttttaaagaaaaacgatatacgaaggggtataaggtttgacgaggcgtcactgccgaagctcctacatacagctgcgactcccataacaaaaaagaaattgaaggatgtaaatttaataaatgtacctaaccagaggctatccgattctaaaatgagtagggaactgccagacaatagcgaaaatgtatcagtcaaatcagagagtcattttgttccaagccacgataattcaatccgtgaaaatatggtggattctttgaggccagctgaaaagacaggaggtatgtggaacaaaaggccactcgagtcaactatgggaggtgaagaagagcgacatgaaaaaagacagaagatgcaatctcagtcattggaatcttctaataattcggaaatggcttcattacctatttcgccgcgtcccccagtgcctaatgcattagcacactacacttattatgagaacatcgagtacccaccagcagatcccactgaggtgcaacctgcagtaaaattcaaggatccgttgataaagaacattatggcaaaagagatagatacatcagaccattataacgagaacaatgttgacgcatcagagaccgtatttttattaatgaacgattatataccatcgaaaataccccaggctttgcccttagcagaattgaagtacatgtcacaaactctgcctcttattaatctaataccgagagctcacaaggctttgaccactaatattataaataacgccttaaacgaggccagaattactgttgttggctcgcgaatagaagaactaagaagacttggattatggtctttaagacaacctaaaagattcatcgatccgtggaaacaacacaatacgcatcaaaacatacttttagaagaagctaaatggatgcaagcagattttaaagagggccacaaatataaagtagctatctgcacagcaatggcacaggcaatcaaggactactggacctatggggaaatatgctgtgtaaaacgtaaaacacttccacctggtaaggaaaataaattatctgacgacgggcgcatatctgaaaagtccggtagaccatcagatacttcaagaaatgattccgatattagcatagccggtaaggatgacattggaattattgcgaacgttgacgatattactgaaaaagaaagtgctgctgctaacgataatgatgagaatggaaagaatgaagcaggagctaggagtgattttgattttgcagatggtttgttatctcaagaaggtgcccacgatcaaattatatcttctattgacaccaagttacttctaaaaaagccatcctcctcaagcgaagttgttttaatacaacatgaagtagctgcatcatcagcgttgatcgaaaccaaagaatcagagaaagagctagcccccccatttaaactttcaatctttgttgacgaactcaatgcttttgagaaaacattaatacaggatttaccgctgtataatggtattaatgaagaacggccaaaaaaagatgattctttaccatttattccaatttccaaatcagtagtgtcactggatgataatggattttataagttacttgagcgtcaattgattgacgaagaaccatcaatatcacaattgagcaaaaggcggggtatgttctatggtaatagaagaaatcattatttaagaccaccagcagtaccttcattacgctatcttcaaaatagaataccgactatatggctgtctgaggacgatcaggaactggtcaaaaatattaacacatatggctacaattgggaattgattagtgcacatatgacacatcgcctcacatattcttatttgtcgaatattgaacgtagaacgccatggcagtgttttgagcgttttgtacaattaaatgaacgattcaattttagtgacctcaagggtcccagagcacatagtgctcaacagtggttgattgaagcccataaatttcagcagagacagaatagaagaatatcgcctttaggtgtaaatacagaatccatacaaagaggtcataggagactccgttgggcgagcatgtttgaggcgattagaaaatgtatgaaaaaaagagaaaatacgccgcgtcccaatccaacccagccaaggaaaccgttagattgtaaaaacatgaaggtccctaccccagcagaaatgtcgcttttgaaagcccaaagagatgaggcattgagaagggatatacaattgagaagaacagtgaaaaatagattacaacagaggcaacagcaaagtcagcaggcacattcatcgcgagctcaaagtccaataccttcaaatggcaaatcttcttcaaatttggctagaaatgggcaagcgtcggctccaagaccaaaccagaaacagtatactgagcaagatatcattgaaagttactcgaggaagttgttggagcaaaaaccagacattggtcctgagatggcccttaaggcggcaaaaaactattatagaaccttgagagaacaacagcaacagctaaagcagcaccagattcaacagcaaaggcagcagttacaggaggagtccagtcatgtgcagcaactgcagcaactacaaccagggtctcaagctccgccaccgaaatcatctccatctcaatcttctctttccaatatttctaacattaattctgctccaaggataaagtcaccaactccacaggagattttacaaaggttccaaaaacaatga

SEQ ID NO: 79064 - DNA, 495 bp, Saccharomyces pastorianus
atggaagaaaagagagaaataatgtctgacgaagcaaaggaaaagcgtgaattagaaagccaaaaggaattaagtcataataaatccgaaaagtctgtggaacctaagccaaagagaaggagaagaagaaactatgacgattatgacgctgaagtagcaaaagaggagactaaggctaaaaatggtttgacgaagagcgaaaataatggtactgttgaagattctgaatctgatatggacgatgccaagttagacgcattgatgggaaatgagggagaagaagaagaggacgatttggcagaaattgatacctctaatatcatcacatccggaagaagaacacgcggcaaagtaattgactataaaaagactgcagaagaattagacaagaaggaacctagcacagactctaaagatgatgtaggatatggtgaaaaagaagaagacgaagaagacgaagaagacgaagaagacgatgattttaaagagcagtaa

SEQ ID NO: 79065 - DNA, 387 bp, Saccharomyces pastorianus
atggaagagctcatttgtacatatccatatcattcaaatcttttcatgttcctattcttgttcttttgtcccagcaaacgcacacggcggggtcaccccaaatttttatttaccttatgttataagagcaaccatctcatccccaaacttctccctccctcccttttcacaaagagagtaatgctcaacccaagtagccatccgccttccccggattttcccacaggatcttctgcaagtcctagggtcaaactgagaccatccacgttgtgggcaccaccactcacagtatcctctgcctttgcggcttccagtagttctactgcccctgtcaccgtcacagataaacctgtcacacccgctgtatcaaagcggtatcaacgttaa

SEQ ID NO: 79066 - DNA, 705 bp, Saccharomyces pastorianus
atgaaagcagacgcgaaacaaataacacatctactcaaacctcttcgacttttattattgggggctccagggtcaggtaaagggacacagacttcgagattactaaagcaaattccacaattatcttcaatttcgtcaggcgacattttacgtcaggaaataaaatctgaatctaccctaggccgagaggctactacctacattgctcaaggcaagttattaccggatgatctcataacgcgtctgataacttttcgtctttcggcattgggttggttaaaaccatctgccatgtggttgctcgatggatttcctcgaactactgcgcaagcttctgccttagacgagctgctgaaacagcatgacgccagcttgaatctagtggtagagctagatgtacccgaatccaccatattagaaaggatcgagaacagatatgttcacgttcctagtgggagagtgtataacttacaatataatcctcccaaagtgccaggattagacgatatcaccggagaaccattgaccaagaggcttgatgacacagcggaagtgtttaaaaaaaggctagaagagtacaagaaaacaaatgagcctttaaaagattattacaaaaaaagtgggatttttggtaccgtctctggggaaacatcagatattatcttcccgaaattattgaaccttataaccagcaaattcggctaa

SEQ ID NO: 79067 - DNA, 486 bp, Saccharomyces pastorianus
atgattgtaaggttacatgcaatatatcaagatattactagagattatttaccgccagcttctctaaaccacctgatacttctatctaaacaaacacagcataaactttcatttaaatcagctcccataccagatctccaaccttttttcaaaaacttcacgtcaaagacaccaggttcagctaaagaatctccatgttcatcaacagctaagatatcctcttcaatttcaatatcatcacaatgcatattcaatgtagtgattctttcctttgtttttatatcccaaaatctcaatttaccatcccatccggcactgcataatgtttcaccagaatcattaaacgatagactcatgacccagctagaatgtgcaaattcacccagacttgcctgcgagctatgggttggtacggataaggagcctattctttcaccaaattcagtttcatatagagtgatgcaaccaaatgaatttgaatcgtga

SEQ ID NO: 79068 - DNA, 306 bp, Saccharomyces pastorianus
atgtacatcgtatatgaatatgccatttcaacaaattggatatggttgtatgtttggctttttcttttcctggattccggctgtcaaatactactacgaatagagtcagaacaggcttttctgtcccttcctcctattgtttcctttgctctgtccgtggctactctcatctttttctattctaagagaatttccatctgttaccacatgcttcacatgtacagaaagtggtcaatggttcatccgcagatcttgtttgcaattgatagtaagataccttcttctctttacatttaccacaagtaa

SEQ ID NO: 79069 - DNA, 2751 bp, Saccharomyces pastorianus
atgactgataatacatcctcttcatcctctgcatcctctgcttccgctcatcagcctactcaagaaaagcctgccaagacttacgatgatgctgcatctgaatcctcagatgatgatgatattgatgctttaatcgatgaattacaatctaccccaggtgtcgaaggttccgaaagtgaagacgacggtccagtcgctgccggtgaagctagattagttccagaagaacttttacaaaccgatccatcttatggtttgacttccgatgaagtcatgaaaagaagaaagaagtacggtttgaatcaaatggctgaaaacaatgaatctttagttgttaaattcatcatgtttttcgtcggtccaattcaattcgttatggaagccgctgctattttggctgccggtttgtccgattgggtcgatttcggtgttatttgtggtttgttaatgttaaacgctggtgttggtttcatccaagaattccaagctggttctattgtcgaagaattgaaaaagactttggctaacactgctgttgttatcagagacggtcaattagttgaaattccagctaacgaagtcgtcccaggtgatatcttgcaattggaagatggtactattatcccaacagatggtcgtattgtcactgaagaatgtttcttgcaaattgatcaatctgctattactggtgaatctttggccgtcgacaaacattacggtgaccaagctttctcctcttctactgttaagagaggtgaaggtttcatggttgttaccgctaccggtgacaacactttcgttggtagagctgccgctttggttaacaaagcctctggtggtcaaggtcatttcactgaagttttgaacggtattggtattatcttattggttttggttatcatcactttgttggttgtctggactgcttgtttctacagaactaacggtattgttagaatcttgagatacactctaggtattaccattatcggtgtcccagtcggtctaccagccgtcgttaccaccactatggccgtcggtgctgcttacttagccaagaaacaggctattgttcaaaaattgtctgctattgaatctttggccggtgtcgaaatcttgtgttccgacaagaccggtactttgaccaagaacaagttgtctttgcacgaaccatacactgtcgaaggtgtttctgctgatgacttgatgttgactgcttgtttggctgcttccagaaagaagaagggtttagatgctattgataaggctttcttgaaatctttgattcaatatccaaaggctaaggacgctttgactaagtataaggttttggaattccacccattcgaccctgtctccaagaaggttactgctgttgttgaatctccagaaggtgaaagaattgtttgtgttaagggtgctccattattcgtcttaaagactgtcgaagaagatcacccaatcccagaagatgtccatgaaaactacgaaaacaaggttgctgaattggcttctagagggttccgtgctttaggtgttgctagaaagagaggtgaaggtcactgggaaatcttaggtgttatgccatgtatggatcctccaagagacgatactgctcaaactgttagtgaagctagacatttaggtttaagagtcaagatgttaactggtgatgccgtcggtattgctaaggaaacttgtagacaattaggtttgggtaccaacatttacaacgctgaaagattaggtctaggtggcggtggtgacatgccaggttctgaattggctgattttgttgaaaacgctgatggtttcgctgaagttttcccacaacataaatatagagttgttgaaattttgcaaaacagaggtttcttagttgctatgactggtgacggtgttaacgatgctccatctttgaagaaggctgataccggtattgctgtcgaaggtgctactgatgctgccagatctgctgctgatattgttttcttggctcctggtctatctgctattattgatgctttgaagacctccagacaaattttccacagaatgtactcttacgttgtttaccgtattgctttgtctctacatttggaaatcttcttgggtctatggattgctattttggataactctttgaacatcgatttgattgttttcatcgctattttcgctgatgttgctactttggctattgcttacgataatgctccttactctccaaagccagttaaatggaacctaccaagattatggggtatgtctattatcttaggtattattttggcagtcggttcatggattaccttgactactatgttcttaccaaagggtggtattatccaaaacttcggtgctatgaacggtattatgttcttgcaaatttccttgactgaaaactggttgattttcattaccagagctgctggtccattctggtcttctatcccatcatggcaattagctggtgccgtcttcgctgtcgacatcatcgctaccatgtttaccttattcggttggtggtctgaaaactggactgatattgttactgtcgtccgtgtctggatctggtctatcggtatcttctgtgttttgggtggtttctactacgaaatgtccacttctgaagcctttgacagattgatgaacggtaagccaatgaaggaaaagaagtctaccagaagtgtcgaagacttcatggctgctatgcaaagagtctctactcaacacgaaaaggaaacctaa

SEQ ID NO: 79070 - DNA, 1545 bp, Saccharomyces pastorianus
atgaagtcaaaagggagtcggttgtcaacagactgtcctgtcgaatttcccaagatagtctatggattcgctgaggaagtgaaaatacgtagacaaagttcccaaggacagtacgccgtcgattcacatcctccgaaaagccctgaactgaaacacagaagacagaggtcatcctcttttgttaacggtaaatgcaggaacagggaccttccattgttagataacaagaaagcacaagaaataaacaccaattcacacggccaagacatcggtatcaaaaacttaccacgtcaacgtgagttgttgaatgccaaaaatggaattgattttacgctgatggtggcgggtcaaagtggattgggtaaaaccacgtttatcaattccttattttctacttctttaattgatgatgacatcaaagaaaacaaacctattattcgttataaaagcattgtagaaggagatggaacacaccttaatttcaacgtcatcgatacacctggttttggtaacaatatggataatgcatttacgtggaggacaatggttaactatattgatgaagaaataagatcgtacattttccaagaagaacaacctgataggacaaaaatggttgataatagagtccattgttgtttgtactttctgagaccttcaaataagggaattgatactttagacgtcgtaacaatgaaaaaattagcgaagagagtgaatttaatcccggttattgctaaatcagatttgctaacgaaagaggaattgaaaaacttcaaaacacaagttagagaaataataagagtacaagatatccctgtatgtttctttttcggcgatgaagttttgaatgcaacacaagatatttttcaaaaatatccattcagtataattgcatctaatgagtacatttttaatgaaaagggcgaaaaagttaaaggaagacaatacaaatggggcgctgttgacattgaaaatgaaaagtactgtgacttcaaaatcttgcaaaagacgatttttgattggcatttaattgatcttgtagaaagtaccgaggattattacgaaaaatgtagatctgaaatgctaagaactaggctattaaaggccagagattgcttaacaacgaaaagtgttgatataacggaagaacaaaggaaatttttggaggaagaaatgaacttcgatgaaatcgaggaaaacaaactcaaaaattacaagtgctatgaaataattaataaaacggtcatggataaggtggccacagaatgggatcctgaatttataactagacaattagaagctaagaaaaaattcaacgagctgtccaacagagaaatttcaaaatttcgagactgggaaaagagcctattcatgggaccagagaattttaacccagagattggaccattgaatcaccagttgggaaacttaccactggaatgtccggacttgggaaacaagctgtttatcgggaaaagttcccacaaccattccacagatagtgctactttagttaacgttcacatccaaagggaggattaa

SEQ ID NO: 79071 - DNA, 1524 bp, Saccharomyces pastorianus
atgactaaatctgagcagcaagccgattcaagacataacgttatcgacttagttggtaacaccccattgatcgcactgaaaaaattgcctaaggctttgggtatcaaaccacaaatttatgctaagctggaactatacaatccaggtggttccatcaaagacagaattgccaagtctatggtggaagaagctgaagcttccggtagaattcatccttccagatctactctgatcgaacctacttctggtaacaccggtatcggtctagctttaatcggcgccatcaaaggttacagaactatcatcaccttgccggaaaaaatgtctaacgagaaagtttctgtcctaaaggctctgggtgctgaaatcatcagaactccaactgctgctgcctgggattctccagaatcacatattggtgttgctaagaagttggaaaaagagattcctggtgctgttatacttgaccaatataacaatatgatgaacccagaagctcattactttggtactggtcgcgaaatccaaagacagctagaagacttgaatttatttgataatctacgcgctgttgttgctggtgctggtactggtgggactattagcggtatttccaagtacttgaaagaacagaatgataagatccaaatcgttggtgctgacccattcggttcaattttagcccaacctgaaaacttgaataagactgatatcactgactacaaagttgagggtattggttatgattttgttcctcaggttttggacagaaaattaattgatgtttggtataagacagacgacaagccttccttcaaatacgccagacaattgatttctaacgaaggtgtcttggtgggtggttcttccggttctgccttcactgcggttgtgaaatactgtgaagaccaccctgaactgactgaagatgatgtcattgttgccatattcccagattccatcaggtcgtacctaaccaaattcgtcgatgacgaatggttgaaaaagaacaatttgtgggatgatgacgtgttggcccgttttgactcttcaaagctggaggcttcgacaacaaaatacgctgatgtgtttggtaacgctactgtaaaggatcttcacttgaaaccggttgtttccgttaaggaaaccgctaaggtcactgatgttatcaagatattaaaagacaatggctttgaccaattgcctgtgttgactgaagacggcaagttgtctggtttagttactctctctgagcttctaagaaaactatcaatcaataattcaaacaacgacaacactataaagggtaaatacttggacttcaagaaattaaacaatttcaatgatgtttcctcttacaacgaaaataaatccggtaagaagaagtttatcaaattcgatgaaaactcaaagctatctgacttgaatcgtttctttgaaaaaaactcatctgccgttatcactgatggcttgaaaccaatccatatcgttactaagatggatttactgagctacttaacataa

SEQ ID NO: 79072 - DNA, 2280 bp, Saccharomyces pastorianus
atgagtaaagtcaagggaacgggattttcgtcaattgatactgaagatgaaaacttacgcgaacgttatgttaatcaatcaaaagctaatgcctccgatattcaagatgaacaattagattgctttgagcaactggaagaaaaacataggacaaaaaaaaatgaagaatacactgcgttgaaaatcttaagggatgtcataggtccccttttattaactataacttcgttttatctaagattccaacgtatagatcagaacaattatgttgtctgggatgaggctcattttgggaaattcggatcatactacatcaaacatgagtactaccacgatgtccaccctccacttggtaaaatgcttattgcattgagcgaatggatggcaggatttgacggtcaatttgacttttcctctaataatgcatatccggaaaacgtaaactttaaactaatgagacaatttaatgccacatttggagctctatgtacaccagtggctttctttacagccaaatggatgggatttaattatttcactgtttatttgattgctacaatggtaacgttggaacattcatacattgtcctgtcaaaattcatattactagattcaatgctgctttttttctcgatgacgacttttgcctgtatgataaagttgtatacgttgagaaagcaacaaatgacgaaaaaatggtcgttatggatgttattaactggtttatctattggctgcgtttgttctgtgaaatgggttggtctttttatcacagttgtagtcggcctctacacatgtatagaactatttttgctctattgtgataaagaattgcctagaataaaatattacaaacattggcttatcagaatcattaatctgatagtaattccttttcttatctatctctattgcttcaaaattcactttgtgttgttgtacaaatctggcacgggggattctactacaaatacgttatttcagataaacttggagggaactcagattgaggcgggtcctcgtgatgtagcatttgggtcagagttaaccataaggtcgcatggtttaagcccgaatctgctgcattcacatattcaagtatacccagaaggctctggacagcgccaaatcactggatatggattcgcagactctaataatgtttggaagtttgaattttctaggtcttctggattggaactagatcagaacgggactttgaatggcaaaataatcccaataacggatggtgtggaagttcgtctcagccataaaaatacaggatcgaatcttcactcgcatgatgtaccttctcacgtctctagaggaaattatgaggtttcaggctatgggtcacaaagtgttggcgatgaaaaggatgattggatagtggagattgtgaaacaaatggattcaccaaatcccgtctattctaatgagaattcaactattttacatccagtttctactttcttcaggttgagacacaaagttttaggttgttacttggcttctactggattgacgtatccagcttggggatttaaacaagctgaaatcgtctgcaaagactcctggagtcgtagggacaaatcgacctggtggaatgtagaagatcactggaaccacaatttagaaaccgcagaagattacgttccaccaaaatccaatttttggaccgattttattctaactaattttgccatggcctcctctaataacgcgttagtgcctgatgaggataaatatgatagtttatcgtctgatgcatgggaatggccaaccttacataaagggctaagaatgtgttcatgggcgggatatatcactcgatattacttgatgggatctcccttcaatacatggatttctactgtctccttaatcatcttcccatttattattctttttatattataccgttggaggagacaaacgctttatctctcagacgatcaaatctggcaaataacgatacagggtattttccctttcatttcctggatgacacattatctgccttttgcaatgatggggagagtgacgtatgtgcatcactacgttcccgctttatattttgcaatgcttgttttcggatttgtgcttgatttcactttgacaagagtccattggatggtcaaatatcccatctatttgtcattgtttggcggatgtatatacatttataatttatttgctccaatatgtcagggtatgcatggtgataaagcggaatacttacctttgcaatggctatctacttgggatatcgcattttac

SEQ ID NO: 79073 - DNA, 690 bp, Saccharomyces pastorianus
atgtctaataattatcctttgcatcaagcctgcatggaaaatgagtttttcaaggtacaagagctgctacactccaaaccttccttgttgctacagaaggaccaggatggcagaatccctttacactggtcagtttctttccaagcacatgaaattaccagttttttgctttctaaaatggaaaatgttaacttagatgattatccagatgattctggatggacacctttccatattgcttgttcagtggggaatttggaggtggtaaagtctctttacgacagacctctaaagcctgatctaaataagataaccaatcaaggagttacatgcttgcacttggcggttggtaagaaatggtttgaagtatcccaatttttaattgaaaatggtgcgtccgtaagaattaaagataaatttaatcaaattccattgcatagagctgcgtcggtgggttctttgaaattaattgaactattatgcggtttgggcaaaagccctgtaaattggcaggataagcagggttggaccgcactatttcatgctttggctgaagggcacggtgacgcagctgtattgttggtggaaaagtatggtgcagaatatgatcttgtagataataaaggcgctaaggcagaagatgttgcccttaatgaacaggttaaaaagtttttcctaaataatgtataa

SEQ ID NO: 79074 - DNA, 369 bp, Saccharomyces pastorianus
atggtcaaattaacttcaatcgctgctggtgtcgctgccatcgctgctactgcttctgcaaccaccactctagctcaatctgacgaaagagtcaacttggtggaattgggtgtctacgtctctgatatcagagctcacttggcccaatactacatgttccaagccgcccacccaactgaaacctacccagtcaaagttgctgaagccgttttcaactacggtgacttcaccaccatgttgaccggtattgccccagaccaagtgaccagaatgatcaccggtgtcccatggtactccagcagattaaagccagccatctctagtgctctatccaaggacggtatctacactatcgcaactagggagtga

SEQ ID NO: 79075 - DNA, 1854 bp, Saccharomyces pastorianus
atgtctaaacaatttagtcataccaccaacgacagaagatcatcgattatctactccaccagtgtcgggaaggcagggcttttcacgcctgcagactacatcccacaggagtcagaagaaaacttaattgagggcgaagagcaagagggtaatgaagaagaaccttcctataccggcaatgacgatgagacggagagggaaggtgaataccattcgttgttagatgccaacaattcgcggacattgcaacaagaagcgtggcaacaaggttatgactctcacgaccgtaagcggttgcttgacgaagaacgggacctgctaatagacaacaaactgctctctcaacacggcaacggtgggggagatatagaaagtcacggacatggccaagcaattggaccggacgaggaagaaagaccagctgagattgcaaatacgtgggagagcgcgatcgagagtggtcagaaaatcagcacaacttttaagagagaaacgcaagtgatcacgatgaatgcgttgccgctaatcttcacctttatcttgcaaaattcgttgtcactagcatctattttctccgtctcacatttagggacgaaagagctaggtggtgttacactcggttctatgactgctaacatcacgggtcttgctgctattcaaggtctgtgtacatgtctggacacactgtgtgcgcaggcatacggtgccaaaaactaccacttggtgggtgtgctagtgcagagatgtgccgtgatcaccatcttggcgttcttgcccatgatgtatgtttggtttgtttggtcggaaaagatcctagcactcatgattccggagagagaactatgcgcgctagcggctaactatctacgtgtaaccgcattcggtgtgccaggattcatcctttttgaatgtggtaagaggttcctacaatgtcaaggtatattccatgcatccacaatcgtgctctttgtgtgcgcacccttgaacgcattgatgaactacttacttgtttggaatgacaagattgggattgggtaccttggtgcgccattatcggttgtgatcaactactggttgatgacgctcggattactaatatacgcaatgaccaccaagcacaaggagagaccactcaaatgctggaatggtatcatccctaaggaacaagcatttaagaactggcgtaagatgattaacctagctattcccggcgtggtgatggtggaggcagagttcctcggatttgaagtgttgacagttttcgcttcccatctgggcaccgatgccttgggcgctcagtcgattgtggctacgattgcgtctcttgcataccaagtgcctttctctatctccgtttctaccagtacacgtgtagccaattttatcggcgcgtcgctatacgacagctgcatgatcacgtgccgcgtgtccttattgttgtcctttgtgtgctcctcaatgaacatgttcgttatctgccgttataaggaacaaatcgcaagtctattttctactgagagcgctgtagtgaagatggtcgtggacacactacctcttcttgcgttcatgcaattattcgatgcctttaatgcgtccaccgccggatgcctacgtggtcaagggagacaaaaaataggtgggtacatcaacctagccgcattctactgtctaggtgtgcccatggcatatgtgttagcattcctgtatcatctgggtgtaggcggcttatggttgggtataactagcgcgttggtaatgatgagtgtgtgtcaaggatacgccgtttttcatggtgacagacgccgtattctcggagcggcacgcaagcgcaatgctgagacccatacatcatga

SEQ ID NO: 79076 - DNA, 696 bp, Saccharomyces pastorianus
atgatgattttaaccacagctagattaaattgtagaccagttaccgttcctcgtctatttaatcgttcttttagtcaatctttcataattttgaagaaaaaaagttctgcccctactgagaaagtcgaagaagatgaaattgacgtgaatgaactgctgaaaaaggcagaaactcaattcaaaaaaactttagaagttcaaaaacagaaaatgaatgaaataaaacagggaaattttaatcctaaggtattcaatagtttggtgttcaaaaataacagaaagtttacagatattgctaccacatccttgaaaggtaaaaatgcacttttaataacagttttcgaccccaaagatgtgaaaactgtgatcagtggggtgcttgctacgaacctgaatttaactcctgaaagggtcccaaataacgatttgcaattgaaagtttcgttaccaccaccaactacagaatcccggttaaaagtagctaaagacttaaagagagtatttgaagaatataagcagtcatcgctaaaagactcattaggaactatcagaggcagtattctaaaggaattcaaaagtttcaaaaaggatgatgccgttcgaaaagctgagagggatttggaaaaactgcataaggattacgtgaacaagcttcatgaccaattccagaaagttgaaaaaagcattgtaaaatga

SEQ ID NO: 79077 - DNA, 534 bp, Saccharomyces pastorianus
atgagtgaaacaaggatggcacagaacatggatactacagatgaacagtacctgagacttattgagctactctcaaactatgattccaccttagagcagttgcagaaggggttccaggatggctacatccaattgagcagatcaaactactataataaagactcattacgaggaaactatggtgaagattactgggatgaaacgtatataggtcaactaatggcaacagtggaagaaaaaaactccaaggtagttgtcgaaatcgtcaaaagaaaagctcaagataagcaagaaaagaaagaggaagaagataataaattgactcagagaaaaaaaggaacgaagccagaaaagcaaaaaactcagagtcacaaacttaaacaagactatgacccaattttgatgtttggtggagtactgtccgttccttcttcattgagacaatcgcagacaagtttcacaggttgtattcccttaatagcccaattgattaattacaagaacgaaatattaacgttggttgaaacgttgtct

SEQ ID NO: 79078 - DNA, 1731 bp, Saccharomyces pastorianus
atgtctgaagaagctgcctatcaagaggatacagcagtccaaaatactccagctgatgctttgtcgccagttgaatccgattctaattccgctttgtctactccatccaacaaagctgaaagagatgacatgaaagatttcgacgagaatcacgaagaatctaataactacgttgaaattccaaagaagcccgcctccgcctacgttacagtttccatctgttgtttaatggttgctttcggtggttttgttttcggttgggatactggtaccatttctggttttgttgctcaaactgattttatcagaagatttggtatgaagcaccacgatggtacttattatttgtctaaggttagaactggtttaattgtctccattatcaacattggttgtgccattggtggtattattctttccaaattgggtgatatgtacggtcgtaaggtgggtttgattgtcgttgttgtcatctacatcatcggtatcattatccaaattgcctcgatcaacaagtggtaccaatatttcattggtagaattatctctggtttaggtgtcggtggtattgccgttttatctcctatgttgatttctgaagtctctccaaagcatattagaggtactttggtttcatgttaccaacttatgattactttgggtattttcttgggttactgtacaaactacggtaccaagacctacagcaattctgttcaatggagagttccattaggtctaggtttcgcttgggctttgtttatgattggtggtatgacactcgttccagaatctccacgttatttagttgaagtcggtaaaattgaagaagctaagcgttctattgctctttcaaataaggtcagcgcagacgatccagctgttatggctgaagtcgaagttgttcaagctacagttgaagctgaaaaattagttggtaatgcctcctggggtgaaatatttagcactaagactaaggttttccaacgtttgatcatgggtgctatgattcaatcattgcaacaattgacaggtgataactatttcttctattacggtactaccgttttcactgctgtcggtttggaggattcttttgaaacctctattgtcttgggtattgttaactttgcttccacctttgttggtattttcttagtcgaaagatatggtcgtcgtagatgtttattatggggtgctgcttccatgacagcttgtatggttgttttcgcttctgttggtgttacaagattgtggccaaatggtaagaagaacgggtcttctaagggtgctggtaactgtatgattgtcttcacatgtttctacttattctgttttgccaccacctgggctccaattccatttgttgttaactctgaaactttcccattgagagttaagtccaagtgtatggctattgctcaagcttgtaactggatctggggtttcttgattggtttctttactccatttatttcaggtgctattgatttctactacggttatgttttcatgggctgtttggtcttttcttacttctacgtcttcttcttcgttccagaaactaaagggttgactttagaagaagttaacaccttatgggaagaaggtgttttgccatggaaatcaccttcttgggttccaccaaacaagagaggtactgactacaacgctgatgatctaatgcatgatgatcaaccattttacaagaagatgttcggaaaaaagtag

SEQ ID NO: 79079 - DNA, 495 bp, Saccharomyces pastorianus
atgctgcaggtccactggataaccctcgttgcatttattgctacattcttcaacctagctgctacctcgatcaacaatagttccctccctgatgttgatcttactaatcctttgagattcttcactaacattccagcaggacttaattttaatgaagtcatttttctcgaaagaaacggattctatcttggtggaatagactctccctcaatctaccacttaataaatggtacagctgtgtattttggggatgtcagagataatatcatgccgggtacagttggcactactaggaatgttacagatgtcgactatggctccttactgacagagtatggttatgaagctaatacagattatgtctcgcgttggatcgccactcatgtagtaatctctccattgaacgctacagagtttttccaaacaccggtaccagtaccagtgccagtgccgataacaataccgcaccaacaggtgaactcaaaactacattag

SEQ ID NO: 79080 - DNA, 1602 bp, Saccharomyces pastorianus
atgatgcttttgcaagctttcattttccttttggctggctttgcagctaagatatcagcattaatgacaaacgaaactagcgatagacctttggtccacttcacccccaacaagggttggatgaatgatccaaatggattgtggtacgatgcaaaagaaggtaaatggcatctctactttcagtacaatccaaatgacactgtttggggtttgccactcttctggggtcatgctacttcgaatgatttgactcactggcaagatgaacctgttgctatcgcgcccaagcgtaacgactctggtgcttattctggttcgatggtgattgaccacaacaacactagtgggtttttcaatgatactgttgatccaagacaaagatgcgtggcaatctggacttataatactccagaaagtgaagaacaatacattagctattcccttgatggtggttacacttttactgaataccaaaagaaccctgttttagctgccaactccactcaattcagagatccaaaggtgttctggtatgaaccttctcaaaaatggattatgacagctgccaaatcacaagattacaaaattgaaatttactcctcggacgacctgaagtcctggaagctagaatctgcatttgccaatgaaggttttttaggttaccaatatgagtgtcccggtttgatcgaagtcccaactgagcaagatccttctaaatcgcattgggtcatgtttatttctatcaacccaggtgcacctgctggcggttccttcaaccaatattttgttggatccttcaatggtactcattttgaagcgtttgacaatcaatctagagtggtagattttggtaaggactactatgccttgcaaactttcttcaacacagacccaacgtacggttcagcattaggtattgcctgggcttcaaactgggagtacagtgcctttgtcccaactaacccatggagatcatccatgtctttggtccgcaagttttctttgaacactgaatatcaagctaatccagagactgaattgatcaatttgaaagctgaaccaatactgaacattagtaatgccggtccatggttgcactttgccagcaactccactttgacgaaagccaattcgttcagcgtagatttgagtaattctaccggcacattagagtttgagttggtttacgctgttaacaccacacaatctgtttctaaaagtgtcttttcagacttatctctttggtttaaaggtttagaagatcctgaagaatatttaagaatgggttttgaagccagtgcttcttccttctttttggaccgtggtaactctaaggtgaagtttgtcaaggagaacccatatttcacaaacagaatgtctgtcaacaaccaaccattcaagtctgagaacgacctaagttactataaagtgtacggcctactggatcaaaacatcttggaattgtacttcaacgatggagatgtggtttctacaaatacctacttcatgaccaccggtaacgctctaggatctgtgaacatgaccactggtgtcgataatttgttctacattgacaagttccaagtaagggaagtaaaatag

SEQ ID NO: 79081 - DNA, 1602 bp, Saccharomyces pastorianus
atgatgcttttgcaagctttccttttccttttggctggttttgcagccaaaatatctgcatcaatgacaaacgaaactagcgatagacctttggtccacttcacacccaacaagggctggatgaatgacccaaatgggttgtggtacgatgaaaaagatgccaaatggcatctgtactttcaatacaacccaaatgacaccgtatggggtacgccattgttttggggccatgctacttccgatgatttgactcattgggaagatgaacccattgctatcgctcccaagcgtaacgattcaggtgctttctctggctccatggtggttgattacaacaacaccagtgggtttttcaatgatactattgatccaagacaaagatgcgttgcaatttggacttataacactcctgaaagtgaagagcaatacattagctattcccttgatggtggttacacttttactgaataccaaaagaaccctgttttagctgccaactccactcaattcagagatccaaaggtgttctggtatgaaccttctcaaaaatggattatgacggctgccaaatcacaagactacaaaattgaaatttactcctcggatgacttgaagtcctggaagttagaatctgcatttgccaatgaaggtttcttaggctaccaatatgaatgtccaggtttgattgaagtcccaactgagcaagatccttccaaatcctattgggtcatgtttatttctatcaacccaggtgcacctgctggcggttccttcaaccaatattttgttggatccttcaatggtactcattttgaagcgtttgacaatcaatctagagtggtagattttggtaaggactactatgccttacaaactttcttcaacactgacccaacctacggttcagcattaggtattgcctgggcttcaaactgggagtacagtgcctttgtcccaactaacccatggagatcatccatgtctttggtccgcaagttttctttgaacactgaatatcaagctaatccagagactgaattgatcaatttgaaagccgaaccaatattgaacattagtaatgctggcccctggtctcgttttgctactaacacaactctaactaaggccaattcttacaatgtcgatttgagcaactcgactggtaccctagagtttgagttggtttacgctgttaacaccacacaaaccatatccaaatccgtcttccccgacttatcactttggttcaagggtttagaagatcctgaagaatatttgagaatgggttttgaagtcagtgcttcttccttctttttggaccgtggtaactctaaggtgaagtttgtcaaggagaacccatatttcacaaacagaatgtctgtcaacaaccaaccattcaagtctgagaacgacctaagttactataaagtgtacggcctactggatcaaaacatcttggaattgtacttcaacgatggagatgtggtttctacaaatacctacttcatgaccaccggtaacgctctaggatctgtgaacatgaccaccggtgtcgataatttgttctacattgacaagttccaagtaagggaagtaaaatag

SEQ ID NO: 79082 - DNA, 615 bp, Saccharomyces pastorianus
atgggcaatgcgtctgcggcagtgggaacggcagttgggattccaattgctgtgggcgtaataatagccctgatattttggtgtaaattacaacgacgttacaaaaaagaagagattagagatgctgatttggagaagatggtaatggaagaagtggcagtgtcggtatatgatggttttaaagccgaaattaacagctcaagtgaagcttccacgataaacgaaaaggaagcaaaccaggatcttaaaccctgccaagaaaaaaccgccaaggcagggtacacaccagcatacagaaggcaattgaacgctagtatggggactttgcgtccaaaaaagcagagcactgcatatatcaatgtccccgtcattttcagcggcgaaaaggtgaattatgggatggtcagagatccttcctatagttttatgtatccactgacgctatcgcgcaaagaaacgagtagtttgagatcagcttctacgtcaaacttatcatcgagcacagaaaatactgcgttacacgaagaaataaaactggatgacccatatgaaaacgattttacgaattatactgtcaacaagagagaatttattgacagcttacggccacgctaa

SEQ ID NO: 79083 - DNA, 375 bp, Saccharomyces pastorianus
atgaatttctccacagtttttcaagcaataatcgcggttttaggtttaactacagtcacagctttagcagaatttgatttcgacgtaggctatgaagagtttgtccgtaacaatcctgatacgattttcttagagagtgatattggcctgcacgttggatataccgagggtggcgaacgacagatagcaacgataccacacaattccacgctagggacttcactacgtgagtatagtggctgtggtggtaatggtacagaaacctccatcgcgacctccgcacctacaatgagtgaggtacctatcgctatcttcgtgaaacgcagaaaaagtgtacctatcttgctaccgcaggtatgtatgggaggtatatga

SEQ ID NO: 79084 - DNA, 594 bp, Saccharomyces pastorianus
atgttccgtctcttaatgtcattcaacaatttcaaagacttaatctcgttaatgtcattgagctttgctttccaaaactcattttccttgttcaattgctctatacgatcgcgaagtttgttgatttgcgtgtttaagttctgcagcttattcatgttctcaaaattcttttgtttcttgcgaatgcggaaccgctgcgacgcctctgtgttctttcttctccgctcttgcttaatcttatccagttcgttagaagtgctcacgggagcttcctcttcttttacaacaactgctgttgttgcggcaaccttcccctttctcggctcgcggagcttcttaaactgcgagacatcctggccattatttatcatgctaatgagctcctccgcgttgccactgctaaccagcagcaatgatagcaagcgcgagcccagctctgaatcgcttgatatcaggttctgtagatgttccgaaagattgttcacgttcatacccttcctgcttgcaatgtcaatgtttgttgatttcttttcccacccttgtttcgcactcgtattgacgaacaaaacaatttgtcttcataactaccactga

SEQ ID NO: 79085 - DNA, 1746 bp, Saccharomyces pastorianus
atgacgattattcataacccaaagtggtggaaagaagccacaatctaccaaatatatcctgctagtttcaaggactccaacaatgatgggtggggtgacttggctgggatcacttccaaacttgactacatcaaagagctaggagtcgatgcgatatgggtctgcccattctatgactcccctcaggaagatatgggctatgatatagcaaattatgagaaggtttggcctcgttacggcacgagcgaggattgttttcagatgattgaggaatctcataaaagaggtatcaaagtgatcgtggatctggttattaatcattgctctgaagagcatgagtggttcaaggagagtagatcttctaaaaccaacgccaaacgtgattggtttttttggaaaccacctaaaggatacgaaatagatggtactccaatcccaccaaacaactggagatcattctttggtggatcggcttggaaatatgatgaaaacactgaagagtttttcttacacgtatttgctcctggtcaaccagatttcaattgggaaaacaaagagtgtcgtcaagccatctacgattcctctgtagggttttggctccgtcataatgtcgacgggtttcggattgatgtaggtagtatgtactccaaagttgagggcttaccagatgcttctattacagatcctactgttccatatcaagacggaactgatttttttgtgaatgggccacgtatccatgaatatcataaagaaatgcgtcaatacatgtatacccaaattccagaaggcaaagaaatcatgactgtaggtgaagttggtattggaaatgagaaagatttcaaagactatactagttccaaagaagaagagtttaacatgatgttcaacttcaagcacacttctgttggtgaaagtcccgagtttaaatatgaactaattcctttcaccttaaaagattttaagttggcccttgctgaaagctttttattcatcgaggggactgactgctggtctacaatttatcttgaaaatcacgatcaacctcgtagtgtttcccgttttggttctgattctcccgagtggcgtgagatttcctcaaaaatgttggctactcttattatttccttgactggtactgtattcatttaccaaggacaagagcttggcatgccaaacttcaaaaatagaaagattgaacaaattaagtgtgttgaaggtaccggtacttatggtgccatcaaacgtgattatggtgaagactcagagaagatgaaaaagttttacgaggcattggcattaatatccagagatcatgggagaactccattcccttggagtggtgaaaagccctacgctggtttttccaagaatgcgaaaccatggatcgatattaatgaatcatttgtagaaggaatcaatgcggaggctgaattaaacgatgaaaactcagttttctttttctggaaaagggctttacaggttagaaaagagcacaaaaatatgcttgtgtacggggacaatttccagttttacgatttagataacgaaaagctgttcatgtttacaaaggattctggcgacaaaaaaatgttcgccgtttttaacttctgtagcgacagcacggagttttcagttcctgacaataaggcttcttacgacatgtttttcggtaactatgcaaactctgatggcaagtcatatactttgaagccatgggaaggtagactttattattcaaattga

SEQ ID NO: 79086 - DNA, 2100 bp, Saccharomyces pastorianus
atggtcagattttttggtttaaacaagaaaaagaacgaagaaaaggaaaatacagacttgcctgcagacaatgaacaaaacgcagcagaaacgtcgtctagcaacgtatctggaaatgaagaaagaatagacccaaacagtcatgatacgaaccctgaaaatgcaaacaatgatgatgcgtctacgacttttggttcgtccatacaatcgtcatccatattttctagaggaagaatgacttacggaacgggagcctcttctagtatggccacatcagaaatgcgtagtcacagtagcggacatagtggatctaagaatagtaaaaatttacagggtttcaaagatgttgggaaaccattaagagcggtgagcttcttgaatcctgttaaggaggaggaatctcaggatacgcagaatactttagacgtcagctcttcaacgtcctcaacattagccacttcaggaaatgcgagagaaaacagtttcacttccagaagaagtatcactttggagtacattcacaaaagtttgtctgagctagaggaaaatttggttgatataatggatgatattcatcaggatgtcatcagtatttcaaaagcggttattgaagccatcgaatattttaaagaattcttaccgacaacacgagacaggataccgtacaggataagtttagaaaaatcgtcttcattacgaaaaattaataaaattgtattacattttctggataatttattggtttccgacgcattttcgaattctaggtcgatactgttacgaagattttacttcttcctgaaaaaactaaaccttattacggatgacgatttgatatcagaatcgggcgttttaccatgcttatcagtcttttgtattggcagccattgcaacttaccaagtatggataaattaggcatgattctagatgagttgaccaaaatggattcttcaataatctctgaccaggaaggtgcttttatagcacctatacttagaggtataaccccaaagagttcaattcttacaataatgtttggcttacccaacttgcaacatgaacactatgaaatgataaaggttctttattcgttgttcccagatgtacacatgtattgtgtgaaagattacattaaaaaagctgcatcagcagtaggcagtattccatctcataccgcagcaactatcgatacaatagccccaactaaatttcagttttcccccccatatgcagtttcagagaatccacttgaattgccaatttctatgtctttatccactgagacaagcgctaaaattacaggtactttagggggttatctattccctcagactggtagtgataaaaaattttctcaatttgcaagctgctcatttgccattacgtgcgcccacgttgtattatctgagaagcaagattatccaaacgtcatggtaccttctaatgttttacagacttcttacaagaaagttttaacgaaagaatcagataggtatcctgatggttcggtggagaaaacagcatttttggaggaagtgcaaagaatagatcaaaacttgaactggcagaaatcaaacaaatttggtcaagtagtttggggcgagagagcaatcgtagatcacagattatcagattttgctattatcaaagttaattcatcattcaaatgtcagaataccctaggtaatggcttaaaatcattcccagatccaacattaagatttcaaaatttacatgtgaaacgaaaaatttttaaaatgaagcctgggatgaaagtatttaaaataggggcttctacgggatacacttcaggcgagttaaattctacaaaattagtttattgggccgacggaaagttacaaagtagcgagtttgtcgttgcatctccaactcctttatttgctagtgcgggggattcaggcgcatggatcttgaccaagttagaagatcgtctaggtttggggcttgttggtatgttgcattcatacgatggtgaacagaggcagtttggtttgttcacacctataggtgatatcctggagagactacatgctgtaactaaaattcaatgggacattgatccacaactagatggatga

SEQ ID NO: 79087 - DNA, 396 bp, Saccharomyces pastorianus
atggacagagaccatattaatgaccatgaccatcgaatgagctattccatcaacaaggacgacttgttgttaatggttttggcggttttcattcccccagtggccgtctggaagcgtaagggtatattcaacagggatacactattgaacgtacttctcttcctactgttattcttcccagcaatcattcacgcttgctacgttgtatatgaaacgagtagtgaacgttcgtacgatctttcacgcagacatgcgactgcgcccgccgtagaccgtgacctggaagctcaccctgcagaggaatctcaagcacagcctccagcatatgatgaagacgatgaggccggtgccgatgtgcctttatggacaccaaaaaaagtctcttcggcgtattag

SEQ ID NO: 79088 - DNA, 2166 bp, Saccharomyces pastorianus
atgaagtttggtgagcacttgagcaagtctcttattagacagtacagctactattatattagttatgatgatctgaagactgagctagaagataacttatctaagaataacggtcagtggacgcaagaattggaaacagattttttagaatctttggagatcgagttagacaaggtttacacattttgcaaagttaagcatagtgaagtttttagacgtgtaaaagaggttcaagaacaagtgcaacatactgttcgtttgttagactccaataatcctcctactcagctagattttgagattctagaagaagaactaagtgatatcattgccgatgttcatgatctagccaagttttcgagactaaactacactggtttccaaaagattatcaagaaacacgataagaagacaggttttatcttgaaaccggttttccaagttagattagactctaaaccatttttcaaggaaaactatgacgagctagtcgttaaaatttcccaactatatgatattgccagaacttcaggtcgcccaatcaagggagactcatctgctggtgggaagcaacaaaatttcgttagacagacaacaaagtattgggttcaccctgataacattacagaattgaagctgatcatcttgaagcatttaccagtgttggtcttcaacactaataaggaattcgaaagagaagattccgctattacttcgatctattttgataatgaaaatctagacctttattatggcagattaagaaaagatgaaggtgcagaagcccacagattgagatggtatgggggtatgtctacagacacgatctttgtagaaagaaagacccatagagaggattggactggtgagaaatctgtcaaggcaagatttgcgctaaaggaacgtcatgttaatgacttcttaaagggtaaatatactgttgatcaagtatttgccaagatgcgtaaagaaggcaagaagccaatgaacgaaattgaaaacttggaggcgttagcatccgaaattcaatacgtcatgttaaagaaaaagttgagacctgtagtgagatcattctacaatagaactgcttttcaattacctggtgatgcaagagttcgtatctcccttgatacagagttaactatggtgagagaagacaactttgatggtgtggatagaactcataagaattggaggagaactgatattggtgtcgattggccattcaagcagctagatgacaaggatatttgccgtttcccatatgcagtcctggaagttaaattgcaaacccaactaggtcaagaacctccagagtgggtacgtgaattagtcgggtctcacttagttgagccagtcccaaaattctccaagtttattcatggtgtggctaccttactaaatgataaagtggattcaatcccattttggttacctcaaatggatgttgatatcaggaaacccccactaccaacaaatattgaaataacaagacccggtagatccgataacgaagataacgacttcgatgaggatgatgaggatgacgctgctttggttgctgccatgacaaacgcacccggtaattctcttgatatagaagaatctgttggttacggggctacttcggcccccacctccaacactaatcatgttgttgagagtgctaatgctgcttattatcaaagaaagatcaggaatgccgaaaatcctatctccaagaaatactatgaaatcgtggcattttttgaccactattttaacggtgatcaaatatctaaaatcccaaaaggtactacttttgatactcaaattcgtgccccaccgggaaagacgatatgtgtgccagttcgtgtggaaccaaaagtttactttgccactgaaagaacctacctgtcttggttgtccatctcgatattgttgggcggtgtctccactactttattaacatatggttcaccaacagccatgattggctccattgggttctttattacttccttggctgtgttgatacgtactgttatggtttatgccaagagagtggtaaacattaggctaaagagagcagtagattatgaggataagatcgggcctggcatggtttctgtgtttctaattctctctattttattttcctttttctgcaacctagttgctaaatga

SEQ ID NO: 79089 - DNA, 381 bp, Saccharomyces pastorianus
atggaccagcaagctgcatacagtacaccatacaagaagaacacactatcgtgcaccatgtcagccaccttgaaagactacttaaataaaagagttgttataatcaaagttgacggcgaatgcctcatagcaagcctaaacggcttcgacaaaaatactaatctattcataaccaatgttttcaaccgcataagcaaggaattcatctgcaaggcacagttacttcgaggcagcgagattgctcttgttggcctcatagatgcagaaaatgatgacagtctagctcctatagacgaaaagaaggtcccaatgctaaaggacaccaagaataaaatcgaaaatgagcatgtaatatgggaaaaagtgtacgaatcaaagaca

SEQ ID NO: 79090 - DNA, 1590 bp, Saccharomyces pastorianus
atgttcaggcagtcaaaaagaagaattgcctcaaggaagaattttagttcatacgatgatattgtcaaaagcgaattggacgtaggcaacacaaatgcagctaaccagatcatcttaagttcaagttcatctgaagaagagaaaaaactttacgctaggctgtatgagtctaaattatcgttttacgatttaccaccacagggagaaataacattggaacaatttgagatctgggcaatcgatcgtctcaaaattctgttagagatcgaatcttgcctttcaagaaacaaatccatcaaagaaattgaaaccattatcaagccgcagttccaaaaactactgcctttcaacacagagagtttagaagacagaaaaaaggattactactctcacttcattttaagattgtgcttttgtcgttcaaaagaactgcgggaaaaattcgtcagggctgaaacgtttttgttcaaaattagatttaacatgctaacctccaccgatcaaacaaaatttgttcaatcattggacttacccttactacagtttatctcaaatgaagaaaaggcggaattatctcatcagttgtatcaaacagtttccgcgtctctacagttccaattgaatttaaacgaggaacatcaaagaaaacagtattttcaacaggaaaaattcataaaattacctttcgaaaatgtgatagaactggtaggaaaccgtttagtgtttttgaaggacgggtacgcatatttaccacaattccagcaattgaatttactttctaatgagtttgctagcaaattaaaccaggagttaataaaaacgtaccagtacttaccaagactgaatgaggatgaccggttgttaccaattctgaatcatctttcgtcaggatacacaattgcagactttaaccagcaaaaggcaaaccaattcggtgaaaatgtagacgatgaaataaatgcacaaagtgtgtggtccgaggagatcagctcgaattatccattgagtatcaaaaacttaatggagggtttgaagaaaaaccatcatttgagatattacggtaggcaacaactaagcctgtttctaaagggaattgggttgagcgccgacgaagctttgaaattttggtcagaagctttcacaagaaacggcaacatgacgatggaaaagttcaataaagagtaccgctacagttttagacacaactacggcctcgaaggtaacagaatcaactacaaaccgtgggactgtcacaccattctatctaagcccagacccggccgcggcgattatcacggatgcccattccgtgactggagccacgacagactatctgcagaactgcgttccatgaaactcacccaagcacaaatcataagtgtcctagattcgtgccaaaaaggcgagtacacaatcgcttgcaccaaagtattcgaaataacacacaattccgcctcagcagacttggagatcggcgaacaaactcatatcgcacatcctaacctctattttgaaaggtcaaggcaactgcaaaagaaacaacagaaaccggaaaaggaaaaactttccaatagtgccaataaccagtag

SEQ ID NO: 79091 - DNA, 1038 bp, Saccharomyces pastorianus
atgttacgcaacatcatcaggttcaaaggatttggaaaagggaccagtggaggatttttaaaacctgtatcatttcgtgttcagttaacgcgatgttaccgctatgacaatggtccttcatatcgtcgatttaataatggagagtattcccaaaaatcatcgtttaaaagcattcttctcgataagtcatcaagaaaatacttagctttattatttggtggatgctctctcttttattatacacatttggataaagcaccggtaagcgataggtccaggttcatctgggtatcgcgtccattagagttaactatcggaaattacacatacaaatcaatttggagacaaacgcagcaggaaatattacctccacagcatccgctgtccatcaaaattgagaatattttcatgaaaattgtcgaagctgcttataaggaccctagtgtagacaactcactactggacgggatcaagtgggaaattcatgtggtcaatgatccaactgcttcaccaaatgcattcgttttaccagggggtaaggtctttatattcagctctattttacctatttgtgctaatgatgatgggattgccactgttttagcacacgaatttgctcatcagctagcaagacacacagccgaaaatttgtcgaaggctcctatatattctcttttgggtttggtgttatatactgttactggagctcatgctatcaacaatatactattggatgggtttttgcgaatgccagcatcaagacagatggaaaccgaagctgattacattggcctgatgataatgtcaagggcatgttttcaaccacaggagtcaataaaagtgtgggaaagaatggcaaattttgaaaagcaaatgaatagagggggtgttgtgaatatggagtttctaagtacacatccagcaagcactcgtagaatagagaatatgtcgaaatggttgccaaaagctaatgaaatttatgaacaatctgattgtagcactatgggtaactattataaaagttttttctcaatgtaa

SEQ ID NO: 79092 - DNA, 501 bp, Saccharomyces pastorianus
  modified_base (491)..(491): a, c, g, t, unknown, or other
atgagttctcaaagtaatactggtaattctattgaggcaccacaactacccattcctggtcaaactaatggctctgcgaacgttactgttgatggagctggtgttaatgtcggtatccagaatggttcgcagggtcaaaagaccggaatggacctttattttgatcaagctttgaactacatgggagaacatcctgtgataacaggttttggggcctttttaactttatattttacagccggtgcatataaatcaatatcgaagggacttaacggtggaaaatccactactgccttcttgaaaggcggatttgacccgaaaatgaattctaaagaggctctacagattttaaatttgacagaaaatacattgactaaaaaaaagttgaaagaggttcataggaaaattatgttagctaatcatcctgacaaaggtggttctccatttttggccactaagataaacgaagctaaggactttttggaaaaaanggggtattag

SEQ ID NO: 79093 - DNA, 750 bp, Saccharomyces pastorianus
atgaaggaaaaaaaaaaaattcttcaaagggaacaaaacagattaatcactgagattatacgcctcgaaaacatactaaataagcataggaaggctgaagctaagaataatattaacaaacttgaaaagaagttgagtgaaacagatggttttacatctgtaaacacatcagtgccagtaactcctattatgccggtcttaaatacgagaacttcttatcccaatatcgactttcatggtactaaggtttctgatgttctagatgcctttgaatttgaaaagcatgatgatcccttaagggataaatggaacactttacagtttttggaaaagagctttgaatctaaatttgaatctgcatcagagttaatccaaggaggcgagctagctgctattaaagaaagaaattttcaattagccaaactaaataatctttgctttcgggtacgagagtccatcaaaagaagacaagacctggagaaaaagttaagaactttatcgcaggacactgacaacgaattgctttttctgatgttggaaaatgagagaagaaagaaaagttcagtgataatagagtttctttctgagataatcagagagaaatccaaaagattaactgcagaagagcaaggctttgtaaatcaaaatgaagtaaaacccctcattctggacctttctgcacggataaacagattgaattctattctagaaacaaaaaatacttgtattagaagattaagtaatcaataa

SEQ ID NO: 79094 - DNA, 576 bp, Saccharomyces pastorianus
atgcaaacgctaaagtgtgttgttgtcggtgatggtgctgttgggaaaacgtgccttctaatctcctatacaacgaatcaatttccagccgactatgttccaacagtgttcgataactatgcggtgactgtgatgattggtgatgaaccatatacgttaggtttgtttgatacggccggtcaagaagattacgatcgattgagacccttgtcatatccttctactgatgtatttttggtttgtttcagtgttatttccccaccctcttttgaaaacgttaaagaaaaatggttccctgaagtacatcaccattgtccaggtgtaccatgcctggtcgtcggtacgcagattgatctaagggatgacaaggtaatcatcgagaagttgcaaagacaaagattacgtccgattacatcagaacaaggttccaggttagcaagagaactgaaagcagtaaaatatgtcgagtgttcggcactaacacaacgcggtttgaagaatgtattcgatgaagctatcgtggccgccttggagcctcctgttatcaagaaaagtaaaaaatgtacaatttcgtag

SEQ ID NO: 79095 - DNA, 1164 bp, Saccharomyces pastorianus
atgtcagaagaagacgatcattggaatttagttagattacgtagattacgtaaagggagagaaggggaagaacagtcatcgaagtcagaaatatctttggatagtttgcatgaaagctcctttgcaggagaggacgacgaggacttcgatgcagatgtcctatcgaacactagcagtgaagagtctgcacagaagaatcgtatttacgattttagaacatctaatgaatttagtaatgctggagttaatattgatcaaactggagttcccactatttcagagtcatttgatactttgtccggctcaaatgttggcggaacggtattgccaagtatggaggggtcgaaactgaaggatagtacgataaggaattctagcacacgatcggatcatatcatagataaaagtgagggtaaatctgctaaattgaagatgtggcatgttatcatgctatcttcattgctttccatgaccttttcatacctcgccctcgaatattccctgactggtgatgtgttggcaggttttaaatcacaacagtcattacgtaataatgaaaggaagctgttgtacggcaatatcgattttgttgataaaaaatcttacgattcatcaagtgactctttaagtcagtgggctccttcaggaaaatactacgtcgacttcgacaatcatattgcatacccattaaaggatgatgacctaatgggctggagacgatacaaaacagacttagttattttatggtatacaacaaaagctcgaatgaaagacggttggcacaagagaattaacaaaataaacggaggaagaataaagttacacctatttctcaagaattcttttaaatccgctcaagaaagtttaagggtattgcataaagaacagaaacgccgctggaaaaggctctttgtgctacttcataataaatacaggcaattttctccacatattaaaaggtatttcgatcattcttgccaaaaagcaaaacaatgttggtcgggatccagattgcagttgcgcaagcttcgtttcaagtcaatgaaaccattccgagtttttcagtttaaagttcgcaaagataccaactggtttgtaaagcagctgaaacggttcggattgaaattacagcaagcgaggaggtataaagcgatgtcagaatag

SEQ ID NO: 79096 - DNA, 687 bp, Saccharomyces pastorianus
atgactgtttctacttccaagaccccaaaaaagaatattaagtataccttaacacatactttacaaaaatggaaagaaactttaaagaaaattacccacgaaacgttgagtagtatcgatgactctagtggaagcgatgaaaaaatagaggctctgtttactgtgtctcagcctgccgtcgtagcctccaagggtatagacagagatagtggtgcttctatgtcgcaggtaggaggaggtgtcaatagtacattggagatgaagctcacagatgagagtgaggaatctagctctgctaataacacgaccacaaccgcctcgcatactctatcgaattcgaagaagtctacgcagaactttgaaaactataacgtagtggaggaacgcataaaattagcacagaaaagtaaggcgccgttttgtaacgctgagaaaatctggaaacgaagaagacaactctggacacaacccactgagcaaagtgaaagcgccaataatgacggagttactcgaagggagattttccaagctatacctcaggaatattatgctcgagtttacaagaaactggtggtagatgataagccattgagagagcctctaaatctggaagatgctttacaagtcataaatgcaggctggacggaaacgagaaagtgggctaatgctgccaagggcatgccatga

SEQ ID NO: 79097 - DNA, 1851 bp, Saccharomyces pastorianus
atgatgtcatctatctctttgaaggaaattataccacctcagccttcgacacagcgtaactttactacgcatttatcgtatgaccctacaaccaacgcaattgcttacccatgtggcaaatctgcatttgtacgttgtttgggcgatggagacagtaaagtacctccagtagtacaatttactggtcatggctcttcggtagtcacaacggtaaagttctctccaattaagggttcccagtacctatgctccggtgacgaatctggaaaagtgattgtttggggatggacatttgacaaagaaagcaattctgttgaagtgaatgttaagtctgaattccaagttttagcaggtccaatcagcgatatctcctgggattttgaagggcgaagactctgcgttgtgggagaaggtcgtgataactttggtgttttcatatcctgggattctggtaattccctaggtgaagtttcaggtcactcacaacgcatcaatgcttgtcatttgaagcaatctagacctatgagatctatgacagttggagatgatggatctgttgtcttttatcaaggacctccatttaagttctctgccagtgacagaacacaccacaaacaaggctcatttgtcagggatgttgaattttcacctgacagcggtgaatttgttattacggtagggtctgacagaaagatttcttgctttgatggcaaatcaggtgagtttcttaaatacatagaggatgatcaagaaccagttcaaggtggtatatttgcactatcgtggcttgattcccaaaagtttgctaccgtaggagcagacgctaccattagggtttgggacatcacgacttcaaaatgcgttcaaaaatggaccttagacaagcaacaactgggaaatcaacaagttggtgttgttgcaacaggaaacggaaggattatttctctttcactggatgggaccttaaacttctatgaacttggacatgacgaggttttaaaaaccattagtggtcataacaagggtattactgctttgacagtcaacccactaatcagtgggtcatatgatggtaggattatggaatggtctagctcttccatgcaccaagatcactccaacttgattgtatcattggataatagtaaagcgcaagaatactccagtatttcttgggatgatactttgaaagtgaacggtattactaagcatgaatttggatcgcaaccaaaggttgctagtgcgaacaatgatggcttcactgcagtactaacaaatgatgatgatttgttgatattacaatcttttacgggcgatataatcaagagtgtaagactgaactcaccaggctctgccgttagcttgagccaaaattacgttgcagttggtttggaagaaggtaatactattcaggtatttaaattatcagatttggaagtcagttttgatttaaaaacacctcttcgcgcaaaaccctcgtacatatcaatttcgccatctgaaacatacatcgctgctggagatgttatgggcaagatattgctatatgatttacaatcaagagaagtgaaaacttcaagatgggctttccacaccagtaaaatcaacgccatttcatggaaacctgctgaaaagggagcaaacgaagaggaaattgaagaggacttagttgccactggttctttagacaccaatatttttatttactccgtcaaaagacctatgaaaatcattaaggcgttgaatgctcacaaggacggtgttaacaaccttttatgggaaacaccatctaccttggtcagttctggtgcggacgcttgcattaaaaggtggaatgttgtcctcgagtga

SEQ ID NO: 79098 - DNA, 2577 bp, Saccharomyces pastorianus
atgattttaccgttagacttcgatgaagatgaaaattaccgtgattttaggcctcgcatgcctaaaagacagagaatcccacctgttgtacaactgtgtaaagaaatgatgcccgatattcgcactattggtgaatctgttaaagcttttgaagatgatatcaaattcttgagtgaagctataatgaatgagtatggccatgaggactactttaataatgctttactgagcactttaaacgctgttgttgtggagcaaccacagaagcaagctgctatcgctctcttaaccatggttgttaattcgaaaaataatgttgccggaaagagtattatcaattacttcttcgaagaattacaaaaatggtgcaagcaaacatataatgatgaattcaagagtacgtcaaatgaaactggaccatggaacaagatcaagttaatcctgagatttttatccattctatcgcccatgtttttagttgatgaactaatcaatatctacaagagcttatttgaattgagtatcgaattaaacaatctggatccaggtaacagagttcctttatctgaagcaatttacaccaatacattattaaatatcccgtatttgttcttttttaataggaataatgacggtttgaggacaaaagtggaggagttacttgcatacgttgaacaaaactatctagttaaaacaacggatataaacctattaagagaatacaatggtgaacctccatatgaaatggtagaacttgtccgagtcgtattaccaaacgtcaagaaggcgctaatcaataacttggaacagctgaatgaattatttcctgattggaatcatttattaactccccaaaccggtgatgaagggttcaatgacgctttaacccttccatcagtagatgatctaaagtctttcgtgcgcttgaataaaaactttggttcagttgatagcatgtggaagacaccaaggtatgcttttcatgtttacttgccaaactccgctggtaatttcgaaacagttgtaccaaccagcacttatgctggtcaattattcaacgatatcattattgatctggtggaaagtttagaattcaatagaaaggaagtagctagacaagtgataactttggatctttttttcaaagcaggtatatttacagaacctggtgaatctattgcccaattaattgccacttatgaagagaacccattggctcctacatttaagatagaagatttggctattgaaaccattttgggacttatttttaaattacctagtgtttcccagccttttgcatacttttacactttattggtggatatttgtcaaaattctccaaaagcaattgctcctgtctttggtagagcctttaggtttttttatagtcatttggattcattagattttgaactaaaattaagatatttggactggttttcaattcaaatgagcaactttaatttttcttggaagtggaatgaatgggaagacgattcgatcaaatttggcaagtatttttataatccaaaggtaaattttgctaaaaatttgattcaaaaagaactacgattgacctctaacttttcagaagtagaggacagcctaccacaagaattcacgaaatatttggatacttcttacattccaagagatcaactgattaactactatcaatcattattcaccggttatacggtagaagaagattccgttagaaaaaatgatctatattttagacaagaaggtgtacctatggaaaacacagtccgtaaaattttagattatacccacaaagcaaacaattctagggaagttactgaattagaaagtattctaggtgagttaaagaatgagtatggttccataatttccgactttaacagatttgttatcatattgttagtccaggccgttacagactctggtagtagatctttatcacatgctaataaatatattaatgatttaaaagaagatctcaaaaccatatttgcgaagattgaattggatatcgagacaaaagagtatatcataattgaagccgtcctaacattttggaacgccaaccctcagacaggtttcttagtagcagatgcattcaaatatgcaggtttacttacttccagaaccatttttacatttatatttaacgaaactggtttgaagaataatggtttgattgaagctacagcaattgaagcggtctttagaaatttatctcaacaaatctcggaagagaacgaaagtggaaataattttgagttcgttttcgaaagattatgtaccatcgccaacagtactatagacttactagatgtcaatgctgatgaagatattgagatacctaaagtcaacggggaaatggacatcgacgatattgaagatgataaactggatttgaaatggaaatattttacagtgattgggtttattaaaagtatattaagaaggtattcccacgaatatcgtgagttagcagacaaattcattgccaacattgataacgctattccacacgaatccactaggagaacaatttcgaattggattcaagaaacaaaggaagtttaa

SEQ ID NO: 79099 - DNA, 606 bp, Saccharomyces pastorianus
atgattatagctatctccaagaatttaccaattttgaagaaccacttcagaaagcactggcaagaacgtgtcaaggttcactttgaccaagctggtaaaaaggtttctagacgtaatgctagagctgccagagccgccaagattgctccaagaccattggatttgttgagacctgttgtcagagctccaactgttaagtacaacagaaaggttagagctggtagaggtttcaccttggctgaagttaaggccgctggtttgactgctgcttacaccagaaccattggtattgctgttgaccacagacgtcaaaacagaaaccaagaaatctttgacgctaacgttcaaagattaaaggagtaccaatccaagattatcgttttcccaagagacggtaaggctccagaagctgaacaagttttgtctgctgctgccactttcccaattgctcaaccagctaccgatgttgaagctagagctgttcaagacaatggtgaatctgctttcagaaccttgagattagccagatccgaaaagaaattcagaggtatcagagaaaagagggctagagagaaggctgaagctgaagctgaaaagaagaaataa

SEQ ID NO: 79100 - DNA, 636 bp, Saccharomyces pastorianus
atggatagcaaagaatatctgatatcatatggttggaaagaaggagaagcgtttagagaaggtggtttgaaaagacccatactggtaaagcacaagagagataagaagggattgggtaatgctcctggcgggaatgatggcgaagcatggtgggaaaggctatttgatggacatctgaagaacctggatgtaagcactgattcgaataatggcagtattaaatttactcaaaatgaggcagttgctactgctgtatcgaaaagtagctcacctctatacaggtggtttgtaaagggagaagggctgaaaggaaccattactaatcttggtaaaaaggaggaagccagctttgttgtatctagtgcaagttcgagtaaagggaagaagagaagaaggcgtgatgaagatgataacaaggtcaagagaaaaaaattgaaaaaagataaaaagactagtaacgacagtgagagtaagaagaagaagaagaagaaaagcaagaaggagagtaaaaaaggaaagaaaagtaagcatagcagcgatgaaggtgataaatcgaagcataaaaaatccaaaaagtcaaaaaaacataaaaaggaagaaagttcagcaagaagagatagaaaggagcatatatga

SEQ ID NO: 79101 - DNA, 834 bp, Saccharomyces pastorianus
atgaaggtaaatttaatgttgaaaagagggcttgctactgcaactgcaactgccagttccgctccccccaagattaaagtcggagtactactgtcaagaatccctataattaaatcagaattaaatgaactagagaaaaaatactatgagtaccaatcagaactagaaaagagactaatgtggacgtttccggcatatttttatttcaaaaagggtactgtagcagaacacaaatttctatccctgcagaaaggacctatctccaaaaaaaatggcatttggtttcctagaggcataccggacattaaacatggcagagaaagaagtactaagcaagaagttaaactttctgatgacagcacagtagcatttagcaacaatcaaaaagagcaaagcaaagacgatgttaataggcccgtgattcccaacgacaggataacggaagcagataggtcaaatgatatgaagagccttgaaagacaattgagcaggaccttatatcttttggttaaggataaaagcggtacttggaaattccctaacttcgatctttctgatgaatctaagccgttacacgtacacgcagagaacgaattgaaattgttgagcggtgatcagatatacacttggtctgtttctgctacgcccataggtgttttgcaggacgagagaaataggactgctgagtttattgtgaagtcacacattttggctggaaaatttgatttggtggcgtcgaaaaatgatgcattcgaggattttgcttggctgacaaaaggtgagatcagtgaatatgtaccaaaagattactttaacaaaacagaatttctttta

SEQ ID NO: 79102 - DNA, 1773 bp, Saccharomyces pastorianus
atgaagacctgctactatgagcttttaggggtcgaaacgcatgcttctgatcttgagttaaaaaaagcttaccgtaaaaaggccctacaatatcacccagataaaaacccagataatgttgaagaagccacacaaaaatttgctgtgattcgagccgcttatgaagtactgtctgacccccaggaaagagcatggtatgactcacataaggaacaaattttaaatgatactccaccaagcactgatgattactatgattatgaggtagacgctacagtcacaggtgtcacaactgatgaattactcttattttttaactctgctctttatactaaaatagacaactcagctgctgggatatatcaaattgcaggaaaaatatttgccaagttagctaaagatgagattttaagtggtaagcgactggggaaattttccgagtatcaagatgatgtattcgaacaggatattaatagtattggctatttgaaagcctgcgataactttattaacaagacggataaacttttatatcctttatttggatattcgccaacggattatgaatatttgaaacatttctataagacttggtcagcgttcaataccttgaaaagttttagctggaaagacgagtacatgtactctaaaaactatgacagaagaaccaagagggaagttaatagaagaaatgagaaggctaggcaacaagctcgaaatgagtacaacaaaaccgtgaaaaggtttgtagttttcattaaaaagctcgataaaagaatgaaagaaggtgcaaaaattgcagaagaacagcgtaaactaaaagaacaacagaggaaaaatgagttaaataacagaagaaagtttgggaacgacaacaatgacgaagaaaaatttcatttacaaagctggcaaacggtaaaagaagaaaactgggatgaactggaaaaggtgtatgataattttggagaattcgaaaattctaagaatgataaggaaggtgaagtattgatttacgagtgttttatctgcaacaagacatttaagtcggaaaagcaattgaaaaaccacataaacactaaactgcataagaaaaatatggaagagatacggaaagaaatggaagaggaaaacataacgcttgggttggataatctctccgatctcgagaaatttgattcagcagatgaaagtgttaaagaaaaagaagatattgatctgcaagcattgcaagctgaactcgctgaaattgaaagaaaactggcagaatcgtcttctgaagacgaaagtgaagatgacaatctcaacatagaaatggatatagaggtagaagacgtcagttcggatgaaaatgtacatgtgaatacgaagaataaaaagaaaagaaaaaagaaaaaaaaagcaaaggttgacacagaaacagaggaatctgaatcgttcgatgatactaaagacaaacggagtaatgagttggatgatcttttagcatcactaggagacaagggcttacaaacggatgacgatgaagattggtctactaaagcgaaaaagaaaaagcgcaaacaacctaaaaagaattctaaatccacaaaaagcactccgtccttgtcgactctaccgtcctctatgtctccaacctccgcgatcgaggtgtgcactacatgcggagaatcatttgatagtcgaaataagctattcaaccacgtgaagatagcagggcatgcggcagtgaaaaacgtagtgaaaagaaagaaagtcaagaccaaaagaaaatag

SEQ ID NO: 79103 - DNA, 600 bp, Saccharomyces pastorianus
atgtctgcaaacgaattctactcaagtggccaacaaggtcaatataaccagcaaaacaaccaagaaagaactggtgctccaaacaacggtcaatatggtgccgacaatggtaaccccaacggtgaacgtggtttattttccactattgtaggtggcagtgccggtgcgtacgctggatctaaggtgtcgaacaaccattctaagttgagtggtgtgctgggcgccataggtggtgcattccttgccaacaagatatctgatgagcgtaaagagcataagcaacaagagcaatacggcaactcaaacttcggaggtgctcctcaaggtggacacaacaaccatcaccgtcaggacaataacaacaataacggtggatttggcggtccaggcggccctggcggtcaaggtttcggaagacaaggcccacaaggatttggaggtcctggtccacaagagtttggtggtccaggtggccaaggattcggtggtccaaatcctcaagaattcggcgggccaggtggccaaggattcggtggtccaaaccctcaagaattcgggggccaaggtcgtcaaggattcaatggcggttcacgttggtga

SEQ ID NO: 79104 - DNA, 999 bp, Saccharomyces pastorianus
atgagttcaccagcgaacctactccctggattaaacgacataactgacgtgctggaggaattcccactggccacctccagatatttaacattattacacgaaatagatgcaaaatgtgtgcattctatgccgaatttgaacgagaggatagataagttcttgaagaaagacttcaataaagatcaccaaacacaagtaagactgctcaataatatcaacaagatttatgaagaactgatgccatcgctggaggagaaaatgcatgtctcatccattatgctggataatctagacagattgacgtcccggttagaattggcgtatgaagtcgcaatcaagaacacagaaattcctagaggtttaagactgggtgtggacaaccatccagcaatgcacctccatcatgaactaatggaaaaaatagagagcaaatcaaacagcaaatcgtcgcaggcactgaagagcgaatcaagaagagaagccatggctgccaacaggaggcagggcgaacattactccgccagcacacaccaacaagacgactcaaagaacgacgcaaactgcggaggcagcaggcacgagagccaagaccacactggtaacaacacaaactcaagaaaaagagccaacgctgccaataccaacaacgccgatccagagaccaaaaaacgcaagaggagagttgccaccacagccgtttcaccaagcactatcagcacggcaactgccgtcaataatggcaggataggtacatctacagcgtccaggggagttagcagcgtcggaaacagcaacaacagcaggatatcaagaccaaaaaccaacgactacggcgaaccgctctactgctactgtaaccaagtggcatacggggaaatggtggggtgtgatggcgcagactgtgagctagaatggttccatttgccatgtattggactcgaaactctacctaagggcaagtggtattgcgacgactgcaaaaaaaaaactgtgaaatag

SEQ ID NO: 79105 - DNA, 1290 bp, Saccharomyces pastorianus
atgtctgcattgagaaacatcaagttcaatgaagaagaagatggtgaactaccctgcctcgtaacaggtgaagaaaataatctacaagaaattttggaaaatgtctcgtatgatggtggaaatattgttagcgatgcaaaagttgaaagggtaaacaagcaagtggagaacacttctgcaggcgcaacagatgtgcacgagaaaaagcgtattcctgtgagcattattaccggctatctaggatcaggtaaatcgacgttgctggaaaaaattgcattaaaaggtgcagataaaaaaattgccgtaattttaaatgaatttggagattctagtgaaatcgaaaaagctatgaccattaaaaatggatcgaacagctaccaggaatggttggatttgggtaacgggtgtctgtgttgttcgttgaaaaatataggtgttaaagccatcgaagatatggtggaacgttcacctggtaaaatcgattatatccttttagagacctctggtattgcagatcccgcccctattgcaaaaatgttctggcaggacgaaggattgaatagcagcgtttacattgacgggatcatcacggttttggattgtgagcatatactaaaatgcttagatgatatttccatcgatgcccactggcatggtgacaaagttggtttggaggggaatttgactatcgcacacttccaactagccatggctgatcgaattataatgaacaaatacgatactatcgaacattcaccagaaatggtcaaacaattaaaagaaagagtacgggaaataaattctatcgcaccgatgttcttcaccaagtatagtgataccccgattcaaaatttactagatattcatgcatacgacagtatacggatatctgacatcttagatagtggtagcggaaacggtaccattcatgatgatcgaatgggcacaataatgcttaatttcagaccattaaaaaacgaggaagaatataataataagtttattaagcaatttttgcaacctttattgtggaagaattttggagccatgtcagtgctgggagggcatcgccgagatgacggccgtgattgggaagtacaaagaactaaaggtctgatacttattgaaggagagaatcccattgctcgtgtaatccaaggcgtccgcgacacctacgatgtctttccaggcaaatatgacggatccaataaagagtgtaaaattgtgctgattgggaagtacctagaaaaggaatccatagaggaactgttacgtaaaaccttgggatga

SEQ ID NO: 79106 - DNA, 1038 bp, Saccharomyces pastorianus
atgctacacttacaaccacaaaaccttctcatccaaaagacactgaatgaagcgatagaggcacttcgcaagggttcgccgttgaccatggacagaattgtttccgatttcgactataccacctaccacatttcaaacacagcagaagataagtccattctgttgttgagtgttaagaccaaagcttgggtaagtgtctctgagtgccaattggacggttctttgacgttactgaagtttctggccgaccactactcctctttgggtggggtgactatcccaagtgaagtggagcccggctatgactacactcttcacattacgttggccgaattggttcaagaatcgattttacaactgtctgttttgaagaccattatattgagttttcccttcgaattggccatttcgaagtttattgaactaagccagcagcaaccggcacctgtcgaagcagaaattactggcggtgaggttgctgccaatggagacaacactttgttcacaatcaagtatcgtgacgaggagaacatcttcatcaaaccttccaatgacagagttaccataatcttcgagactatttttcaagacgaaacagataaaatttttggcaaggtctttttacaagaattcgtggatgcacgtaagagaaaccgtcaaatccaatccgctccacaagttttatactcacatgaaccaccattggagttgaagagactatatcaaccacctaaagttgcagagcaaagtagaagatttatcacgtttgttcttttcccacgtcatttccagacaaaagagttgcaattccattcaatttgccagttaacattgtttagaaactacttccattatcacataaagtgctctaaagcctacatgcactccagaatgagattcagagtggactcgttcatcaaagtcttaaatagagccaaggtggacgaagatgatgaaaatgatgaattgagtgcagaaggcagacaacaggcaagaagaaccttcaccggtagaaagattgtctactcgaaagattaa

SEQ ID NO: 79107 - DNA, 714 bp, Saccharomyces pastorianus
atggtctgcgatacagtagtatatcatccttccgtgatgaggttcgtcaaattcctagatggctcggccggtagagaaaagattctgaggttgctacaatacttggcaaggtttttagctgtacagaactcgtcagtgttggccagactattgcaaactcaattcactactgtaaggaagttcttgaggtttttgaaacctttgaaccacttgcaagctgctgccaaattttacgacaacaaattggctagtgataacgttattagagtctgtaacattttgaaaaacgtcttctttgctgcgtatttgtcactggaccaagtaaatcttttaagaatcttaaaagtgatcccggtgaccatccttaccggtaagaaggtaccccgttggtctaactggtgttggttgttcggccttttaagtgggttggttatggatcttcgcaagatccaaacatctcaatctcagatcactgcattcgtaagtgccaaatcgcaaggccaaggcggcgagaaggaagatcacaagaaagtgttgggaaaagcttatcaagacagatatgccgctttgagaagactggtctgggacgctgcagactcgttcatagtcctcaacaacctaggctatttgtctagcaacgaggaatacgttgcattgtctggtgtggtcacttctgtttttggtatgcaagacatgtggaaagctacttcttaa

SEQ ID NO: 79108 - DNA, 2091 bp, Saccharomyces pastorianus
atgatgaagaatctgaccactataaagcaaacgaacaagaatgtcaaacaagaaagacgtaaaaagtacgctgatttggcgattcaaggcacaaataactcctcaattgcttctaaaagatcggtagagttattgtatttgccaaaactgacttcagctaataatttccaaatggataagaataataaactattggaatattttaaattctttgttcctaagaaaattaaaagatctccctgtattaacagaggttattggttgaggttatttgccatcaggtcaagattgaactccatcattgaacaaacgccacaggataaaaagatagttgttgttaaccttggttgtgggtatgatccattaccatttcaactattagacaccaataacatacaaagtcaacaatatcatgaccgagtttcctttattgatattgattactctgatttattgaaaattaaaattgagttgatcaaaacaatacccgagctttcgaaaattattggtctttctgaagataaagattatgttgatagtagtaatgttgattttttgacttctccaaagtatctcgcccgaccatgcgacttgaacgattctaagatgttcagcacattgctaaatgagtgtcaattatacgatccaaacgttgtcaaagtatttgttgctgaagtatcactggcgtatatgaagccggagcgttctgatagtataatcgaggcaacttctaagatggagaatagtcattttattattcttgagcagttgattccaaagggaccttttgaacccttttctaagcagatgctagctcatttcaagagaaatgattctccgttacagtctgtattaaagtacaatactatcgagtcacaggttcaacgattcaataagttaggtttcgcttacgttaacgtgggtgatatgtttcaactgtgggaaagcgcagatgaggcaaccaagaaggaacttttaaaggtagagccttttgatgaattagaggagttccatttattttgtcatcattatgttttatgccacgctacgaactataaagaattcgcatttactcaagggtttttgtttgacagatcaatatctgagataaacctaactgtggatgaagactatcagcttctagaatgcgagtgccccataaatagaaaatttggcgatgcagatgtcgctggaaatgatgtgttttacatgggaggtagtaacccatacagagtaaacgaaatattacagttgagtatacatcacgacaaaatagacatgaagaatattgaagtaagcagcagcgaggttcctgtagcaagaatgtgtcacacttttactactatttctaaaaataaccagctactgcttattggaggtagaaaggcaccacaccaaggtctctctgataattggatatttgatatggaaacaagagagtggtcgatgatcaagagtttatcacacacgagattcagacatagtgcatgtagcttaccggatggaaacgtcctgatccttggtggggttacagaaggacctgtcatgctgctatacaatgtcaccgaagaaatcttcaaagacgtaactccaaaagatgaattcttccaaaattcgccagtatcagcgggtctagaatttgatccggtttccaaacaaggcataatattgggtggtggatttatggatcaaacaactgtctcggacaaggtaattattttcaaatatgatgcggaaaatgctactgaaccaattacggtgattaagaagctccagcaccccttatttcaacgttatggatcccagataaaatacattactccaagaaagctattaatagtcggtggaacaagtccttccgggctatttgaccggaccaactctataatcagccttgatccgctgagtgagatgctaacatcaattcccatatcaagacgcatatgggaagatcactcactaatgcttgctggatttagtttggtgtccacttctatgggcaccatacatatcattggaggcggtgccacttgctacggctttggatcagtgactaatgtaggtcttaagctcatagcaatcgcgaaataa

SEQ ID NO: 79109 - DNA, 1272 bp, Saccharomyces pastorianus
atgattctccttctgatactttttccctgtatatattttctccccttctgtataaatcgtacagtcagaaatagtccagaatatagtgctgcagactattacaaaagttcaatacaatatcataaaagttatagtaacatgcctcactcagttacaccatccatagaacaagattcgttaaaaattgccattttaggtgctgccggcggtatcgggcagtcgttatcgctgcttttgaaagctcagttgcaataccagttaaaggagagcaaccggagcgttacccacattcatctggctctttacgatgtcaaccaagaagccatcaacggtgttaccgccgacttgtctcatatagacacccccatttccgtgtcgagccactctcctgcgggtggcattgagaactgtttgcataacgcttctattgttgtcattcctgcaggtgttccaagaaaacctggcatgactcgtgatgacttatttaacgtgaatgctggtatcattagccagctcggtgattctatcgcagaatgttgtgatctttccaaggtcttcgttcttgtcatttccaaccctgttaattctttagtcccagtgatggtttctaacattcttaagaaccatcctcagtctagaaattccggcattgaaagaaggatcatgggtgtcaccaagctcgacattgtcagagcgtccacttttctacgtgagataaacattgagtcagggctaactcctcgtgttaactccatgcctgacgtccctgtaattggcgggcattctggcgagactattattccgttgttttcacagtcaaacttcctatcgagattaaatgaggaccaattgaaatatttaatacatagagtccaatacggtggtgatgaagtggtcaaggccaagaacggtaaaggtagtgctaccttatcgatggcccatgccggttataagtgtgttgtccaatttgtttctttgttattgggtaacattgagcagatccatggaacctactatgtgccattaaaagatgcgaacaacttccccattgctcctggggcagatcaattgttgcctctggtggacggtgcagactactttgccataccattaactattactacgaagggtgtttcctatgtggattatgacatcgttaataggatgaacgacatggaacgcaaccaaatgttgccaatttgcgtctcccagttaaagaaaaatatcgataagggcttggaattcgttgcatcgagatctgcttcaccttaa

SEQ ID NO: 79110 - DNA, 1479 bp, Saccharomyces pastorianus
atgataatgtcatcaactatgtcgacagaagccgccttggtaccgaacgaaagtgtttttgacacagtttcgtcattcaacgaagacgatgccaattatagcgttcttgatttatacgatgacgacgatgaaggggatgatagttctacagtagaacgaaaagaaatattgacaacacgtgagcttgaaaaagcaaaggcgtttaccagcttaatcatggcagatcctgagaattttgatagatatggatttagcaagaaaggatatttcattagtcaggaagaatacgacaaatggtggacagaatataatagatacaccgaaagaagaaaaaaaaagtgggagaactttcttcttaagaataagattgagctccacaatgataatcctctagtatatcctgcaaggacagatgaattgtcaaaatttgttagaaaaggtataccagcagaatggagagggaatgcctggtggtattttgctggtggacaacgacaattagacgcaaacgttggcgtttatgatagactgaaaagtgactgtcgcgagggtgccgtatctggtaaagatatggaagctatagaacgggatctttatcgaacgtttcccgataatatacatttccataaggagtccttccaaaatggagagccggcgatcatccgatcgttgcgtcgagtattaatggccttttctgtttatgacaagactattggatactgccaatcgatgaattttctcgttggattgttattattgttcatggaagaagagaaagcattttggatgctggttattattaccggtaagtatttacctggcgtgtatgaatcagatttagagggtgcgaacgtggatcaaggggtgttggtgttatgtatcaaggaatatttacccgagatatggtcacacattgagtcatcgtatatgaatggcaatggcagcactgaccagatatcagggccagcatcgggggaagagtatctctgcaggctgcctacgctgacgctgtgtacggcaagttggtttatgagctgttttgtgggcgtggtgcccatcgaaacgaccctgagaatatgggactgtttattctatgaagagtctcattttttattcaaagtggctttggggatactgaaattgagcgagagcgagtttttggagagtaaaagccagaaactgtttagacagtactcttcgtacaccttcggtggtagtaatgactctgattcaactttcaaaagattaaagaacaagattaagacgcaggaagaggcagatatggagattttgcaagtgattcaaaatttcccaaaaagattgctcaatccgaatgatatctttgagaaagtcctgatgaagaaaaaggttgcgttgaatggtattacccaggaaaagattgatcgcggtagagagtatgtggcgatggcgagaaatagacaaagggcgagtagccgcccaaaggaaagaggaagatag

SEQ ID NO: 79111 - DNA, 2622 bp, Saccharomyces pastorianus
atgagattattaaagtatcctttggatattcataatgaacaagtgaatgccttagctgcccttggtccctatatcatattggcaggcagtgggggtcacgtgatggcgtggagacaacaacaactagtcgatactgcattcgatagggttatgattaaggatttaaagccagaagtttctttccaggtggatcaggatactaccggtgatatttttttcataacaggtgatctcgaaacattgtatatcggatctgaacatcgtctgtggggttattcaggttggctctgtagagatacaaataccatcaattctgtcgaaaaaatgaacagtaagcttctgttcgagtgtaaatctccaagcacaataacggatgtgaaatatgacataaacttaggtatcttatttgttcttttaagtaatgaaaataagatactattatttcggcataaaacctttgataaactctctgaaataactattgacaaggcgagcaaacctattacaggcataatagatcctactggccaaacttttactgttatgacttcagatagatcaattttagtctatcaaattaacaaaacgggtacacacaaactcataaataaacttacgcagcatgtacaaatgtatccattacattatagaatctcaatgtcacctcaggcagacattttaccagtgataaactcggtgaaaggtgtgccgaataatgctaccaactgtaccgctttacttgacagaaataacaactacaaagttacaaaaacactggtaacaccttcttcaaatggatgtagagttcttgtttattctccagcattttatgaaaagcctaatttgaaaaagggcaccagcacacgctataatttaatcgccacttcgggatctacagacggtactattttggtttggaatacgaagagaatgaaacctttgtttaatgctctccaggtttcctccaccgcaataaacgatatgtcttggtcacaggatgggttcaccttgtttgccatttcaaacgacgcgacattgtatacattcgcattccaagagaaggatttaggtgtagcattgcctcaaacggaaatcaaatcgttacaagaagtaaacaaaaagcttccaaagcttgaagagccgttagcagaacaaataccgaaaagtttcccagaaaacatcaaattagaagaatctgcaagcgcagcacctattccaaacgatattggtagatctgccgtgggcaagaaaccgaccaaaaaaaaaacggctaacaatcaaactaatggcatcaaaactatccagagcacatcaatggaattcaacactccatcatacactgtgccaagggatttgaagagaaagccaaaagaggcaactccaagtaacattgcccctggcagcaaaaagcagaaaaaagagctacagccaattgactttttagataccggcttgctcctacccaatacgtctttctcaaggattagacttgcaacaccgaaaatcagatctacatttaaatactctccaattaataatccgaatttaatcctcgatgttaagaatggatctggcaatgaacaaaggccgacaattgtcaagcttacctcaaaagttctcgatcaagatcaagttctatttcaagattttattccaaaactcataacaatctgcacagcaggtgacaccttttggtcattctgtagtgaggacggaagtatttacatatattctgattcgggtagaaaactaatggctcccctagtattaggagttagcattagtttccttgaagcatgtggaacttatttactttgcttaacaagcataggggagctttattgttggaacatagagcagaagaagctggcttttcccaccaacactatttatccattgttaaacccgtcattgcgatactcagatgatatattgaccagagctgaaaatataacattgtgctctattacaaaaaagggtgtgccactagttacactgagtaatggcgatggttatttgttcgataagaacatggaagcatggcttctggtaagcgatgggtggtgggcctatggttcgcagtactgggacactactaatactactgggttgtcttctagcaaagcaaataccgactcttttaatggcagtgaatctaatattaatgaaatagttagtgatatcaagaatgataatcaaagtatcattaactttttggaacgcaaaacgaatgacgaacttaatagaaagggtaggattaagaatttacagagatttgctaggaccatattaatgaaagagggatttgaaaatatggaggagatcgtaactttgtctcacctggaaaataaaatcctaataagtatcagattggaggagcctgaagagttttcgaagctaatgatggtttattgcatccgtctgagtgaattggggtatatggaccgtttgaacgatgtttttcaatggttatatgatgatctccccatcagtggtaccgggtcagcatttgccgataaagattttaagaggaaccttctaaaaaagatactaattgcctgcggtgatatcagacaggtttcaagagtttataaacgttatgccaaggaaatgaatattata

SEQ ID NO: 79112 - DNA, 657 bp, Saccharomyces pastorianus
atggaacatctcgccaacgaaaactcggattcggatatcaggtacagtttccttagcactttggatcatttaccatgtgaactaataagatctcttcgactgatgcaaacaatcgacttattcaagaatgaagaggatgagcctggtatggaaagggcctgtagggatctgttgctggtagcgacttatattaatgatctggtcgatgatcagattcatttcttaaagcagcataagaaggaactagagatacagaagtcagtgacaaaaaatttcaactcttcgctagagaatatcaagtcgaagttgacgttagaagaaccaggagcatataaggagccaaaactgcttttaaagattaacttgaaaaaggctaaatcgagggaaagaaaagagagcataactagccccacaattgggattaaccagggtgatgtaacagagggtaataataatcaagaggaggtttattgtttctgtaggaatgtatcttatgggccaatggtggcttgtgataatccggcttgtcccttcgagtggttccattatggttgcgtaggcctgaaacaagctcccaagggcaaatggtattgtagcaaagattgtaaggaaatagcaaaccagaggtccaagtcaaaacggcaaaaaagaaagtaa

SEQ ID NO: 79113 - DNA, 717 bp, Saccharomyces pastorianus
atgaaaatgttaggattatatctatcctccctgttcttcgccttttttatggcacaagtgtttgctaccaaatactcaattacttttacatcagatgagtatgaagaagatgaaacaggacaaaatgaacctggccctttagttttccatttgaataaaaactcattaccaccagctctgctaaatcaaatggagtttaatccatacttagtattagcagatttaccggaggagccgcgagctgttgattctcaagaacataccgatacggtccttgcttccaaatctgttatagattttctgttggaacatcctctaacaatagtggagcacaaaaagttttctcaaattgaaagtattctacatgaaattatggaagatagcatacagaagaaagtcggggcagacgaggtatttgaagagattgcgaaaccgaaaatttacgcgtatgaagatattttagtaactaatatgagcatcatcaataatagtgaaatgccgacaagtactgcaacattaacgagcaccattccttatttatctagtacgacaagtttagctttatccacgggtgttaccagcgttgagattttcccaacaatcaccccgggaaatattacaactattgggggatacgaaaattcatcatcctccttaatgccgtcgatgggaatcttatcttttctatttggtctgtacttgttacttcacccttaa

SEQ ID NO: 79114 - DNA, 1362 bp, Saccharomyces pastorianus
atgattcaaacgcaaagtacagcgatcaaacgacgtaattctgttcataaaaacctctttgatccatcactgtatcaaataccagaaccaccacgtggggggttccaacaccaaaaaaaagaatacagtaaggagacattcagtaatcaagtctttggatatgatattactagtcttaaaaaaagattcacgcaactatttcctagtaatatacaagggtacttacctgaagttgacctaagaataaccattatttgttctatatggtacgtcacgtcatctatttcaagtaacctttctaaagccattttaagaactttcaaccatcccatagctctcacagaattgcaatttcttgttagtgctgttctatgtgttggatttgcttccatcgtaaatttattccgactacctcgtttgaagcgtacgaagttttcaaaggcactcaatagtttccctgacggtatccttcctgaatatctcgatggcaatttccgaagttctatcctgcacaagtttttagttccctcaaagctggttttgatgaccactttccctatgggaatattccaatttattggtcatatcacatcgcacaaggcggtatctatgataccagtatcactagtgcattccgtgaaggcattatccccaataataacagttggctactataaatttttcgaacatcgttattacaattccatgacttattataccttgttacttttaatttttggcgttatgactacttgctggtcaacacatggcagtaagagggcttcagataacaaaagcggatcttcattaatcgggttgctttttgcctttatttccatgataatatttgtagcgcagaatatttttgcaaagaatattttaaccatcagaaggaaggtaggaatactgccgtcttcttctacggatgacgtcacgtcgaaggaagggcaaccgagtctagacaaaacaagattttctccattgcaagtggataagattaccatattgttctactgctcctgcattgggttttctttaaccctattaccttttttaaccggcgaattaatgcatggcggtagcgttatcaacaatttaacgctagaaacagtagcccttgtagcgattcatggaatagcccattttttccaagcaatgcttgctttccagttgatcggtttactatcttccattaattattcggtagcaaacatcatgaagaggattgtcgttatatccgtggcactcttttgggaaacaaaggtaaatttttttcaggtgtttggtgttatcttgacaattgccggattgtacggttatgacaaatgggggctttccaaaaaagatggacgtcagacataa

SEQ ID NO: 79115 - DNA, 636 bp, Saccharomyces pastorianus
atgaatagtacaaacacagttgtatatatcaaagttaagggtaagagaccacagggattcttggatcctcccaaatttgagtggaatggaacaaaggagcgacagctttggacaatggtatcaaatttgaattattcacaagatcaaatagattggctgaatttatcaaaaatatttgaaacgcctgaattttttcttaaaaagagaacatataaattatttgctgaacacttagagcttttacaactacaattggagaaaaaaagagatcttgagaagtattcaaatgatcaagtgaatgaagggatgtctgatttaatacataaatatacccctactttacaaaatgataatctattaaatgtatccgcaagcccactgaccacggaaagacaggattccgaagaagttgagacagaagtaacaaatgaggcgttacaacatttgcaaacttccaaaattttgaacattcacaagaaaacatcggatagtgagaataagcctaatgacaaattggataaggatggtattaataaggaaatggagtgcggtagttcagatgacgatttatcttcgagcttaagtgttagtaaatctgcgttggaagaagcgctaatggacagattgcaattctga

SEQ ID NO: 79116 - DNA, 456 bp, Saccharomyces pastorianus
atgattgtgatgttagtaaagacgattagccgaactattgaatcagaatctggatttctacagccgacgctggatgttattgctactctacctgcagacgatcgttctaaaaaaatacctattagtctggtagtgggatttaaacaagaggcctcgctgaattcatcttcatccttatcatgttattactacgccattcccttaatgagggatagacatatgaacctcaaatcaggcggaagcaacgttgtggggataccgttattagatactaaagatgaccggattcgtgatatggctagacacatggccacaataatatctgaaaggttcaataggccgtgttatgtaacgtggtcatcgctgcctagtgaagatccctctatgctagtagcaaaccatttatatatcttaaagaagtgtctcgatctcttgaaaactgaactcggtgagtaa

SEQ ID NO: 79117 - DNA, 498 bp, Saccharomyces pastorianus
atgaccactcgaaaaacagtagattcaagacttttagaatggcaaaccacatgcaagcatccagtgataaacttgacgccagagaaagtcgataaattataccacttgaaattgaaaagtgaaagcaaaaatatcagttcaaacaggctattgcccatttcattatcaagcttacaaaaaaaaatggagaaacttttcatcaaagataaaagtcactcacacaagccttcccttccagatcctaaggtgccaacccttcgcacttataaagatggtggatttttcattagcggaaaaggttcaatgaaactaccagatatcgaaagcgctattcataaatttttatggaagaaatacgggaaaggattggtttactgttatgggtgtgatccaactggaaaaaagaggcatacagagtggttcaatgtgcctgtattggagctaccatcagtactaagacttattgattcttattgccttggaggagaatcttgttag

SEQ ID NO: 79118 - DNA, 2472 bp, Saccharomyces pastorianus
atgtcgtcttcctcacttcgagttttagctattgggaacaacccgaatatcttgttctacacctcaaggtttcaactggccaagaatatagacctctaccacgtcaacgattcaaaatcatgtcaatttgaaattgaaactgaatactacggcaaagaccggttcgaattggaaaatcatttcacctctatcgagcacttgactgaagctttgagctccaaatcaagtgaagccgtcttcgacataatcatcatgagtgctccatctttacaggaattatcctcgttagcgtccaagttaacgtccataatcgattcgaacaccaaaattttcttagaaagcagtggtttcatccaattggaaccgtttgtcaaattatcgatggaatctccgcatgtaaacgttttcagtattttgactgatttggatattcgtcaaatcggtccaaaccatttcaagcactttcctagtactgcaaaggagaacacgatttacctcggcgaaagtaagtccagcactgagaaatattcatcaggcgttataacattattaaccacttttgaaaaactgtttgctaaattgttttccaacataaaaatcaatttgtgcaatttctcatcaattgagtttctatcacaacaatggaagctggcgatttccagaatttgttttgatccgttgttaatcatgtttgaacaagaaaacccaagtgatctagaccagcagatcattgccaaacctttaatatcaggtctggtaactgaaatcatcactgtagcaaaaacaatgggagccagactaaacagtagttatgataatgaaaactctcttttatctctatggaagaattcttatcattcaaccaataagccacctgcattggtttatcatttcattcatcaaacaacgcctttaaacatcgatatcctgttgttacaaactattttattagccgatgactttggtatcaaaactccgtacttagaatttttatactctgttttgtcccaatttgaaagattgaatagtggcaaatctaaatggtttattaggtcagatgaaaaaactcaaatcttacaaagcttgcaaaaatcacaaaaaaatgaatctgctttacagactcaaattacctccttacaaggtcaaattagtaaactaagacaagagttgcttatgcaggccaagcaacatgaaatggaaactaatgagttaaaggagaaacatcaagttgctctaaaagcccaagcccaagcccaagctcaagcccaagctcaagcccaatctcaagctcaaacatcaattgaagcactaacgccaactgaagcaacaaaccaatccgatacaaatgaatataaagcaacaggaactccgaatttgagggacatcgaagatatggcactatatagtgtaaactacggagactctccagtgagatctccaccacctgttgtaagctctcagccacaaatgaactcaccattatcctcacattcacaaactttcggagagactaatggcacgaatgacaaattactacaagaacgcgaattgcaactccgtaaaaaggaattagagctacaagaacgtgaactggagttccagaaaagagcattacagcaacaaagatttaataatagcaataattcaattccaagaaagccttccttccctcaattacagcagtctgcaaacgttcgttctaacagcagaggaatgcatggcaccaatggcgctatgtctcaacctgcatccgccggaaattttgtagatccaatttcttcaagtatcgctgcatatgacccgcaacaacctccttccttacccctacagcagtcacaacaatcggtacaagtacaaccttttcactcacactctatcaagcccacaagtaggaagaatagaaatagtaatatgcctaatattggtaatccttccagtataaatatgagtgattttggcagaccaccgaacaattcaagtcaaactcgcttaaattccatgccaacgcatagcatcgtaaaccagaatagattgagatcacaacaatcgaaaaacaaactgaatatgccacatgccaccaacccaaacaatacttttaaccaagtccctgctcctagtttaaacaatcacgttcccacacaaaggcaatttagctccagtaccatgatagaagttacaaataataacaacaaagttaataacagtagtagcaaccctgatatttccaccaattcggtagttcataacgcaatgcaatttacaaatacaaacaacaatacaagtagcactgtggatataaacgatcccaaaaatattgcaccccctcctacaacctctgtttcagccccaagcactccaaccttgtcctcatcaagtcaaatggtgaatatggcttcgcctagtaccgataatggtgacaatgaggagaaaaatggtggtaagaagaagagatttggcctattcaaaaaaaaa

SEQ ID NO: 79119 - DNA, 480 bp, Saccharomyces pastorianus
atgacaattgaaaaaccaaaaatatcggtcgcattcatttgtttgggtaacttctgtagatcaccaatggcggaagccattttcaaacatgaagtcgaaaaggctaatctagaaaatcgattcaacaagattgattcatttggcacttctaattatcatgtgggggaaagccctgatcatcgtacagtgtccatttgtaagcaacatggcgtcaagattaatcataaagggaaacaaataaagaccaaacacttcgatgaatatgactatataatcggtatggatgaatccaacattaatagcctaaaaaaaatacaacctgaaggttctaaagctaaagtttgccttttaggtgatgggaacactaatgatggcactgtgcagaccattattgaagatccttggtatggtgacatacaagatttcaagtacaatttcaaacaaatcacctatttctccaaacagtttttaaaaaaagag

SEQ ID NO: 79120 - DNA, 804 bp, Saccharomyces pastorianus
atgggtttacctgaagttaactttcttcgaaaaaactgcatacttgtggagttaaaattattctatcaaacagtatacccaccgaaggaactatattggaataaccgaataaccgcagaattgagtacattctccaatattaagtatgcaaggccgactttcgcagtaaataatggcacatttcagagaacaagaccgaaattagacttggtactggcttcatctgatattcgtaagctggctacggttttatttaatttaaaagctctcataatgaatacgaagggtgaggaacccactctaaccacgatgactagtgtccaaacgaacgaagagaaaaatgataacctggaacagaaatattcaagtctgctagatagatggaatgggaaagtagaagtgcatgattctcctttccttcaactccaacgggacagcacccttttgtttgctgagaggccggtacgttacgttagcactacagaaggtgaaggcgtggacatatctagtgaagagtttttcaggttagaggaagaacagtgccgaaggaattatgatgttttggtcgatgaacattctacaccatcaatcgggatgaaagacggccaatacggaccaaatataattcactttgaaccgtcgctgtaccacacatattcttctctaccaatgagtatgaaattttggttaaatggtctagaagacgacgaaacgacgatgatgaacattgatgagaagtcagccgaaaatctggatatattattacatggtttcaaaggattttcgaacaagcgcgttaaagga

SEQ ID NO: 79121 - DNA, 1530 bp, Saccharomyces pastorianus
atgaatatagagacgaagccgataggccatggtggagatttttcgatgaacaagagtatcggatcaatgaaaaggaaagatctcacaataaatggtatagttggttcaaacagggtacctcttttaaagaaaaaaaaattattaattaaattggatgtccttttagccttttattcttgtattgcttattgggtcaaatatttggatacggttaatataaacaacgcttacgtttcgggaatgaaggaagatttaggctttcaaggtaatgatttggtgcatactcaagtaatgtacacaattggtaatattatatttcaattgccatttttgatttacctgaacaagctcccattaaactatgttttaccaagcctcgacttatgttggtcgcttttaaccgttggtgctgcatatgtcaattctgtaccacacttgaaagcaattaggtttttcattggggcttttgaagcgccaagttatttggcataccaatatttgtttggttccttttacaaacatgatgaaatggtgcgtcgttctgctttttactatttgggccagtatatcggtattctatccgctggtgggatccagtcagccgtatattcatcgttaaatggtgtaaatggtttagagggatggagatggaactttattattgacgctattgtgtctgtcatagtgggccttattggattttactccctgccaggtgacccatacaattgttattctattttcttaactgatgacgaaattagattggcgaggaaaagattaaaagaaaaccaaacaggtaaaagtgattttgaaacaaaagtattcgatattaaactgtggaaaacaattttcagtgattggaaaatatacattttaactttatggaatattttctgttggaatgacagtaatgtttcatctggggcatacctactatggttgaaatctttgaaaagatactctattcctaagctcaatcagttatccatgattactccgggtttaggtatggtttatttgatgcttactggtgttattgcagataaattacactctcgttggtttgcgattatttttactcaggttttcaatatcattggtaactccatattagccgcttgggacgtcgcagaaggagccaaatggtttgcatttatgctgcaatgttttggttgggctatggctcctgttttatactcttggcagaacgatatttgtcgccgagatgctcaaactagagctattactttagttacaatgaatattatggctcaatcatctaccgcatggataagtgttttggtttggaaaacagaagaagctcccaggtatttaaaggggttcagtttcactgcatgctctgctttttgtctctccatttggacttttgttgtactctacttctataaacgtgatgaaaggaacaatgccaagaagaacggtattgtgctttataactctaaacacggtgtggaaaaggcaacgtcaaaagaagttgaaaccttatcagtatctgatgaaaaataa

SEQ ID NO: 79122 - DNA, 402 bp, Saccharomyces pastorianus
atgtattcaattgttaatgagattattgtagatccttacaaaagactaaaatggggttttattccagtaaagcggcatgtggaagacctgccagatgacttaaattcaacagaagttttcactatctccaacagtatccagagtcatgaaacagctgaaaatttcatcacgactacaagtgaaaaagatcaactacattttgagactagtagctatagtgaacataaagacaatgtgaaccttactagaagttatgaatatagagacgaagccgataggccatggtggagatttttcgatgaacaagagtatcggatcaatgaaaaggaaagatctcacaataaatggtatagttggttcaaacagggtacctcttttaaagaaaaaaaaattattaattaa

SEQ ID NO: 79123 - DNA, 471 bp, Saccharomyces pastorianus
atggacgcatgtgagcaacgtcgacattgccttgccctgtgctaccaaaacgaggtcagtggtgacgaagccaaggccctagtggcatctggcgttaagttcgttgccgaaggtgctaacatgggttctacacccgaggctatttctgttttcgaaacagcgcgtagcactgcaaccaatgccaaggatgcagtttggtttgggccaccaaaggcagctaacctgggcggcgtggcagtatccggtctggaaatggctcagaattctcaaaaagtaacttggactgccgagcgggtcgatcaagaactaaagaagataatgatcaactgcttcaacgactgcatacaggccgcacaagagtactctacggaaaaaaatacaaacaccttgccatcattggtcaagggggccaacattgccagcttcgtcatggtggctgacgcaatgcttgaccagggagacgttttttag

SEQ ID NO: 79124 - DNA, 984 bp, Saccharomyces pastorianus
atgacaagcgaaccagagtttcagcaggcttacgatgagatcgtttcttctgtggaggattccaaaatctttgaaaaattcccacagtataaaaaagtgttacctattgtttctgtcccggagaggatcattcaattcagggtcacgtgggaaaatgataatggcgagcaagaagtggctcaaggatatagggtgcagttcaattcagccaagggcccttacaagggtggcctacgcttccacccatcagtgaatctgtctatcctaaaatttttgggtttcgaacagatcttcaagaatgcgctcactgggctagatatgggcggtggtaagggtggcctgtgtgtggacttgaaaagcaagtctgacaacgagatcagaaggatttgttatgcgttcatgagagaattgagcaggcatatcggtaaggacacagacgtgcccgcaggagatattggtgtcggtggccgtgaaattggctacctattcggcgcttacagatcatacaagaactcctgggaaggtgtgttgactggtaagggtttaaactggggtggctcacttatcaggccggaggccaccgggttcggcctagtttactatacgcaagcaatgatcgattatgcaacaaacggcaaggagtcgtttgagggcaaacgtgtgacaatctccggaagtggcaatgttgcgcaatatgcagctttaaaagtgatcgagctgggtggtattgtggtgtctttatccgattcgaaggggtgcatcatctgtgagacgggcattacttctgagcaaattcacgatatcgcttccgccaagatccgtttcaagtcgttagaggaaatcgttgatgaatactctactttcagcgaaagtaagatgaagtacgttgcaggagcacgcccatggacgcatgtgagcaacgtcgacattgccttgccctgtgctaccaaaacgaggtcagtggtgacgaagccaaggccctag

SEQ ID NO: 79125 - DNA, 567 bp, Saccharomyces pastorianus
atggccaagaaaatatcaaagaattcaagagctgctagacaatcggatgctcttgagccagaagtaaaggatttaagtgaactacctagagctgaaaaaaccgatttgactaatattttgattagaacagcagccaagaatgaggcattgctggaagcaaagatatctaagaaagccaataaaagtaagaggggcaagaagttaaataaaaaggctctggaagacaaactggccaactctatttcatccatggacagggatcgtttagtgaaggccttgaattttaccaatcgtctggacggtaaaattgccaagtctatttctcgtgccaagtacattcaaaatacaagaaaggctggctgggatagcaccaatgagactataaaaaaagagctggcttttttgaacggagggttgtctgtgcaggaaaaaagtgctggtgaaggtaatgctgaaaaggaagatgaggagatcccagaagtttttgactctttagcagaggataacacagtgcagaagactcctacaaatagattcggtgtcctgccagacgatgttgaagaatag

SEQ ID NO: 79126 - DNA, 663 bp, Saccharomyces pastorianus
atgattccacatccagatggcactgaaccaccagaatggaacagctccatccccgaatacattcttgacccaaatgctcgaaagccctcgtggtggaaggaacttgagcacggggaatggataccgcccatgattaaaaaccctctttgcactgcagaacgtggttgtggccagcagataccagggctgataaataatgccaagcacaaaggtccaggcgaacccaatgaaatcataaatcccaattacatgggggaatggcatccaccggaaattgaaaacccgctatactacgaagagcagcacccattgcgcatcgaaaacgttatcagtggtgtgatcctcgaattttggagtggatctccaaacatgttgataaccaacatttatgttggtaaaaatgtaacagaggcgcaaattattgggaataagacttggctgatgagagaccgtgcgtttagaggctccgatggccccacagaacgcaaattcatgaatagcagactaggaaatctacaaacaactttccataacgaaagagaatcccctaatccatttgaccgcattatagatcgcatcttagagcaacctctgaaatttgtgcttactgcggccgtcgtgctcttgacgacgtcggttctttgttgtgtagtatttacatag

SEQ ID NO: 79127 - DNA, 1389 bp, Saccharomyces pastorianus
atgaaattttctgcgtatttatggtggctgtttttgaatctagcgttggtgaaaggcacttcattgctatccaacgttacattagcggaggattctttctgggagcattttcaggcttacactaatacaaaacatttaaaccaagagtggatcacaagtgaagccgtcaacaatgaaggctctaaaatatatggtgcacaatggcgactatcacagggtcgattgcaaggatccgcatgggataaaggaatcgcagttcggacaggcaatgccgcagctatgataggacatctcttggagacacctattaatgtttcagaaacggataccttggttgtccagtacgaaattaagttggacaattctttgacgtgcggcggtgcgtttattaagttaatgtctggtttcatgaatgttgaagcattaaaacactatgcacccgatacagagggtgtcgagttagtttttggtccggattattgtgctcctgaaataaatggcgtgcaatttgcaatcaataaggttgacaagatcacacatgaatctaaactaagatatttgcaagagatgcccctgtcaaaattaactgatacctcgcaatctcatctgtatacgctcataatagatgaatcagcgcagtcttttcaaattcttattgacggtaagacggttatggtaagagaacatatcgaagacaagaaaaaggtcaattttgagccacccattacaccgcctttaatgattcctgatgtttcagtagcgaaaccgcatgattgggatgatcgcatccgaatcccagatcctgaggcggtgaagctcagtgatcgggatgaacgagacccattgatgattccacatccagatggcactgaaccaccagaatggaacagctccatctccgaatacattcttgacccaaatgctcaaaagccctcgtggtggaaggaacttgagcacggggaatggataccgcccatgattaaaaatcctctttgcactgcagaacgtggttgtggccagcagatagcagggctgataaagaattccaagtacaaaggtccaggcgaactcaatgaaatcataaatcccaattacatgggggaatggcatccaccggaaattgaaaacccgctatactacgaagagcagcacccattgcgcatcgaaaacgttatcagtggtgtgatcctcgaattttggagtggatctccaaacatgttgataaccaacatttatgttggtaaaaatgtaacagaggcggaaattattgggaataagacttggctgatgagagaccgcgcgtttagaggctccgatggacccacagaacgcaaaatcatgaatagcagactaggaaatctacaaacaactttccataacgaaagagaa

SEQ ID NO: 79128 - DNA, 108 bp, Saccharomyces pastorianus
atgattttgcgttctgtgggtccatcggagcctctaaacgcgcggtctctcatcagccaagtcttattcccaataatttccgcctctgttacatttttaccaacataa

SEQ ID NO: 79129 - DNA, 1500 bp, Saccharomyces pastorianus
atgcattccaaacatttttttaagttgtatgagccttggtctattggccaaaatgcagccatcgaatttctctcttcaactttgcacaagatgagggttgatgaatcgcagcggttcataattaacaataaactggaattgcaatccttcctttataaacccgtgcaaaggctttgtagatatcccctgttggtcaaagaattgcttgctgaatcgagtgacgataataatacgaaagaacttgaagctgctttagatatttctaaaaatattgcgagaagtatcaacgaaaatcaaagaagaacagaaaatcatcaagtggtgaagaaactttatggtagagtggtcaactggaagggttatagaatttccaagttcggtgagttattatatttcgataaagtgttcatttcaacaacaaatagctcctcggaacctgaaagagaatttgaggtttatctttttgaaaaaatcatcatccttttttcagaggtagtgactaagaaatctgcatcatcactaatccttaagaagaaatcctcaacctcagcatcaatctccgcctcgaacataacggacaacaatggcagccctcaccacagttaccataagaggcatagcaatagtagtagcagtaataatatccatttatcttcgtcttcagcagcggcgataatacattccagtaccaatagtagtgacaacaattccaacaattcatcatcatcctcattattcaagctgtccgctaacgaacctaagctggatctaagaggtcgaattatgataatgaatctgaatcaaatcataccgcaaaacaaccggtcattaaatataacatgggaatccataaaagagcaaggtaatttccttttgaaattcaaaaatgaggaaacaagagataattggacatcgtgtttacaacagttgattcatgatctgaaaaatgagcagtttaagacaagacatcactcttcaacatcgacgacttcatcgacagccaaatcatcttcaatgatgtcacccaccacaactatgaatacaccgaatcatcacaacagccgccagacacacgatagtatggcttctttctcaagttctcatatgaaaagggtttcggatgtcctgcctaaacggaggaccacttcatcaagtttcgaaagtgaaattaaatccatttcagaaaatttcaagaactctattccagaatcatccatactcttcaggatatcatataataacaactctaataatacctctagtagcgagatcttcacacttttggtagaaaaagtttggaattttgacgacttgataatggcgatcaattctaaaatttcgaatacacataataacaacatttcaccaatcaccaagatcaaatatcaggacgaagcatggggagatgttgttgtgttaggtagcgatgaagattggaatgttgctaaagaaatgttggcagaaaacaatgagaaattcttgaacattcgtctgtattga

SEQ ID NO: 79130 - DNA, 1023 bp, Saccharomyces pastorianus
atggcgatccaaacccgttttgcctcgggcacatctttatccgatttgaaaccaaaaccaagtgcaacttccatctccatacccatgcaaaatgtcatgaacaagcctgtcacggaacaggactcactgttccatatatgcgcaaacatctggaaaagactggaggtgttacctcaactcaaaccttttttacaattggcctaccaatcgagcgaggttttgagtgaaaggcaatctcttttgctatcccaaaagcagcatcaggaactgctcaagtccaatggcgctaaccgggacagtagcgacttggcaccaactttaaggtctagctctatctccacagctaccagtctcatgtcgatggaaggtatatcatacacgaattcgaatccctcggccaccccaaatatggaggacactttactgacttttagtatgggtattttgcccattaccatggattgcgaccctgtgacacaactatcacagctgtttcaacaaggtgcgcccctctgtatacttttcaactctgtgaagccgcaatttaaattaccagtaatagcatctgacgatttgaaagtctgtaaaaaatccatttatgactttatattgggctgcaagaaacactttgcatttaacgatgaggagcttttcactatatccgacgtttttgccaactccacttcccagctggtcaaagtgctagaagtagtagaaacgctaatgaattccagccctactattttcccctctaagagtaagacacagcaaatcatgaacgcagaaaaccaacaccgacatcagcctcagcagtcttcgaagaagcataacgagtatgttaaaattatcaaggaattcgttgcaacggaaagaaaatatgttcacgatttggaaattttggataaatatagacagcagttattagacagcaatctaataacgtctgaagagttgtacatgttgttccctaatttgggtgatgctatagattttcaaagaagatttctaatatcctggaaataa

SEQ ID NO: 79131 - DNA, 486 bp, Saccharomyces pastorianus
atggtaaagggcagattgcgaacggcgaatcccggagatgcagtgagtccatgtgcagtccacacttttctaatgaaggtgctggcagaagtgctcgaatgggaaaaaccgcacacagatgaaagccacgtgcagcctaagttgctgaaattcatggggaaaccgggcgtattgagccctcgtgctcgctggatgcacctgtgcggcctactgtttccgtcccattttagccaagaactaccattcgacaggcacgactggattgtactccgaggcgagcgcaaagcggaacaacaacctccaaccttcaaggaagttagatacgtcttggatttctacggagggcccgacgacgaaaacggaatgcctactttccacgtggatgtccgtcctgccctagatagtctagataatgcgaaggaccggatgacccgtttcttggaccggatgatctcgggtccgtcctcttcgtcctccgccccttaa

SEQ ID NO: 79132 - DNA, 1635 bp, Saccharomyces pastorianus
atggctgaatatgaaaaacaaacttttgatgtcccaggtcttttggttattgataccccaggtcacgaatccttctctaacttacgttcaagaggttcttcattgtgtaacatcgcaattttggttattgacattatgcatggtttggaacaacagactattgaatctatcaaactgttaagagatagaaaggctccatttgtcgttgccctaaacaaaattgatagattatatgactggaaagccattccaaacaattcattcagagactcctttgcaaagcaatcaagagctgttcaagaggaatttcaatctaggtattctaagattcaattggaattagctgaacaaggtttgaattcggaattgtatttccaaaacaaaaacatgtctaagtatgtctccattgtcccaacatctgccgtcaccggtgagggtgttccagatttattgtggttgctattagaattgacccaaaagaggatgtccaaacaattgatgtacttgtctcacgtggaagcaaccattttggaagtgaaagtcgtggaaggttttggtaccacaattgatgttatcttgtccaacggttacctgagagaaggtgaccgtattgtactgtgtggtatgaatagtccaattgtaacgaatatcagagcattattaacaccacaaccattacgtgaactacgtttgaaatctgaatatgtccaccacaaagaagtcaaggctgctttaggtgtcaagattgccgctaatgatctagaaaaagccgtttctggttctaggctgctagttgtcggtcctgaagatgacgaagatgaattgatggacgacgttatggatgatttgactggtttgttggactccgttgacacaactggtaaaggtgttgtggtccaggcatccaccttgggttctttggaagctttgttggatttcttgaaagacatgaaaatccctgtgatgtctatcgggttaggtccagtgtacaagcgtgatgttatgaaagcctccactatgttggaaaaggctccagagtatgccgtgatgttatgttttgatgttaaagtggataaggaagctgaacaatacgctgaacaagaaggaattaagatctttaatgcagacgtcatctatcatttatttgattcatttacagcataccaagaaaagttattggaagaacgtcgtaaagatttcctagattacgctattttcccatgtgtcttacaaaccttacaaattattaacaaacgtggtccaatgattattggtgtagacgttctggaaggtactctacgtgtgggaactcctatttgcgctgtgaaaaccgaccctactacaaaggaaagacaaactttgatattaggtaaagtcatctctttagaaatcaaccatcaacctgtccaagaagtaaagaagggccaaaccgctgctggtgttgccgtccgtctagaagatccctccggtcaacaacctatctggggtcgtcatgttgacgagaatgatacattatactccttggtttcaagaagatctattgacactttgaaggataaagcttttagggaccaagttgctagatccgattggctgctattgaagaagctgaaggtcgttttcggcatcgaatga

SEQ ID NO: 79133 - DNA, 948 bp, Saccharomyces pastorianus
atgtctactttgaagcaatcgaagaagaagcaagaaaagaaggttattgaagagaagaaggatggtaagcctatactaaagtccaagaaggaaaaggagaaggaaaaaaaggaaaaggagaagcagaagaagaaagaacaagctgccagaaagaaggcccaacagcaagctcaaaaggagaagaacaaggagttgaacaagcaaaatgttgaaaaagctgctgctgagaaggctgctgctgagaaatcccaaaaatctaaaggtgaaagtgataaaccaagtgctagtgctaagaagccagccaagaaagtacctgccggtttggctgctttgagacgtcaattagaattgaagaaacaacttgaagaacaagaaaagttggaaagagaggaagaagaaagattggagaaagaagaggaggaaagattggccaacgaagaaaaaatgaaggaagaagctagagcagctaaaaaggaaaaggagaaggcaaagcgtgaaaaactaaaggctgaaggtaagctattgaccagaaagcaaaaggaagaaaagaaattattggaaagaagacgtgccgctttattgtcttccggtaacgtcaaagttgccggtctggccaagaaggatggagaagaaaacaaaccaaagaaggttgtttacagcaagaagaagaagagaacaactcaggaaaacgcctccgaagccattaaatctgactctaagaaagactcggaagttgtacctgatgacgaactcaaagaatccgaagatgttttgattgatgattgggaaaatttggctcttggtgatgatgacgaggagggaaccaacgaagaaacgcaagaatccaccgcaagccatgaaaatgaagaccaaaatcaaggcgaagaagaagaaaacgcgaagagaaggacagcaccacaccacgaccaccaagagccctgtgcctga

SEQ ID NO: 79134 - DNA, 198 bp, Saccharomyces pastorianus
atggcgaaaaagagtaaaaagaaccaacagaactactgggatgaggaattcgaagaagacgccgcccagaacgaagaatcagtgccacgccaactccaaatccagaaagcagcgcaggtgcagatgacacttccagagaagcaagtgcaagtgctgaaggtgctgaggccattgaaggcgacttcatgtctactttga

SEQ ID NO: 79135 - DNA, 1242 bp, Saccharomyces pastorianus
atgggattatattctccggaatctgaaaagtctcaattaaatatgaattacattggtaaggatgattcgcagtccattttcagacgtctgaatcagaatttgaaagcaagtaacaacaataacgatagtaataaaaacggtttaaacatgagtgattatagcaataattcaccctatgggcgctcgtacgacgtaagaattaaccagaactcacaaaataatggcaatggatgcttttctggcagcattgactccttggttgatgaacagataataccatcgccacctttgtcgcccaagctggagtcgaaaattagccacaatggctcaccccgcatggcctcttcagtgctagtgggatctacgcctaaaggcgctgtagagaatgtgctgttcgtgaagcctgtatggcccaatgggttatcaagaaaaaggtaccgctacgccacctacgggtttctgtctcaatacaaaattttcagcaatttggcccaaccatattctaagaacattatcaaccggtacaacaatctggcctataatgctagacataaatattccaaatacaatgatgatatgactcctcctcctctgccttcctcttcttctagattaccttccccgttagcatctccgaatttgaatagacaagcaagatataatatgaggaaacaggctctctacaataacaatctaggaaagtttgaatccgacactgaatggataccacggaaacgcaaggtatactcaccacaaagaagaacgatgactaccagtccacatcgcgccaagaagttctcaccctctgcatccactcctcacactaacattgcatccattgaggcgattcatgatgctcctcaatatataccaaacgtctcatggaaaaaattaccagattactctccgcccttatctacgcttcctacagacagtaacaagtcactcaagatcgagtggaaggggtctccaatggacctgtccacagacccgctgaggaacgagctgcaccctgctgaactagttctcgctcaaactctaaggttaccttgtgatttgtatctggattctaagagaaggttatttttggaaaaagtttatagactaaagaaagggttgccgtttagaaggaccgacgcccaaaaagcctgtaggatcgacgttaataaagcatcaagactattccaagctttcgagaaggttggctggctacaggattcgaattttacgaagtacttataa

SEQ ID NO: 79136 - DNA, 228 bp, Saccharomyces pastorianus
atgagagataacataaataaagtggcagaaagaggtgaaagattaacgtccattgaagataaagccgataacctagcggtctctgcccaaggctttaagaggggtgccaatagggtcagaaaagccatgtggtacaaggatctaaaaatgaagatgtgtctggctttagtaatcatcatattgcttgttgtaatcatcgtccccattgctgttcactttagtcgatag

SEQ ID NO: 79137 - DNA, 153 bp, Saccharomyces pastorianus
atgtcgtcatctactccctttgacccttatgctctatccgagcacgatgaagaacgaccccagaatgtacagtctaagtcaaggactgcggaactacaagctgtaagtacagaaagccacagagtaccatctaggaaattaacattatactaa

SEQ ID NO: 79138 - DNA, 1188 bp, Saccharomyces pastorianus
atgatacaggcagctcatgttggtgtcggtaatagtggtatggaaggtatgcaagcggctcgttcagctgatatagctgttggccaatttaaattttttaaaaaactattacttgtccatggctcctggtcttatcaaagaatttctgtcgcaattttgtactctttttacaagaatacagcattatacatgacgcagttttggtacgtttttgccaatgccttttcaggtcaatccattatggaatcatggacaatgagtttctacaacttattcttcactgtttggcccccttttgtcattggtgtatttgatcaatttgttagtagtagattacttgagcggtacccacaattgtacaaattaggacagaagggtcaatttttctctgtttacatcttctggggatggattattaatggctttttccattctgcaatagtatttattggcaccatattgatttacagatatgggtttgccttaaatatgcacggcgaactagctgatcattggtcttggggtgtaactgtctacactacaagtgtcattattgttttgggaaaggctgctttggtaactaatcaatggacgaaattcaccttaattgccattcctggttccctcttattttggttaatattcttcccaatttatgcttctatatttcctcatgctaacatctcaagagagtattatggtgtggttaaacacacgtatggatctggtgtattttggctaactttgatcgttttaccaatttttgcacttgtaagagattttctatggaagtactataaaagaatgtatgaaccagaaacgtatcatgttattcaagaaatgcagaaatacaatatcagcgactctaggccgcacgttcagcaatttcaaaatgccatcaggaaggtgaggcaagtgcaaagaatgaaaaaacaaagaggatttgccttttcacaggctgaagagggtgggcaagaaaaaattgtcagaatgtatgatactactcaaaagagaggtaagtacggtgaattacaagatgcttcggcgaacccctttaatgacaataatgtactgggaagtaacgactttgaaagtgcagaaccgttcattgaaaatccatttgctgatggtaatcaaaattcaaatagattcagttcttcgagagatgatatttcatttgatatatga

SEQ ID NO: 79139 - DNA, 2850 bp, Saccharomyces pastorianus
atgaatgacgacagagaaacccccccaaagaggaaacctggggaggacgacacgcttttcgatattgacttcttagacgacacgacttctcattctggatcccgttcaaaggtcaccaactcacatgcgaacgcgaattatataccaccaagtcatgtacttcccgaagagactatcgacttagacgctgatgatgataacattgaaaatgatgtccatgaaaatccatttatgagcaataaccatgacgaccaaacgtcttggaatgccaatagattcgactcagatgcatatcaaccacaatccctacgagcagtcaagcctcccggtttatttgctaggtttggtaatggtctcaaaaatgcctttacgttcaaacggaagaaagggcccgaaagtttcgaaatgaatcattacaatgcggtgactaataacgaattagacgataattatctagactcgaggaataagttcaacattaaaattcttttcaaccggtacattttaagaaagaacgttggcgacgcagagggcaatggtgaaccaagagtcatccacatcaacgattctctcgctaattcctccttcggttatagtgacaaccatatatctaccaccaagtataattttgcgacctttctgcctaaatttttgttccaagaattttccaaatacgctaatctgttttttttatgtacatctgccattcaacaggtgcctcacgtctcgccaactaatagatacaccacaattggtactttattagtggttttgattgtttctgccatgaaggaatgtatcgaagatatcaagagagctaattctgataaagaattaaataattcgacagcagaaatattttcagaagcacatgatgactttgttgagaaacgatggattgatattcgtgtaggtgacataattagagtaaaatcagaggaacctattcctgctgataccataattttgtcatcttcggaaccggagggtctttgctacattgaaactgccaacttggatggtgaaacaaatttgaaaatcaaacagtcgagagtagaaactgccaaatttatagacgttaaaactttgaagaacatgaacggaaaagttgtttccgaacagccgaactctagcttgtatacttatgaaggtacaatgactttaaatgatcgtcaaataccgttatctcctgaccaaatgattttaagaggtgcaactttaagaaatactgcatggatatttggtttagttatcttcactggtcatgaaactaagttattgcgtaatgctactgcaaccccaattaaaagaaccgcggttgagaaaattatcaacagacagattattgcattgttcacagttttaatcgtgctaattttaatttcttcaattggtaatgttattatgtctactgcagatgccaaacatttatcgtacctttacctggagggtaccaacaaggctggcttattcttcaaagactttttaacattttggattctattttcgaatctagttcctatttctctatttgtcaccgttgaattaatcaaatattatcaggcttttatgataggttcagatctagatttgtactacgaaaaaactgataccccaactgtggttcgtacatcctctttggttgaagaacttggtcaaatagaatatatattcagtgacaagacaggaactttaacaagaaatattatggaatttaaatcctgctctattgcaggccattgctatattgataaaatacctgaagataaaacggccactgttgaagatgggattgaagttggttatagaaaatttgacgatttgaagaacaagttaaatgatccctctgatgaggattcacctattatcaatgacttcttaacattactggctacctgtcatactgtcattccagtatttcaaagcgatggatctattaaatatcaagcagcctctccagatgaaggtgccctcgttcaaggtggtgcagatttagggtataagtttatcatccgtaaaccaaactctgtaactgttttattggaggaaactggcgaggaaaaagagtatcaactacttaacatttgtgaatttaattccaccaggaagagaatgagcgctatatttagatttccggatggttcgataaagttattctgtaaaggtgctgatactgtcattctggaaagattggatgatgaagctaatcaatatgtagaagctacaatgagacatttagaagattatgcatctgagggtttgcggacgttgtgtttggcgatgagagatatctctgaaggagaatatgaagaatggaatagcatttataatgaggctgccacaacattagataacagagccgagaagctagacgaagccgcaaatctaatcgagaaaaatctaatattaattggtgcaactgctattgaagataagttacaggacggtgttccagaaactatccacacattacaagaagcgggtattaaaatttgggttttaactggtgacagacaggaaactgctattaacattggtatgagttgccgtttattgagtgaagacatgaatttgttgatcatcaacgaggaaaccagagatgatactgagagaaatttgttagagaagattaacgctctaaacgagcatcaattgtcaacacatgatatgaataccttagcgctcgtcattgatgggaagtcattaggctttgccttggaaccagaattagaagattatttgctaactgtggcgaagctttgtaaagcggttatatgttgccgtgtatctccactacagaaagccttggttgttaaaatggtaaaagaaagtcgtcttcactactgctag

SEQ ID NO: 79140 - DNA, 2784 bp, Saccharomyces pastorianus
atggacaatttggatctgtatcaaaccgtaagttcaattgctcagtcagtcatctctttaactaatactttaaacaagcaactgcagaacaatgaatcgaatatgcagccatcaccctcgtatgatgcactgcaacgaaggaaagtaaaaagtctcacgacagcatattacaataaaatgcacggtagctactcagcagaaagtatgaggctctttgataaagataatagttcttcacgtacagacgagaatggacctcaaagattgttattccatgaaactgataaaaccaactcagaagcgattacaaatatgacaccaaggaggaaaaatcattcccaatcccaaaaaagcatgacttcttcgcctctgaaaaatgttctacctgatcttaaagaatcgtctcccttaaacgatagtagggaagacacagaatcaataacatactcatacgattccgagttgtcatccagctctccacccagagatactgtaacgaaaaagtcaagaaaagtcagaaacatcgtgaataatacagatagtccaactctaaaaacaaaaactggatttttaaatctaagagagtttacatttgaagataccaagtctttagatgagaaaaagagtactatagatggccttgaaaagaattatgataacaaagaaaatcaggaatcagaatatgagagcacaaaaaagctggacaactcactcgatgcatcatcagaagccaataattatgatataactacaagaaaaaaacattcatcttgcaatcacaagatcaaacaagcagttgtaagaccggctagtggaaggatcagcatttcaagagttcaaagcattgccataacaccaaccaaagagttatccatagtagatcctgagcaaaacaagtcaaactcagttatagaggaaataagtgaaatagaacctctcaacctggaatataataaaaaaagcgcgttgtactctgatacatcgtccaccgttatcagtatctcaacgagcaagctttttgaatctgctcagaatagtcctctaaaacaaactcaaaatccacagagagaatttcccaacgggaccagcgtgagtgaaaccaatagaatcagattatccatagcacccacaatagaatctgttgtaagtgatttgaattcgattaccactggtagcacagttgaaactttcgaaacgtccagagatttaccagtgccacaccaaaggataataaatttgagagaagaatatcaaaggggtaatcaagatataatctcaaatacttcttcattgcatgagttaaaaacaattgatttaagcgattccaataatgacctagaaagtccaagtacccatgcgaaaaacaacaagtattttttttcaccagatgacggtagcattgacgttgcttctccaatgaaaaacgttgaagagctgaaaagtaaatttctgaagaacgagagtgaaactaatagtaacatatcaggaagtgtattgacaatggacgatatcgacattaatgacacatctagtgcccggaacacacggagagcaaactctgagtcggcttttacaggctccttgaataagaaaaatttaaatgaaattgctaatatgctcgatgattcaattaatgacgatccaataaccgtggcattaatgaaactggaaggtacatacgagaaaattcccgaaaaaccagagaacaccaagagtagtgacgctattggaattaaaacgagcaagttagcagatgaagtggaaatgctaaaccttaacaacttgccgtcattccaaaatagccccgcagaaaaaagaaaatcgttattaatagaaagaaggagacaaactataatgaatatcccctttactccagatcaatccgagaaggaaggctttacttcctcctctcctgaaaaaatagacgtgtcagctaatgttgatgttgctgtgcaagcggcgcaaatccaggaattaatcggtcaatacaggattcacgattcgagattaatgatttctaataatgaaagtcacgttccatttatactaatgtacgattccctgtctgtagcgcaacaaatgaccttgatagagaaggaaattttaggagaaatagactggaaagatttattagatttaaagatgaagcatgaaggcccacaagttataagttggttgcaactactagtaaggaacgagaccttatctggcattgatttagctatatccagatttaacttaactgtggattggattatatcagaaatacttcttaccaagagcagcaaaatgaaaagaaatgtcattcaaaggtttatacacgttgcagaccactgcaggacatttcagaactttaacacattgatggaaatcattctagccttaagttcttcagttgttcaaaaattcactgatgcatggcgtctgattgaaccaggcgacttactgacttgggaagagctaaagaagattccctcgctagacaggaattattctacaataagaaatctacttaactctgtgaatccactggtgggttgcgtccctttcatcgtcgtatatctttcggacctatcagcaaacgcagagaagaaagactggatcttagaagataaagtagtgaattacaataaattcgatacgaacgttcaaatagtcaagaatttcattcaaagggttcaatggtccaagttttacactttcaaagttaaccacgaattgctgagtaagtgtgtttatattagcacattaacacaagaagagattaatgaactatccacatga

SEQ ID NO: 79141 - DNA, 1263 bp, Saccharomyces pastorianus
  modified_base (1245)..(1245): a, c, g, t, unknown, or other
  modified_base (1249)..(1249): a, c, g, t, unknown, or other
  modified_base (1252)..(1253): a, c, g, t, unknown, or other
atggaaatatttagccagaaagattactacccgactccatcctcaaatgttattagctatgaaagcgattgtgtatccaaaccagtgaatagtgcagacctgcccgcgttaattgtacacctttcttcccctttggaaggtgtagactacaacgcatctgcagactttttccttatttataggaattttataacgcctcaagacttacacgacttactcatctatagatttcgatggtgtattagggagatcacaacaaatgctgcaaaagctaagagaaggcgaattggtgaagttgccctcgtgaggacgtttgtgttgttgaggcattccatactgaattattttgtgcaagattttttaccgaacataacattaagacttcggttgatcgagtttctaaacgacaaacacattgaacagtacccaaaaataatttccagctgtataatcaatctgaaaaaaaactgggtgcattgttctaagttggtttgggagaatattgaactaaatgaacctgataaattagactttgatgcatggctgcattattcgttaaaggatttcacgcaactagaaagcctacacaaaagaggaagccgactgagcatttacgccaggcaaagttttgccagtcctgattttcgtaaccaaagcgttttatcattatataaaacttctgatgtatttagactgccggagaagctacagtcttcaaattcttccaaaaaccagagaagcccttctatgcttttatttcccgataatacatcaaatgtttactcgaagcaccgaatagcgaaagaaccttcagttgataatgaaagcgaggacatgtcagatagtaaacaaaagatcagccacttgtcaaaagtcactctagtatccacactaatgaaaggcgtagactacccgtcatcatatgcagtcgataaaataatgcctccaacaccggctaaaaaagttgaatttattctgaattccttatatattcctgaagatttaaatgaacaaagcggaacgcttcaaggtacatcgacgacatcatctctagataacaatagcaacagtaatagtagatctaatacatcttcaatgtctgtgttacatcgcagcgctattggtcttttagctaagtggatgaaaaaccataatcgccatgatagcagtaatgataaaaaatttatgagtgctattaaaccagcaaaccagaaacctgaaatggatgcgtttgtcaaatacgtntgtnatnncaatatcatc

SEQ ID NO: 79142 - DNA, 882 bp, Saccharomyces pastorianus
atgactaacaagcgaggaaaccaacctgttagtactttcctacgcacccccgaaaagaacatcggtgctcaaaagcatgttaagaagttttcggacttcgtaagtctgcaaaaaatgggtgaaggtgcatatggtaaggtcaacctatgtattcataagaagaataggtatattgtggtgattaagatgatttttaaagaaagaatccttgtagatacatgggttagagataggaaattaggcactataccttctgagatccaaattatggccacgttgaacaaaaaaccacatgagaatattttacggttactggatttttttgaagacgacgattactattatatcgaaactcccgtacatggtgaaacaggatgtatagatcttttcgatctaattgaatttaaaaccaacatgaccgaatttgaagcaaaattgatactcaagcaggttgtagcgggaataaaacatctacacgaccagggtattgttcacagagatatcaaggatgagaatgttatcgtagattctaaaggctttgttaagattattgattttggatctgctgcgtatgtcaaaagcggaccatttgatgtttttgttgggacaatagattatgctgcccctgaagtcttaggaggaaacccttatgagggccaaccacaggatatttgggctattggtattctattgtatacggtggtcttcaaagaaaaccccttctacaatatagatgaaatattagaaggcgacctgaaattcaataatgcagaggaagttagtgaagattgcattgagttaatcaagagtattttgaaccgttgcgtaccgaagagacccaccattgacgacataaataacgacaaatggttggttatttga

SEQ ID NO: 79143 - DNA, 2568 bp, Saccharomyces pastorianus
atgccctacatcggtgcttccaacctctcagaacattcatttgttaattggaaggaaaaacatgcgattacacataaaggtacgagcagttctgtagcatctttgcagacaccaccgagccccgatcaagagaaccatattgacaatgaattagaaaattacgatacgtctttgagtgacgtttcaaccccgaataaaaaggaaggtgatgagttcgagcaaagtttaagagatacatttgcgagctttcggaagactaaacccccacctcctttagattttgaacaaccaagacttccttcgacagcttcttcatccgttgattcaaccgtatcatcgcccttaacggatgaagacataaaggagttagagtttcttccgaatgaatcaactcattcttattcgtacaatccactttcgccaaattccctggcagtcagattgaggattttgaagagatcattggaaatcataatacaaaacccaagtatgctactggagcctactccagatgatttgcctcctttgaaagagtttgcgggccgtaggagcagtttaccaaggacatcggcttctgcaaaccatttaatgaacagaaataagagccagatttggaacactacttccgctactttaaatgcatttgtaaataatacctcttcctcctcagcagcatcttctgctttatctaacaaaaaaccgggcaccccagttttccctaatttggatccaacacattctcaaacattccatagagccaactcgttggcttatttaccttccatcttacctgagcaagatccgctgctcaaacataataattctttatttcgtggcgactatggaaacaacataagtcctgaaaggccaagttttagacaacccttcaaggatcaaactagcaatctccgcaatagcagtttactcaatgagagggcatatcaggaagatgaaacttttttaccgcaccatggaccctctatggatctattgaatgaacaaagagcgaacttgaaaagtcttctgaatttattaaacgaaacactggagaaaaatacttccgagagagcttcggatcttcatatgatatcgttgttcaatttgaataaactaatgcttggagatcccaagaaaaataattcagaacgcgataaaagaactgaaaagcttaaaaagattttgctggatagtcttgcagaaccattctttgagcactataattttattggagataatccgatcgcagatacagatgaactaaaggaggaaattgatgaatttacaggttctggagatacgacagcgataacagatatacggccccaacaggactatggccgcatattgaggacattcacttctaccaaaaattccgccccacaggcaatttttacatgtagtcaggaagacccttggcaattcagagctgcgaatgatctagcgtgcttagtattcggtatctcacagaatgccattcgcgctttaaccttgatggatttaattcacaccgatagcagaaattttgttttacacaaattactttctacggagggtcaagaaatggttttcacaggcgaaatcattggtatagttcaaccagaaacactcagctcatccaaagtagtatgggcatcgttttgggcaaaaaggaaaaacggcttattagtttgtgttttcgaaaaggttccttgcgattatgttgatgtacttttgaacctggatgattttggggccgagaatattgtagacaaatgtgagttattatcagatggacccacattgtcttcctcttctacattatcgctacctaagatggcttcttcaccaactggtagtaaattagagtattcgttggagaggaaaatcctggaaaagagttatactaagcctacttcaacagagaatcgcaacggcgatgaaaaccaacttgatggagatagtcattctgaaccatcgctgtcatcatcgccagtaaggtcgaagaaaagtgtaaagttcgcaaatgatattaaagacgtcaagagtataagccaatcgttagccaaattaatggatgatgtgaggaatggggttgtatttgatcccgatgacgaccttttgcctatgcccatcaaagtttgcaaccacattaatgaaacaagatattttactctaaatcatctatcttataatatcccatgcgcggtttcctccactgtgttggaggatgagctgaaattaaagattcacagtttaccttaccaggcgggtttgtttattgtggattcgcatactttagatattgtaagttccaataaatctattttaaaaaacatgtttggttatcattttgctgagctggtgggaaaatccattactgaaataattccttctttcccaaaattcctccaatttataaatgacaaatatcctgcgttggatatcacactccataaaaataaaggtttggtattaacagaacatttttttaggaaaattcaggcagagattatgggtgatcgtaaaagcttttatacgtcggtgggtattgatggccttcataggcatgtctgtgaaactctaaattga

SEQ ID NO: 79144 - DNA, 123 bp, Saccharomyces pastorianus
aatttaaatagagaaaactaccaactcattactgaagaaagtaagaagaacgacataccaagcattgtttctactggatatttttttgcattttcttttccaattactaatgtcctagaatga

SEQ ID NO: 79145 - DNA, 264 bp, Saccharomyces pastorianus
atgatctccttcagaatcaagggtggtgctgaagctgcttccaagttcgcctcctccacaagactgttcacattggccgaatcccttggtggtatcgaatctctattggaagtgcccgctgtgatgacccacggtggtatcccaaaggaggccagagaggcctctggtgtttttgacgacttggttagaatctctgtcggtattgaagacactgacgatcttttggaagacatcaagcaagccttgaaacaagccaccaattaa

SEQ ID NO: 79146 - DNA, 897 bp, Saccharomyces pastorianus
atgactctacaagaatctgataaatttgctaccaaggccattcatgccggtgaacatgtggacgttcacggttccgtgatcgaacccatttctttgtccaccactttcaaacaatcttctccagctaaccctatcggtacttacgaatactccagatctcaaaatcctaacagagaaaacttggaaagagcagttgccgctttagagaacgctcaatacgggttggctttctcctctggttctgccaccaccgccacaatcttgcaatcgcttcctcagggctcccatgcggtctctatcggtgatgtgtacggtggtacccacagatacttcaccaaagtcgccaacgctcacggtgtggaaacctccttcactaacgatttgttgaacgatctacctcaattgataaaggaaaacaccaaattggtctggatcgaaaccccaaccaacccaactttgaaggtcaccgacatccaaaaggtggcagaccttatcaagaagcacgctgccggccaagacgtgatcttggttgtcgacaacaccttcttgtccccatatatctccaatccattgaacttcggtgcagacatcgttgtccactccgctacaaagtacatcaacggtcactcagacgttgtgctcggtgtcctggccactaataacaagccattgtacgagcgtctgcagttcttacaaaacgccattggtgctatcccatctcctttcgatgcttggttgactcacagaggtttgaagactttgcatctacgtgtcagacaagctgccctcagcgccaacaaaatcgctgaattcttggcagcagacaaggaaaacgtcgtcgcagtcaactacccaggtttgaagacacaccctaactacgacgtagtgttaaagtaa

SEQ ID NO: 79147 - DNA, 240 bp, Saccharomyces pastorianus
atgacaatgaagttatcgggaattcacaaaagatttaaccaaatcatccgaaatagcgtttctccaatggaagaagttgttaaagaaatggaaaaaattctgcaaattggtactagattgtctggctataatctgtggtaccaattggatggatacgatgatgaagctttgagcgaaagtttgcggttcgaactaaatgagtgggagcacgccatgagaagcagaagacacaaaagataa

SEQ ID NO: 79148 - DNA, 1281 bp, Saccharomyces pastorianus
atgcgatttggaagtaacgctcgccgtagccaagtaagaatgcctgctgtcttgagaaccaggtccaaagaatcctctatagagcagaagcctgcttccagaactagaacgagatcaagaaggggcaagcgtggtcgtgacgatgatgatgatgacgacgatgaggaaagcgatgatgcatacgatgaagtaggtaatgactatgacgagtatgcttcaagagcgaagctggccaccaataggcccttcgaaatagtcgcggggctgcctgctagtgtggagctgcccaactataactcttcgcttacccatccgcaatcaattaaaaattctggggtgctttacgactctctggtcagttccagaagaacctgggttcagggtgagatgtttgaactgtattggcgaagacctaagaaaattgttagtgaatctaccccagcagcgacggagagtccgacatctggaacgattcctttgattcgagataagatgcagaaaatgtgcgattgtgtaatgagtggaggtcctcacacgttcaaagttagacttttcatactgaaaaatgacaaaatcgaacagaaatggcaagatgagcaagagttgaagaaaaaggaaaaggaactgaaacgaaagaacgatgcagaggccaaaagattgaggatggaggagaggaaaaggcagcagatgcaaaagaaaatagccaaggaacaaaaacttcaattgcagaaggaaaataaagccaagcagaagttggaacaggaggcgctgaagctaaaaagaaaggaagaaatgaaaaaactaaaggaacaaaataaaaataaacagggttcaccttcttcctccatgcatgacccaagaatgataatgaatttgaatttgatggcacaagaagatccaaaactaaacactttaatggagaccgtcgcaaagggtcttgccaataatagtcaactggaggaatttaaaaagtttattgaaattgccaaaaaaaggtcactagaggagaacccaattaataagcgtccatctgtcacaacaacgcgacctgcacctccctctaaagctaaagacgtagccgaagatcaccggttaaactcgataaccttggtgaaaagttccaaaaccgctgccacggaacctgaaccaaaaaaagctgatgacgagaatgcagagaagcaacagtttaaagaggcaaagacaactgccgaatcgactcaagtagatgtcaagaaagaagaagaagacgtgaaggaaaagggtgtcaaagcagaggataca

SEQ ID NO: 79149 - DNA, 1479 bp, Saccharomyces pastorianus
atgctacctatatggaccagtactaagggcattttatcagagcacccattggagtacgctaatagctacgaggatataacggccacatcgagaacattattagatttccgaattccctcagcaatacacctgcaaatttccaacaaatctactcccaatacattcaattctttagatttttctacgaggtccaggataaatggttctctgagttatttatactccgatgcacagcaattggagaatttcatgcgcaactctactgatatcccattacaagatgccaccgaaacatacagacaattgcaaccaaatctcaatttcagtgttagtagtgggaatacgttgagtagtgacaacaccacagtcgacaatgacaagaaattactacatgactcgaaatttgttaaaaaatccctttattatggtagaatgtactatcccagctctgatttagaagcaatgataataaaacgactaaatccacaaacccaatttatgcttaagggtgtcagtagtttcaaagaaagcttaaacgttttaacgtgctattttcaaagagattctcaccgcaatttacaggagtggatattttccaccagtgatctattatgtggttatagagtattacacaatttccttaccacgccttccaagtttaacacctcactgtacaataattcttcgttgtcgcttggtgctgaattttggttagggttagtaagtttaagccccggttgttcgacaactttaagatattacacacattctacaaacacaggacgaccactaactttgacattatcttggaatccattattcggccatatatcctccacatattcggccaagacagggacaaattctactttttgcgcgaagtatgattttaatctttattcgattgaatcaaatctttcatttgggtgcgaattttggcaaaaaaagcatcatttgcttgaaaccaataaaaacaataatgataaattagaaccaatctccgacgaattggttgatataaatccaaacagcagagcgactaaactactgcacgaaaatgtaccggatctgaattcagctgttaacgatattccttctacactagatatacctgttcacaaacaaaagctattaaatgatttaacttatgcattctcgtcgtcattaagaaaaatcgatgaagaaaggtctaccatcgaaaaatttgataacaaaataaatagttccatttttaccagtgtttggaaattaagcacgtcattacgtgacaagactttaaaactattatgggaaggcaaatggaggggatttttaatatctgccgggacagagctggtattcactagaggctttcaagaaagtttatccgatgatgaaaagaatgataatgcaatatctatatcagcaactgatacagaaaacggcaatataccagttttcccgacaaagtttggcatacaattccagtactccacatga

SEQ ID NO: 79150 - DNA, 564 bp, Saccharomyces pastorianus
gtcgaaaatcaagacgtgttcttccttacccttcttgtccaaaccgtaagcaatggcagcggcggtaggttcgttaataatacgcaagacattcaaaccagcaatggtaccagcatccttggtagcttgtctttgagaatcgttgaagtaagctgggacagtgacgacagcgtcattgaccttggcacccaagtaagattcggcagtttctttcatcttacccaagaccatagaggagatttgttctggggtaaagttcttggtttcacccttgaattcaacttgaatttgtggcttaccgtcaacatcgatcaacttgaatgggaagtgcttcatatcaccttggacctctgggtcattgaagtttctaccgatcaaacgcttagcgtcgaaaacagtgttagctgggttcatagcagcttggttcttagcagcgtcaccaatcaatctttcagtatcagtgaaaccaacgaaagatggagtggttctgttaccttggtcgttggcaataatgtcaacacgatcattagaaaagtgagcaacacaggagtaggtagtacctaa

SEQ ID NO: 79151 - DNA, 207 bp, Saccharomyces pastorianus
atggttgctaacgtcaaggccatcgaaatggaaggtttgacctggggtgctcaccaatttatcccaattggtttcggtatcaagaagttgcaaattaactgtgttgtcgaagatgacaaggtttccttggacgacttgcaacaaagcattgaagaagacgaagaccacgtccaatctaccgatattgctgctatgcaaaaattataa

SEQ ID NO: 79152 - DNA, 96 bp, Saccharomyces pastorianus
atggcatccaccgatttctccaagattgaaactttgaaacaattaaacgcttctttggctgacaagtcatacattgaagggtatgttccgatttag

SEQ ID NO: 79153 - DNA, 861 bp, Saccharomyces pastorianus
atgattctttggcttaatggtacagttctcagcaacgctgagagcttacaaattctggacttattgagtcaagactctaattttgaagctgcagctataattcacgaacgcttggaaagttttaacctagcagtcagggatttattaagctttattgaacaatgtctaaatgaagggaaaacaaatatatctactttattggaatctttgaggagggcctttgatgattgtaattctgctggtaccgagaaaaaatcgtgttggatattattgattacattcctgatcactctatatgggaaatatccttcacacgatgaaaggaaagatttatgtaataaactacttcaagaagcatttttgggattggttaggtccaagagttcctctcagaaggattcaggtggggaattctgggaaataatgtcttctgttcttgagcaccaagacgttattttaatgaaagttcaggatttaaagcaactgctactgaatgtttttaatacttataaattggaaagatctctttctgagttgattcaaaagattatagaggattcttcgcaagatcttgttcaacagtatagaaaatttctgagtgaagggtggtctatacacaccgacgactgcgaaatctgcgggaaaaaaatatggggagctggtctggacccattactttttctagcttgggaaaatgtacagcgccaccaagatatgattagtgtagatctcaaaactccccttgtcatattcaaatgtcaccatggctttcaccagacttgcctcgaaaacttggcccagaaacccgatgaatattcttgtttaatttgccagacggaatctaacccaaaaatagtataa

SEQ ID NO: 79154 - DNA, 1734 bp, Saccharomyces pastorianus
atgtttcaagaaactgttgaaccctcagtacaaaattctctagtcgtgaatagctctatttcatggactcaaaactgttccagggttgcttattccgtaaataataaaatttccgttatttccatatcttcatcagacttcaatgttcagtccgctagccattctcctgaatttgcagaatctatattatccattcaatggattgaccagctcctacttggtgttttaaccatatcgcaccaatttttggtattggacccccaacatgacttcaagatcctgttaagattggattttctgattcacgatttgatgatcccacctaataaatattttgtaataagtagaagaagtttctacctgttaacaaactactcatttaaaattggcaaatttgtgtcttggtcagatattactttaagacatattttgaaaggcgactacttgggtgcattggagttcatagaatcacttttgcaaccttactgtccactggcaaacttgttgaagctagataataatacggaagagaggactaagcaacttatggaaccattttacaatctgtccttggctgccctaaggtttcttataaaaaaagataatgccgactacaatagggtttaccaattattaatggtagttgttcgtgttttgcagcaatcttccaaaaaactaggctcaattccttctctagacgtctttttggaacagggtctggagttctttgaattgaaggacaacgcggtatattttgaagttgtagcaaatattgttgcccaaggatcagttacgtcaatttccccagttcttttcaggtccataattgattactatgctaaggaggagaatttaaaagtaattgaagacttaatcatcatgttaaatcctactacgcttgatgttgatcttgccgtcaaactatgccaaaagtataatttgttcgatttattaatatatatttggaacaagatctttgatgattatcaaaccccagtggtggacttgatatacaggatttctaaccaaagtgaaaaatgtgtgatcttcaatggtcctcaagcacctcctgaaacgactatatttgattacgtaacgtatatccttactggcaggcaatatccacaaaacttgtctatatcaccaagtaataaatgctccaaaatacaaagggaactttcagcatttatttttagtggcttctccataaaatggccgtcgaacagcaatcataaactttacatatgcgaaaatccagaagaagagccagcatttccttactttcaccttttattgaaatcgaatccgagtaggttcttagcaatgctcaatgaagtgtttgaagcgtccttgtttaacgatgacaatgacatggttgcatcagttggagaagcagaattggtaagtaggcaatatgttattgatctactattggatgctatgaaagatacgggaaattcagacaacatcagggtacttgttgcaattttcattgcaactagtatatcaaaatatcctcaatttattaaagtgtctaaccaagccctcgactgcgttgttaataccatatgctcctctagggttcaaggtatatatgaaatttctcaaatagctctggagtcgcttttaccctattatcattcaagaacaacagaaaattttatactggaactaaaagaaaaaaatttcaatcaagttcttttccatatctataaagtgaataataagtacgcc

SEQ ID NO: 79155 - DNA, 861 bp, Saccharomyces pastorianus
atggagcaaaatggccttgaccacgacagcagatctagcatcgatacgactattaatgacactcaaaagactttcctagaatttagatcgtatacccaactaagtgaaaaactggcatctagttcttcatatacggcacctcccccgaacgaagatggtcctaaaggggtagcttctgcagtgtcacaaggctccgaatccgtagtctcatggacaactttaacacacgtatattccatcctgggtgcttatggagggcccacgtgcttgtatccgacagccacgtattttttgatgggcacttctaaaggatgcgtactcatttttaattataatgaacatttgcagacaatcctagtgccgaccttatctgaggacccttctattcactcaataagaagtccagtgaaatcaattgtcatatgttccgatggtactcatgtagctgcctcatacgagaccggaaatatatgcatttggaacttgaacgtagggtatagagtgaaacccacttctgaaccaacaaatggtatgaccccaacgcctgccttaccggcagtcttacacatcgatgaccatgtgaacaaggaaatcacagggttagacttttttggtgctcggcatacagccctgattgttagtgattggacaggtaaagtatcactctataacggttacagaagaggcttttggcagttggtgtataattcaaaaaaaattttagatgtgaactcttccaaggagaaattaataaggtcaaagttgtctccactaatatcacgggagaaaatttccactaatttgttgagtgtactcacaactacacattttgcctatttagtatcgccacacgtttcttga

SEQ ID NO: 79156 - DNA, 117 bp, Saccharomyces pastorianus
atgataagtggtgcaagactaggaacgactgtgaaaaaactttgggttataggcggtgttgcggaagagacaaaggaaactcatttcttctcaatagaatgggctggatttggttaa

SEQ ID NO: 79157 - DNA, 621 bp, Saccharomyces pastorianus
atggctgaagaaggtggtacgcgcatagctattaacatatatgcaaaaagaacggcaaaaggcgaggaggtttttatgccgccgctagtatttgacatagatcacatcaaacttctaaggaaatggggtatttgtggtgtgttatctggaactttgcctactgcagcacagcaaaatgtatttttgtcggtacctttgaggcttatgttagaagatgtgctgtggctgcatttgaacaatcttgccgatgtgaaattaataagacaagagggacatgagattatggagggaataacattagagcggggcgccaaactatctaaaattgtcaacgatcgtttgaacaagtcatttgaatatcagagaaagttcaaaaaggatgaacacattgcaaaattaaagaaaatcggtagaatcaatgataaaaccacagctgaagaattgcaacggcttgataaatctagcaataatgaccagctaattgaatcttctttgttcattgacattgctaatacctctatgattttaagagacatacggagtgattcagacagcttatcccgcgatgatatcagtaactttgtatttaagcagtacagacaggcaggaaaaatgtcagac

SEQ ID NO: 79158 - DNA, 1314 bp, Saccharomyces pastorianus
atgataaccacgaatgacgataaaatacacaagtccgctattccttcttcttcctctctaccgttatcctcctcacccacgaggaactcaccagtgaattcggtacagtctccatcaaggtcccctgttcattctttgatggcaacgcgtccctcttctccaatgcgacacaagagcatttcaaactttccccatctgaccatatcttcaaaatcaagactactaattgaattaccggagggtttctttacctggctaacatctttttttgttgacatggcccaaatcaaagatttatctgtgttaaagtacttcaccaagctttgttaccttacagtacatataaacagcacttttttaaatgatctgcttgacaacgatgctttttttgcttttatccggaatattgataccatcattccctttatcgacgacgcaaagacagcagctttcatttggaaacaaatcactgctatatgcgttgaaatgagtttggatatggaccaaatgagtgcttctttattttctacagctatgaatttcatcagaaaaaagaataacacctccataagtggactggagatcatactgaactgcttgcattttacgttacgcaatgtaaatgatgatgtggctcctacagtgggctcatcagagtctcatagtgttttcctcataaaggtcaacaatgacgctgctattgaattaccgattgatcaattagttgacctgttttatgcattgaatgacgatgacgttaacctcagtaaactaattagcattttcacgaagatatgctcattgcccggttttgaaaaccttacaattaatatcatatttcacccgaacttttatgaaaagattgtttctttctttgatacctatttcaacagtttacttattcaaatcgatctattgaaattcataaagctaatattcacaaaatcgttattgaagctatatgactacacaggacagccggatcctataaagcaaaccgaaccaaatcgtcgtaataaggccactgttttcaaacttcgtgccattttagtacaaataacggagtttttaaacaacaactggaacaaggatgacccaaaaaggaattcaaatcaagttgggggggactcagttttgatctgtcagctatgtgaggatatccgttcattatcaaaaaaaggaagcctgcaaaaagtttcaagcgtcactgcagcaattggtagttctccaacaaaagatgagcgtagtaatttgcgatcctccaaagataaaagtgacggcttttccgtccccattacaacatttcaaacataa

SEQ ID NO: 79159 - DNA, 1197 bp, Saccharomyces pastorianus
atgaacagtatggccgataccgatagagtcaacttgactcccatccagagggcatctgagaaatccgtgcaataccacttgaagcaggtcattgggaggggttcttacggggtagtttacaaagccattaataaacatactgaccaagtcgtggcaataaaggaggtcgtgtacgaaaatgatgaggaacttaatgacattatggcagaaattagcttgttaaaaaatttaaaccataacaatattgttaaataccacggcttcatacgaaaaagctatgaattgtatatcctcctcgaatactgcgctaatggttctttgaggaggctcatttcaaggagctctaccggattaagtgaaaatgaatcgaaaacctatgtgacacagacactattggggctgaaatatttacacggtgaaggagtcatccacagggacatcaaggcggctaacatcctgctgagtgctgataacactgtcaaacttgctgattttggcgtttccactattgtgaactccagcgccttaacgctagcgggcacactcaattggatggctccagagatcctgggcaacaggggagcttctacgctcagcgacatttggtctctaggtgccactgtagttgaaatgctcacaaagaatccaccctaccacaatttgacagacgccaatatctactacgctgttgaaaatgatacctactacccacctagctctttctctgagccactaaaggatttcttatctaaatgctttgtgaaaaacatgtacaagaggccgacagccgaccagttactcaagcatgtgtggatcaactctaccgaaaatgtgaaggtcgacaagctcaacaagttcaaggaggactttaccgacgctgattatcattgggatgccgattttcaagaagagaaactaaatatatcaccctctaaattcagtcttgcagcggctcccgctgcctgggcagaaaacaatcaagaactagatttaatgccccccactgaaagtcaattgctgagccaattgaagagttcatctaagcctttgacggacttgcatgtgcttttcagtgtttgctccctcgagaacatcgctgatacaattatcgagtgtctgtcgcgcacaactgttgataaacgattaataactgcatttggctccatttttgtttacgatacccagcataacatctag

SEQ ID NO: 79160 - DNA, 723 bp, Saccharomyces pastorianus
atgcaaccttatttaaaaaaaaacactcatgtcacggacgatcctaaagcaaccccattgaaggaaggatctcctgacaaccctgaaagtcctttaatcccagctgatatcgtccttccagaggatgagtttgcatcataccagagttatttgctttacgaaattgtacgcgccaagtatataatgatcaatttcctcctttttgtcgtgacgattttggcgactttaacagacatttggttttctggtgttctctcccctgccatggtgatccggatatgtttaggtggctctatggtagtccttcagatatggtcattcagtagaccaataagtaatgaaacattccgtacaaaacttctactagaggtaataactcatagaccatcgatagctgggaaagaatgggaaaccataacgtataatatgaatcaatatttgttcaaggctggcttatggaaaacaccataccactttttttgtgaacaccagtgctatgaatttttcaaggatctcataaagggaaaatatcctgatgtacagtgggatacagcgaatacacagccgttcatcagtgttccagaaaatcaggctgcaactcaaaatcctgatgttgaaccaaccgtaaagtggtgcctctttaaagcagccgaaattcaagcccatgctgtgcgggaatattggcaaagtcaatatccagatgtgggcatacctgcaatatga

SEQ ID NO: 79161 - DNA, 3573 bp, Saccharomyces pastorianus
  modified_base (1367)..(1413): a, c, g, t, unknown, or other
atggaacaacctgatctatcgtctgtggccatcagtaagccgctgctgaagttgaaacttctcgacgcccttcgccagggaagtttccccaacctacaagatctcctaaagaaacaattccagccgctagacgacccaaacgtccaacaagtgctccatctcatgctccactatgccgtgcaagtcgcccccatggctgtcataaaggaaatcgtccatcattgggtctcaactacaaacaccacttttctaaacatccatcttgatctaaacgaacgggactccaacggcaacaccccattgcacatcgccgcctaccagtcccgcggtgatatcgtagccttcctcctggaccaaccaaccatcaacgactgcgtgctcaacaactcccacttgcaggccatcgaaatgtgcaagaacctaaacatcgcgcagatgatgcaggtgaaacgctccacatacgttgcagagaccgcccaggaattcagaacagcttttaacaacagggactttggccacctagaatctatcctctccagccctcgaaacgcagaactgctcgacatcaacggtatggacccggagactggcgataccgttctgcacgaattcgtcaagaaaagagacgtcatcatgtgccgctggttgcttgaacacggtgctgaccccttcaagagagaccgcaagggcaaactgcccatcgagctcgttaggaaagtcaatgaaaactacaccgccaccaacaccaagatcgccatcgacatcgaactgaaaaaactattggaaagggccaccagggagcaaagtgtcatcgacgtcacaaacaacaacttgcacgaggcccccacttacaaaggctacctgaaaaaatggaccaacttcgctcaaggctacaaattgcgttggttcatccttagtagcgatgggaaactatcctactacatcgatcaggccgacactaagaatgcctgcaggggctccctaaacatgtcttcgtgctctctgcatttggattcgtctgaaaagttgaaattcgaaattatcggcggtaacaacggtgttatcaggtggcatttaaaggggaaccaccccatcgaaacaaataggtgggtctgggccatccagggcgccataagatacgcaaaggacagagaaattttgctgcacaatggcccctattcgccttctttggccttaagccatggcttgtcatccaaagtgtccaataaagaaaacttgcatgcaacttcaaaacggttgaccaagagcccgcatctgtccaaatccacactgacacaaaacgatcacgataatgacgatgacagcactaacaacaacaacaacaaaagtaataatgattatgacgnnnnnnnnnnnnnnnnnnnnnnnnnnnnnnnnnnnnnnnnnnnnnnngatgatgatgaaagtagacccctcatagaaccattaccgttgatttcatccagaagccaaagcttaagcgaaatcgcttccggtccacattctaggaagtctacagtctcgtctacaagggcagccgatataccatcagacgacgagggttactctgaggacgattctgatgacgacggtaactcctcttacacaatggaaaacggcggtgaaaatgatggcgacgaagatctaaatgccatttatggtccctatattcaaaaactacacatgctacaaagatccatttccatcgagttggcatctttgaacgaattactgcaagataaacaacaacacgatgagtactggaacaccgtcaacacttctattgaaaccgtcagcgaatttttcgacaaattaaatcggttgacctctcaaagggaaaaaagaatgattgcccaaatgactaagcaacgggatgttaacaatgtatggattcaatcggtaaaagatctggaaatggaactggttgataaagacgaaaaattggttgccttggataaagaacggaaaaatctgaaaaaaatgcttcaaaaaaaattgaacaatcaaccacagattgaaactgaggctaatgaagaatccgatgatgcaaattcaatgataaaaggatcccaagaatcaacaaatacccttgaggaaatcgtaaaatttatcgaagcaacaaaggaaagtgatgaggattctgacgccgacgaatttttcgacgcagaagaagctgcttccgacaaaaaagccaatgattcggaagacttaaccacaaacaaggagactccagctaatgcgaaaccacaagaagaagctcctgaagacgagagccttattgtgatcagttctccacaggtggaaaagaagaaccaactattaaaagagggatcattcgtcggatatgaagacccagtgagaaccaaactggctttagacgaagataatcgtcccaagattggtctctggtctgttttaaagtctatggtcggtcaagacttaaccaaactaactctaccggtatcgttcaatgagccaacatccttactacagagagtatctgaagatattgagtattctcatattcttgaccaagctgccacttttgaagactcctctttaagaatgctatatgtagctgcctttactgcatcaatgtacgcatctaccactaacagagtgtctaaaccattcaaccccttactcggtgaaacttttgaatattccagaactgatggtcagtaccgatttttcacagaacaagtctctcatcacccacctatctctgctacttggacagaatcgcccaaatgggatttttacggtgaatgtaatgttgattcgtcattcaatgggcgcacgttcgccgtgcaacatttaggattatggtacattactatccggcccgatcataatattagtgttcccgaggaaacttattcctggaaaaaaccaaataacactgttatcggtattttaatggggaaaccacaagtagacaacagtggggacgtcaaagtcacaaaccataccacaggcgactattgtatgctgcattacaaagcccatggctggacctcagccggtgcatatgaagtcagaggtgaagtattcaacaaggacggtaaaaaattatgggttcttggtgggcattggaatgattccatttacgggaaaaaagtaactgctagaggcggagaactgacattagacagaataaaaacggcaaattctgccacgggaggaccaaaactagatgggtctaagtttctgatatggaaagcaaatgaaaggccttcagtgccatttaatttaacgtcgtttgcattgactttgaatgctttgccaccccacttggtaccatatttagcacccacagatagtcgtttaaggcccgatcaaagggctatggaaaatggtgaatacgataaagctgccgcggaaaagcatcgtgttgaagtaaaacaaagggcagcaaaaaaagaaagggaacaaaaaggagaagaatacagacctaagtggtttgtccaggaggagcaccccgttaccaaaagtctatactggaaatttaatggagagtattggaacaaaagaaaaaatcatgactttaaagattgtgctgatattttctaa

SEQ ID NO: 79162 - DNA, 255 bp, Saccharomyces pastorianus
atgtcacatgacgttacatccaagcggtttttattaaggaaaaagctagatgctctctttagtattataatgaaggataagtggatacctttgtatacaatgatatctttcagatccgatatctcgtattctagagctttagaaagggctggaaagcaaacacgtatcttgaaattcttagaatctctgacactcggtatgttatctattggcggttacaagcttttcaaatttttgacaagagaacgttcctga

SEQ ID NO: 79163 - DNA, 2265 bp, Saccharomyces pastorianus
atgactacacaactaaggtatgaaaataacgatgacgatgaaagagtagaacataatctctttaccaatagatccaccatgatggcaaattttgaagaatggatcaaaatggctacagataataaaatcaattcccgaaatagttggaatttcgcattgatcgactatttttatgacttggacgttttgaaagatggcgagaataacatcaattttcagaaagcatctgcaaccttggatgggtgtattaagatttactcttcgagagttgattcagtgacaacggaaacaggtaagttattgagcgggttggcacaaagaaagacgaatggggcatctaacggagatgacagtaacgggggaaatggtgaagggcttggaggtgacagtgacgaagcaaatatagagattgatcccttaactggtatgcctatatctaatgatcctgatgtgaataacactaggcggagagtgtacaacagagttttagaaacaacattggtggagttcgaaacgatcaagatgaaagagctagaccaggaattaataattgatccattattcaaaaaggccttggttgatttcgatgaaggtggcgccaagggtttattgttgaacacattaaacatagacaacactgcaagagtcattttcgatgcatcaattaaggatacacaaaacgtagggcaaggtaaacttcaaaggaaagaagaagaattaattgaaagagatagtttagtagatgacgaaaatgaacctagccagtcattgataagtactcgtaatgactcaaccgtaaatgattccgttattagtgcaccttccatggaagatgagattttatctcttggtatggattttataaaatttgatcaaattgcggtgtgtgaaatttcaggatcgattgagcaactaaggaacgttgtcgaagatattaatcaagcgaaagactttatcgaaaatgttaacaacagatttgataacttcttaactgaagaagaattgcaagcagctgtcccagataatgcagaagatgatagcgatggctttgatatgggcatgcaacaggagctgtgctatccagatgaaaatcatgacaatacatcacatgatgaacaagatgatgataatgtcaacagtaccacaggaagtatattcgaaaaagatttgatggcatactttgacgaaaatctaaatagaaactggagagggagagaacattggaaagtacgaaattttaagaaagcaaacttagtgaataaagaatccgacctgttggaagaaacgcgaactactataggagatactactgacaaaaacacaacggacgacaaatcgatggatacgaagaagaagcataaacaaaaaaaggttctggaaattgatttcttcaaaacggatgatagttttgaagacaaagtctttgcctcaaaaggaaggacaaagattgacatgccgattaagaacagaaagaacgacacacattatttactgccggatgacttccatttttccactgatagaataacaagattgtccattaaaccggggcagaaaatgagtctgttcagtcataggaagcataccagaggcgacgttagttcggggctttttgaaaaaagcacagtttctgccaaccattcaaataacgacattcctactattgcagatgagcacttttgggcggataattacgaaaggaaagaacaagaggaaaaagaaaaggagcagtctaaagaggttggtgatgtggtgggtggagcgctcgataatccgtttgaagatgacatggacggtgttgacttcaaccaagctttcgaaggaacagatgataacgaggaggccagtgtgaaacttgatttacaggatgacgaagatcataagttccccattcgagaaaataaagttacttattcaagagtttcgaaaaaagttgacgtaagaagattaaagaaaaacgtatggagatcgatcaacaatttgatacaagaacatgacagtaggaaaaatagagaacaaagctctaatgacagtgaaacccacacagaagatgaatcaacaaaggagctcaagttttctgatatcattcaaggtataagtaaaatgtattcggatgatacactaaaggacatttcaacaagcttttgttttatatgccttctacacttagccaatgagcatgggttgcagataactcataccgaaaactataatgacttgatagtgaattatgaggatctagcgacaacacaggcagcgtcatag

SEQ ID NO: 79164 - DNA, 348 bp, Saccharomyces pastorianus
atgaactgtgctgacaacagtggtgccagaaacttgtacattatcgccgtcaaaggctctggttccagattgaacagattgccagccgcctctctaggtgatatggttatggccaccgttaagaagggtaagccagaattgagaaagaaggttatgccagctattgttgtccgtcaagctaagtcttggagaagaagagacggtgtctttttgtacttcgaagacaatgctggtgtcatcgctaatcctaagggtgaaatgaagggttccgccatcactggtccagtcggtaaggaatgtgccgatttatggccaagagttgcatctaactccggtgttgttgtgtaa

SEQ ID NO: 79165 - DNA, 501 bp, Saccharomyces pastorianus
atggccaagtgggatgagctattccaatctttgaggatggaatttaataataccggaaagaaagaagattcaatgaacttcatcaacttactgtctaatgtactgattaaaattggtaaaaatgttcaggattctgaattcattttccccattttcgaactctttcccattgtctgtaattttttctacgaaacacttcctaaagaacatattgtatcagggtcgatagtttctatattcataacagcgggtgtttctttcaacaaaatgtactatattttaaaagaactaatcgagacatcagattccgataattccgtatttaataaagaaatgacctggttaattcacgaatggtacaaatcggacaggaaatttagggacattatttcctacaacgatatcattcatttgaaggaatacaacattgataatgatccaattgaaaagtacgttaagaacagcggcaataatttggggatttgtttctacaaagaataa

SEQ ID NO: 79166 - DNA, 3855 bp, Saccharomyces pastorianus
atgtttcaaagttttttccacaacaatgggcccgctgctgccggtgaaacgttttcagatagcagatcgtaccctttaacgaatcatcaagaagtacccaggaatggactgaatgagttggcctcatctgcaaccaaggcgcaacaacaacctacacacatattaaactcatatccaattaccgggtccaacccactcatgagggcaagcgcaatgggggcgacctctggcagcatcaatcctaatatgtccaacatgaatgagcacattcgtgtttccgggatggggacttctaagcccctggacttagcgggaaagtacattgaccatctacaacataaagatagtaacactcccgtactcgacgaacgatcttattataacagcggggtagattataacttcagcagagaaaaaaacggcttaggagcgtttactccatttgaaaagcaagatgtgttcaacattccggacgagattttgcatgaattttccacttcacagacaaaaactgatatgggtattttcccggagttaaatcgatgttggataactattgataataaactgatactctggaatattaacaatgacaatgagtatcaggtggtagatgatatgaagcataccattcaaaaagtcgccttggtaagacctaagccaaacacctttgtgcctgccgtgaagcatctacttttgataagcacgacaatggagcttttcatgtttgctatttccttagacaaacccaccaacgaactcagtgtattcaatacacatctatcagtccctgtacaaggcattgatgtaatagacattgtgtctcatgaaagatcgggtagaattttcttcgcaggccaagccagtggcctgaatatctgggagttgcactactcaggttccgatgactggttcaatagtaaatgtagtaaggtctgtctgacaaagtctgccctattaagtcttctacctactaacatgttatcgcagattccaggtgttgattttattcaggctttgttcgaagataattctaacggtaatggcggattttctcaagagaccatcacgcaactaactattgaccaacaaagaggaatcatctattcattatcctccaaatccaccattagagcatacgtaataacagaaaaatcactggaaggacccatgtcaattgagcctgcctacatcagtaggatcataggtaccacgacggcaagggcagcaccgattttgggccccaaatacctaaaaattgtcaagataagctctgttgcaccagaagaaaacaacaatttgtttttagttgctttaacagtaggtggtgtgcgtttgtactttaatggttccatgggcagatttaacatcgaagctttgaggttagaatcgatcaagttcccccctagttctgtaactcctgaagtcatccaacaagaattactacatcaacaacaggaacaggcgaagagaagctttcctttcttttcaaatctaatgtcttccgaaccagtcctcttaaaattccaaaagaaatcatctgtattactagagactacaaaagcaagtacaattatttccccaggcatatttttttccgctgtgatcaaatcatctcagcaaactcatcaacaagaaaaaaaagagaactcatctgttactggaacgaccgctaccgcagggtctaaaactgtcaaacaacagccagttactttacaacataagcttttcgttagtgttccagattatggtatcttgaaaacacacggtaagtacgttgaaaatgccacgtttttggaaactgcgggcccagttcaacaaattattcccttatcggggttgtttaatgcaacgacaaagccacaaggatttgctaacgaatttgcgacacagtacacatcagaaactttaagggtagcagttttgacgagcacttctatcgaaatttataaatatcgtactcctgatgaaatttttgaggatctaatcgataatccgctgccattcgtcttaaattatggtgccgcggaagcttgttccactgcattgtttgttacttgcaaatcaaataaatctgaaaaattaagatctaatgccctgacttttttaactatgggtattcctggcgttgttgacatcaaacctgtctacaaccgttattctgtatctacagtatcctctttattgtcaaagcccactttatcaaccgcaacaactaatctccaacaatcaataactggctttagtaaaccctcccctgcaaacaaggaagattttgacttagatgacgtaatattatcccccagattttacggtatcgcattattgattaccagactacttcgagatatttgggggagacatgtcttcatgacttttacagataatagggcgacatcccatgctttcatttcttcttctgatccaatcactccatctaataataacctaaaaactgatgaaatttcacaaaataggaacataatatcgaaggtttctatttccaaggattgtatcgagtactatctatcttcaattaacattttaaatgaatttttcatcacttatggtgattccatttcccaaatatcagctccctacgtattagcgaacaattctaacggcagggttattgataaaacagaagaagttgcaaaccaagcggaaagtatagcgattaatgcgatgatcaaaatggtacagtccataaaggaaggtctatcattcttgaacgttttatacgaggaaagcgaagtcgaaggattcgacaaccaataccttggtttcaaggatataatcagttttgtaagcttggacgtccaaaaagatttagtcaaactagattttaaagatttatttgctccaaatgacaaaacaaaatcattaattagagaaattttattatccatcatcaataggaatattaccaaaggtgcgtcgatagagtataccgcaacagctttacaagaacgctgtggatcattctgctctgcaagtgatatattaggatttagagccattgaacatctcagaagggctaaagaaattggcttgcgtaactatgattctctaaactatcacctgaaaaatgctactgctttacttgaacaaattgtggatgatctttctatcgagaaattgaaagaagctgtatcaatgatgctgagtgtaaattattacccaaaatctattgaattcttattgaatattgccaactctatggacaaaggcaaactagcttgtcaatatgtggcaaatggatttttagaaaatgatgacaggaaacaatattacgacaaacgtatcttagtttatgacctagtttttgatactttaataaaagtagacgaacttgccgaaaaaaaacagtcatcaaaaactcaaaaccaaatttcgatatcgaatgacgatgaagtgaaactgagacaaaaaagttatgaagtcgctctaaaatataacgatagattattccactatcatatgtatgattggcttgtgtctcagaacagagaggaaaaactattagatattgaaactccattcatactcccttatttaatggaaaaggcaggtagttcattgaagatatctaatatactctgggtctattattcaagaagatctaaatttttcgaatctgctgaaattctttaccgtttagctacatcgaattttgacatcacattgtttgaaagaattgagtttctttcacgcgccaatggtttttgcaacagtgtgtcaccattaagccagaaacaaagaattgtacaattagctagtaggatccaagatgcatgtgaagttgctggtatcaaggtgatatattgtcgctcgtgtatacagacgcaagaatag

SEQ ID NO: 79167 - DNA, 2592 bp, Saccharomyces pastorianus
atgttattggcccaggaaaaaactcaattggtcgcatggactacgactccatggactttaccttccaatttgtcgttatgtgttaacgctgatttcgaatatgtaaagatttacgacgaaaccagagatcgttatttcatcttattagaatctttgattaaaaccttgtataagaagcctaagaatgaaaaatataagattgtggaaaaaattaaaggttctgatttggttggtttgaagtatgaaccattgttcccatatttcgctgaacagttccatgaaacagcttttagagttatttcagatgattatgttactagtgattccggtactggtattgttcataacgctcccgctttcggtgaagaggataatgctgcttgtttgaagaacggcgtcatatccgaagattcagtgttacctaacgccattgatgaccttggtagattcacgaaagacgttcctgattttgagggtgtttatgtcaaggacgctgataagttgattattaagtacttaactaatactggaaatttgttattggcatcccaaattcgccattcctatccattctgttggagatccgataccccattgttataccgttctgttccagcttggttcgttcgtgttaaaaacattgtccctcaaatgttggattctgtgatgaaatctcactgggttcctaacaccatcaaggaaaagaggttcgccaactggatcgccaatgcccgtgactggaacgtttccagaaatagatattggggtactccaattcctttatgggtttcagacgattttgaggaggtcgtctgtgttggttctatcaaagaattggaagaattgaccggtgtgcgtaacatcactgacttgcatcgtgatgtcattgacaaattgacaattccatccaagcaaggtaagggtgacttaaagagaattgaagaagtttttgattgttggtttgaatctggttctatgccttatgcttctcaacattatccatttgaaaacacagaaaaatttgacgaaagagttccagctaatttcatctctgaaggtttagatcaaacaagaggttggttctacacgttagctgtcttaggtacccatctatttggctctgttccatacaagaacgtcatcgtctctggtattgtcttagctgccgatggtagaaagatgtctaaatccttgaaaaattaccctgatccatccattgttctgaacaaatatggtgcggatgcattaagattgtacttgataaactcacctgttttaaaagctgaaagtttgaaattcaaagaagagggtgttaaggaggttgtttcaaaggtcttactaccatggtggaactcctttaaatttttggacggtcaaattgccttgttgaaaaagatgtctaacatcgacttccaatatgatgattctgtgaaaagtgataatgtcatggacagatggattttagcttctatgcaatctctagtacaattcattcacgaagaaatgggtcagtacaaattatacactgtcgttccaaaacttttgaatttcattgatgaattgacaaactggtatattagatttaatcgtcgtcgtttgaagggtgaaaacggtgttgaggactgtttgaaagcattgaattctttattcgatgccttattcacatttgtccgtgccatggctccattcaccccatttttgtcagaaagcatttatttgagactgaaggaatacatcccagaagctgtcttagcaaaatacggtaaggacggaagatcagtccatttcttatcttacccagtggtcaagaaagaatactttgacgaggccatcgaaactgcagtttctagaatgcaatccgttatcgatttgggtagaaacattcgtgaaaagaaaactatttccttaaaaactccattgaagactttggtcatccttcacagtgatgaatcatacttgaaggatgtagaagccttgaagaactacattatcgaggaattaaatgttcgtgatgttgttatcacctccgatgaggcaaaatatggtgttgagtataaagcagttgctgattggcctgtattgggtaagaagttgaaaaaagacgcaaagaaggttaaagatgccctaccatcagtcacttctgagcaagtacgggagtatttggaaagcggaaaattggaggtcgctggtattgaactggttaaaggtgatttgaacgctattagaggcttgccagaatctgctgttcaagctggacaagaaaccagaaccgaccaagacgtgttaatcatcatggatacaaatatttactctgaactaaagagtgaaggtctcgcaagagagctggtcaacagaatccaaaaattgagaaagaagtgtggtttggaagccaccgacgatgttttagtggagtacgaattagttaaagatactatcgactttgaagccattgtcaaagaacattttgatatgttaagcaagacctgtagatccgacattgccaaatatgacggctcaaagatagacccaattggtgatgaagaacaatctattaatgacaccattttcaaattaaaagtgttcaaattatga

SEQ ID NO: 79168 - DNA, 714 bp, Saccharomyces pastorianus
atgtccgagagtaacgcacacttctcatttccaaaggaggaagaaaaagttctatctctttgggatgaaatagatgcctttcatacttcattagaattaacaaaagacaaaccggagttttccttcttcgatgggcctccatttgccaccggtactcctcattacggtcatattctagcttccactattaaggatattgttccaagatacgctaccatgacaggccaccacgtggaaagaagattcggttgggatacacacggtgttccaattgaacatatcattgacaagaaattaggtatcacgggtaaagatgatgtcttcaagtatggtcttgaaaactacaacaatgagtgtagatccattgttatgacttatgccagtgattggagaaaaactattggtcgtttgggtcgttggattgatttcgacaacgattacaagactatgtatccatcctttatggagtccacatggtgggctttcaagcaacttcatgaaaaaggtcaagtttaccgtggattcaaagttatgccttattctactgggctaaccactcccttaagtaactttgaagctcagcaaaactataaagatgtcaatgacccagctgtgaccattggtttcaatgttattggcccaggaaaaaactcaattggtcgcatggactacgactccatggactttaccttccaatttgtcgttatgtgttaa

SEQ ID NO: 79169 - DNA, 87 bp, Saccharomyces pastorianus
atgttttgttttataaagcgatgtattcaaacgctgttgaaaagaatgatcgtgaaaatatggcaaaagaacaagatgataatatag

SEQ ID NO: 79170 - DNA, 2244 bp, Saccharomyces pastorianus
atgatcagaagatggctaactataagtaagtctgggaagaagaaaaaggctgttaatgataccattacagaagaagtagaaaaggttgactttaagcctgtaaaccacgatataaatgatgaactctgttatagcgaatcatccgataatccctctagctcattgtttgtctctaatttggataccaaggaaacttttttgaatgaagacaataatttgcagatttcttccggactagactattcttctgaaacgtgcaatcaaggcagtaattacagccaggatgggatattttatatttcaaacgcaaaggctataaacgcatacggaggcattatcacgcaagggcccgaggcacccatattagctatgaaggtgtccgactcaatgccctatggagacggctccaacaaagtttttggatacgaaaattttggcaatacatgttactgtaactcagttcttcaatgtctctataatctgtcctcattacgtgaaaatatattgcaatttccaaaaaaatcaagagaatctgatcaaccaagaaagaaagaaatgagaggtaagaaaccaagaatatttaccgaagcaagttttgagaaaagcattgctagtaccaatggacatttgcctaaccctaaacctcaatctgttgatgatggaaagcctacccctgtaaattctgtaaattcaaatacagctgggccttcagagaagaagagtaaattttttaaaagttttagcgcgaaacatgtacaagacaataataaaaaggaaggaagtcctgctatattaaccactggaaaaccctcttctcgtcctcaagacgcacctccattgatagtcgaaacacctaatgagcctggtgctccgagcagattgagtttcgagaacgtcacagatagacctccggatgttccgcgtaaaataattgttggcagagttctcaattatgaaaatccttcaagaggtagcagtaatagtaataacctggacttgaaaggagaaagtaatagcagcttatccactccacttgataaaaaagatactagaagatctagttcctcttctcaaatatccccagaacatagaaagaaatccgcacttattcgtgggccagtgctcaatattgaccatagcttaaacggctcagataaggctactttgtattccagtttgagagatatctttgaatgcataactgagaatacgtatttaactggtgttgtatcgcctagctcttttgttgatgttctcaaaagagaaaatgtattatttaatactactatgcatcaggatgctcacgaatttttcaatttcttattaaacgagttgagtgaatatatagaacgtgagaataaaaaaatagcagccagtgatatcaacagcgatagcgaaccgagtaagagtaaaaatttcatcagtgacttgtttcaaggcactttaacgaatcaaataaaatgtctgacgtgcgataacattacatctagggatgagccatttttggatttccccatagaagttcagggagatgaggaaacagatatacaggaaattttgaaaagttatcaccagcgagaaatgctaaatggctcaaacaagttttattgtgacgaatgttgcggtttacaggaggcagagagattagttggtttgaagcaattgcctgatactttaacattacacttgaaaagattcaagtattctgagaaacaaaactgtaatattaagctttttaataacattcactatcctctgacgctaaatgtttgctcttcaataaattctaaggtttgtcaaaagtatgaattggctgggattgtcgttcatatgggcggtgggccacaacacggccattatgtttccctatgtaaacatgaaaagtttggctggttgttatttgatgacgaaacggtagaggcagttaaagaggaaacagtgttagaattcacaggtgaatctccaaatatggcaacagcatatgttttgttttataaagcgatgtattcaaacgctgttgaaaagaatgatcgtgaaaatatggcaaaagaacaagatgataatatagacagtctaatcaagtacgatgattggctaagaacttgcaatagtggtcaaaagaaaaaggaagagctgcctatagcagacgatttggatactgctatagacgacagctttgtttctaacacacccataaagtcttctaaaaaaaagtcgagaatgtttagttttaggaaaagctga

SEQ ID NO: 79171 - DNA, 198 bp, Saccharomyces pastorianus
atgacactaggtatatttggtatgggcatcacagggacatgttggagctgggatgtttcatcatttcaggaactaaagcaacgtctggaaaggcgtgccaacaacgaatttgtagtgacaaacatgcctctggataaaagaagccagcaagtagtggacagcttagttaagacacacaattcatctctttgtaaatag

SEQ ID NO: 79172 - DNA, 303 bp, Saccharomyces pastorianus
atgttattggacgcgcagcgattttttaataggtctttctctattaatgtaatatgcgaattgaaacataatgtaaacacaagaagaaaattcgaaataaaggactggccaacaataatgttagtgaacagaaacgacaagcccaaaattagcagtgaggaagtcacacattttatagacgactataaaaagaggaggaaaactcagatgacacgattcttcggaatcactatttttacacttataacatgtagaattgccatgaagaaaatgataactgcaaaaggtatgcataggcaataa

SEQ ID NO: 79173 - DNA, 627 bp, Saccharomyces pastorianus
atggaaaagatgacagtttcttcgaattacaccatagctttatgggctactttcaccgcaatctcctttgccgtgggttaccagttgggtacgtcgaacgcatcatcaactaagaaatcctcagctactttactgcgttctaaagaaatgaaggaaggaaagctacacaatgacactgatgaggaggaaagcgaaagcgaagatgagagcgatgaggacgaagatattgagtccacttcattgaatgatatacctggagaagttaggatggcattggtgattcgtcaagatcttggcatgacaaagggcaaaatagcggcacaatgctgtcacgcagcattgtcatgttttagacatattgctacaaaccccgcgcgtgcttcatacaacccaattatgacacaaagatggctaaatgctggacaggctaaaataacgttgaaatgtccagataagtttacaatggacgagttgtatgcgaaggctatatcacttggggtgaatgcagcagttattcatgatgctggtagaacacagattgctgcgggaagtgccaccgtattgggtttaggacctgctccaaaagcagtattggatcaaataacaggtgatttgaaattgtattga

SEQ ID NO: 79174 - DNA, 147 bp, Saccharomyces pastorianus
atgttgtccgcacacaatttgaatagtgccgacttgatctataaatctttgagtcactctggactagatgatggcttggaacagggcttgaatcgttctttaagcggactggatttacaaaaccaaaacaagaagaatctatggtaa

SEQ ID NO: 79175 - DNA, 1629 bp, Saccharomyces pastorianus
  modified_base (1615)..(1615): a, c, g, t, unknown, or other
atggagaccagttcttttgagaatgctcctcctgcagccatcaatgatgctcaggataataatataaatacggagactaatgaccaggaaacaaatcagcaatctatcgaaactagagatgcaattgacaaagaaaacggtgcacaaacggaaactggtgagaactctgcaaaaaatgccgaacagaacgtttcttctacaaatttgaataatgcccccaccaatggtgctttggacgatgatgttatcccaaacgctattgttattaaaaacattccgtttgctattaaaaaagagcaattgttagacattattgaagaaatggatcttccccttccttatgccttcaattaccactttgataacggtattttcagaggactagcctttgcgaatttcaccactcctgaagaaactactcaagtgataacttctttgaatggaaaggaaatcagcgggaggaaattgaaagttgaatataaaaaaatgcttccccaagctgaaagagaaagaatcgagagggagaagagagagaaaagaggacaattagaagaacaacacagatcttcatctaatctttctttgcattctttatctaaaatgagtggaagcggaaacaataatacttctaacaatcaattattctcgactctaatgaacggcattaatgctaaaagcatgatgcacagtccaatgaataataccattaacaataacagttctaataacaacaatagtggtaacatcattctgaaccaaccttcactttctgcccaacatacttcttcatcgttgtaccaaacaaacgttaataaccaaacccagatgtccactgagagattttatgcgcctttaccatcaacttccactttgcctctcccaccccaacaactggacttcaatgaccctgacactttggaaatttattcccaattattgttatttaaggatagagaaaaatattattacgagttggcttatcccatgggtatatctgcttcccacaagagaattatcaatgttttgtgctcgtacttagggctagtagaagtatatgatccaagatttattattatcagaagaaggattctggatcatgctaatttacaatctcatttgcaacaacaaggtcaaatgacatctgctcatcctttgcagccaaactccactggcggctccatgaataggtcacaatcttatacaagtttgttacaggcccatgcagcagctgcagcgaatagtattagcaatcaggccgttaacaattcttccaacagcaatactattaacagtaataacggtaacggtaacaatgtcatcattaataacaatagcgccagctcaacaccaaaaatttcttcacagggacaattctccatgcaaccaacactaacctcacctaaaatgaacatacaccataattctcaatacaattccgcggaccaaccacaacaacctgaaccacaaacacagcaaaatgttcagtcagctgcgcaacaacaacaatcttttttaagacaacaagctactttaacaccatcctcaagaattccatccggttattctgccaaccattatcaaatcaattccgttaatcccttactgagaaattctncggggatcctctag

SEQ ID NO: 79176 - DNA, 816 bp, Saccharomyces pastorianus
atgaaattgtttagcggttctgattcatacaagtttgaggaggctgctgatctttgtgtccaagcagccaccatttaccgtctaagaaaagagttaaacttggcaggagactcgtttttgaaagctgctgactatcagaaaaaggctggtaatgaagacgaagcaggaaatacctacgtagaggcttataaatgctttaaaagcggtggaaactctgtgaacgccgtggattcattagaaaatgctatccaaatttttactcatagggggcagttccggagaggtgctaatttcaagtttgagcttggagaaattctagaaaatgatttgcatgactatgcaaaagctatagattgttatgagctcgctggtgagtggtatgcccaagaccagtcggtagcattatcgaataagtgttttatcaaatgcgcagatctaaaggctcttgacggtcaatatattgaagcaagtgatatatattcgaagttgatcaagagcagcatgggcaatagattgagccaatggagtttgaaggattacttcctaaaaaaagggctttgtcagctagctgctactgatgcagtcgctgctgcaagaactttacaagagggtcaaagtgaagatccgaattttgcggattcaagggagtcaaatttcttgaaaagtttaatcgatgctgttaatgaaggtgatagcgagcagctaagcgaacactgtaaggagtttgacaattttatgagactagataaatggaaaattaccattttgaataaaattaaggagtccatccagcaacaagaagatgatttgttatga

SEQ ID NO: 79177 - DNA, 2481 bp, Saccharomyces pastorianus
atgccagcaggcgctgccactagcgctgcagtgggtgctgctgctttaggcgcctccgctttatcaagatcttccaataatgcattcaaaaaccaggatttatttgcagatggtgaagcttctgctcagttatctaatgctaccacagaaatggctaatttatctaaccaagtaaactccctgtccaagcaggcaagtataactaatgacaaaaagtcaagagcgacccaggagttgaaacgtgttactgagatgaaaaattccattcaaatcaaattgaacaatttacgttctacccatgaccaaaatgttaaacaaacggaacaactggaagcacaagtacttcaagtaaacaaagaaaacgaaacattagcgcaacagttggctgtatccgaagcaaactaccatgccgctgagtccaaactcaatgaactaactactgatttgcaagaatctcaaacaaagaacgcagaattaaaagaacaaattacgaatttgaactcgatgacagcctccttacagtcacaattaaatgaaaaacaacaacaggtcaagcaagaaaggtcaatggtagatgttaattctaaacagctagagttgaatcaagtcacagtagcaaacttgcagaaggaaatcgatggtcttggcgaaaagataagcgtttacttaactaaacaaaaggaattaaatgactaccaaaagaccgtagaggagcaacacgcacaattacaagctaaataccaggatctgtccaacaaggatactgatttaacggaccgtgaaaaacaattggaagaacgtaacagacaaattgaagaacaagaaaatctctaccatcagcacgtttctaaattgcaagaaatgttcgacgatctatcacagagaaaagcttcttttgaaaaagctgatcaagagttaaaggagagaaacatcgaatatgctaacaatgtgagagagttatccgaaagacaaatgaatttagctatggggcaattacctgaggatgctaaggacattattgcgaaaagtgcctctaatacagatacaacaaccaaagaagccacatctagaggaaatgttcacgaagacactgtatccaaatttgtcgaaactactgttgaaaattcaaacttgaatgttaatcgggttaaagatgatgaagaaaagacagaaagaaccgaaagtgacgtatttgatagagacgttccaactttgggatctcaaagcgatagtgaaaatgccaatacaaacaacggcacccagtcaggaaatgagacagcaaatccaaacttaactgaaacattaagtgataggtttgatggtgatttgaatgaatatggtattccaagaagtcaatccttgacatcgtctgttgcaaacaatgctcctcaatccgtaagagatgatgttgagctaccggaaacgttggaagaacgtgacaccatcaataatactgcgaatagagataatactggaaacttatctcacattcctggtgaatgggaagctaccccagctaccgcttccactgatgttttgagcaacgaaactacagaagttattgaagacggaaataccacaaaaagggctaattcaaatgaagacggtgagtcggtcagttctatccaagaatctccaaaaatctctgctcaaccaaaagcaaagacaataaatgaagagtttccaccaattcaggaattgcatatcgacgaaagcgattcatcctcttcagacgatgatgagtttgaagataccagagaaattccatcagcaacagtgaagacccttcaaactccctataatgcccagcccacatcaagtttggaaacccacacggaacaagtcataaaatatcccgctccaggcacttctccttcacataatgaaggtaactctcaaaaggcaagcaccaattccattttgcctgttaaggacgaatttgatgatgaattcgcagggttagaacaagcggctgtggaggaagataatggtgctgattcggaatctgaatttgagaatgttgcgaatgctgggtcgatggagcaatttgaaaccatagaccataaggatctcgatgacgaactacaaatgaacgcttttacagggacgttaactagtccctctaacccaactatcccaaaaccacaagtacaacaacagtcaaccagtgaccctgctcaagtaagcaacgatgagtgggacgagatttttgctggatttggtaactccaaagctgaaccaaccaaagtagctaccccaagcattccacaacaaccaattccattgaagaatgatcctatcgttgatgctagcttgtcaaaaggtccaatagttaaccgcggggttgcaactactccaaagtctctagccgtcgaggagttaagtggcatgggatttactgaagaagaagcgcacaatgccttgaaaaagtgcaactgggatctagaagccgccactaactttttgttggatagtgcttag

SEQ ID NO: 79178 - DNA, 93 bp, Saccharomyces pastorianus
atgagttcctcgcaagaggataagatgattgcgattgctggtatcacgtaccgcgagaatatcagcagtccattgggcaagaagttcaggtga

SEQ ID NO: 79179 - DNA, 360 bp, Saccharomyces pastorianus
atgattgacgacctcatccatttcactttgaaacaatggaacagattgaccatttctgtcactgatactgaagttgaacgtgccaaatcgctgttgaaattacaattagggcagttatacgaatctggtaatcccgtcaatgacgctaacttgttaggcgcagaagtcctaatcaagggctccaaactgtctctgggtgaggctttcaagaaaattgatgcaatcacagtcaaagatgttaaggcttgggccggtaagagattatgggaccaagatattgctattgctggtacaggccaaattgaagggttattagattacatgagaatcagaagtgacatgtccatgatgagatggtaa

SEQ ID NO: 79180 - DNA, 462 bp, Saccharomyces pastorianus
atgctaagaacagtaacttcaaagactgtatctaaccagttcaagaggtctttggctacagctgtagcaacccccaaggccgaagtaacgcaattatctaacggtatagttgtagccactgagcataatccttccgctcacacagcctctgtcggtgttgtcttcggctccggtgctgccaacgaaaacccttataacaacggggtttccaatttatggaagaacatctttctatccaaagaaaactctgctgttgccgccaaggaaggtttggcattgtcttccaatatctccagagacttccaatcttacattgtatcttctttgccaggttctaccgataatatcactagacttcttgaatcgagtctttcatccagacgaaaagggctaatttgctatgcttcttctaacttgcgaggccacgaagtaatctgtcttgaagcaagttcaagattttga

SEQ ID NO: 79181 - DNA, 1269 bp, Saccharomyces pastorianus
atggttgttgccacggaacataacccttttgcgcaatctgcctccgttggtgtggtcttcggttccggttctgctaacgaaaacccttacaacaatggggtttccaacttatggaaaaatatcttcctctccagggaaagtgcggccacggccgccaaggatggcttggccctgtcctccgctgtctccagagactttcaatcttacgttgtttcttcgttaccagattctactgctaaatcgttggattttttgaaccaatcttttatccagcaaagagccagtttgctgtcctcttctaatttcgagactacaaaaaaatccgtcttgaagcaagttcaggatttcgaagagattgatcaacccaacagagtcctggaacatttgcactccaccgctttccaaaatactccgctatctctaccaactagaggtactcaagagtccctagagaacttggtggtcgctgatatggagtcttttgctcacaaccacttcttaaattcaaacgctgtgattgtgggtaccggtaacatcaaacacgaggatttagtgaatcatattgaatccaagaacctaagcttgcagaacggcaccaagccagaactcaagaagaaatcctcttttttgggctccgaggtcaggttaagagacgacactttgcccaaggcttggatttctttggctgtggaaggtgaatctgtcacttccccacattatttcgtcgccaaattagccgctcaaatctttggctcctacaacgctttcgaacccgcttccagattgcaaggtatcaaattactagacaacatacaagaataccaattgtgtgactctttcaaccatttttcgctatcttacaaagattccggtttatgggggttctctactgccaccagaaacgtcaccaatattgacgacctgatgcatttcactctgaagcaatggaacagattgaccatttccgtgactgacactgaagtggaacgtgctaagtcactgttgaaattgcacttgggacagctataccagtccggcaaccctgccaacgacgctaacctgttaggtgcagaagtgcttgctaagggctccaaagaatctttggatgaagccttcaagaagatcgatgccgtaaccgttaaagacgtcaaggcttgggctggcaagagattatgggaccaagacatcgccatcgctggtactggtcaaatcgaagggttattagactacatgagaatcagaagtgacatgtccatgatgagatggtaa

SEQ ID NO: 79182 - DNA, 324 bp, Saccharomyces pastorianus
atgttggttactgaaattcagcctgacactgctggtgtgaaagaaacatttttaattgagaccttatggaagatgctgcaatctcctaccatttgccaacaattcaagaaatctaatatatcagagattatccaaacaatgagctatttcattatggggactgataatacgtcgtggaacttcaccagtgccgtggtattagctcgttgtttgagagtcctccaaactactccagattatactgagcaagaaaccgaacgattattcgattgtttgcctaagaatgtctttaaaatgatcatgttcatcgcctcaaacgaatag

SEQ ID NO: 79183 - DNA, 4215 bp, Saccharomyces pastorianus
atgtcgtccttcaacaatgagaccaataataacagcaacactaatacacatccagacgattccttccctttgtataccgtattcaaggacgagtctgtacccatcgaggaaaaaatggcactgcttacacggttcaaaggacatgtaaaaaaggaactagttaacgaatcgtcgatccaagcttatttcgctgcgttactgttcatctccggccattacgcttaccgttcgtacccgcggttaatcttcctatcacattcctcgctttgttacctcatcaaacgtgtggccatgcagtctccagtacaattcaatgacactctagttgagcaattactaaaccacttaattttcgagttgcctaatgagaagaaattttggctggcttccattaaagccattgaagccatttatttggttaatccatcgaagatccaagctattctagcaaatttcttgcgaagaccaagtgaaaaccaaaacggagattacctgaataggataaaatctacattattgaccatcgatgagttgatccagatcaacgagaaaaataattcaaatcatttgcaactactgaggtttttcatgctgtctttcaccaaccttttaaataacaacctaaatgaacacgcaaacgatgataacaataatgtaataatagagcttattttcgatataatgtacaagtatttgaaaatggatgacgaaaattcacaggatctgatagatggatttgttaacgatttagaagttgagaaattcaagcaaaaattcataagtttagcaaagtcacaggaccagcatggttcacaagaagataaatcgaccttgtttgacgaagagtacgagtttcaattactattagccgaagcgaaattgccgcagttatcaaacaacttgagcagtaaagacccagcgatgaaaaaaaactatgagtctttgaaccaattacaacaagacttggagaatttgttggcaccgttccaaagtgtaaaggaaacagaacaaaattggaagctaaggcaatcaaatataattgaattagacaacattatatccggcaacattcccaaagataatccagaggaatttgtcactgtaataaaggaggtgcagttgattgagttgatttcaagagctacctcgtcgttgaggacaacgttatcattaactgcattacttttcctcaagaggctaatccatatcctaaacgatcagttgcccctatcaatattggaccaaatatttgtcattttcaagaacttgttatcatctaccaagaaaatctcttcacaaactgcatttcattgtttaattactttgatcattgatataaatcatttccataataaactattccaattatcttttttattaataaatgagaaaaccgtaacaccgagattttgctctgcaatactgctgcgtagcttcctgattaagttcaacgactccaatctttcgctcaacaattcaaatacaacttcgccaacctcaaagttggagaataacatcatatacatcgaagaatggctaaaaaagggcatttcagattcacagacaaccgttagagaggcaatgaggttaactttttggtatttctacaaatgttatcctacaaatgccaaaagattattgagttcttccttttctccacagttgaaaaaagcaacagaattggcaatccctgctcatttgaatataaactatcaagtttccagggtgtcctctactgcctccgcctcctctgcaacgtctcgattgtactctcactcttcgaataattcttcaagaaaaaccagtttactggagcagaaaaggaactatccaagttatgcccaaccgactcaatcttcctccacctccctactcaacgctcctgcagtcacagctggtggaagtgtcatagccagtaaactatcaaataagctgaaaacaaacttaaggtctactagtgaatattcaagtaaagaaaatgaaaaaagggcaaggcatcatgacagtatgaactctgtttcaaacagcaacaccaaagataataataatgttactaaaagaaaagttagtgcccctccttcttctactgccgccacaaaagtatctgaaaattacacaaattttgatgactttccgtcaaaccaaatcgacttgactgatgagttatcaaatagttactctaaccctttgataaaaaaatatatggataaaaatgatgtttcgatgtcatcttctccaatctcattaaaaggcagtaataaacttggtgaatatgaaaccctttacaaaaaattcaatgatgcttcgtttccagctcagatcaaagatgctttacagtatttacaaaaggagttactgttgacatcgcaacagtcatcatcagccccaaaatttgaatttcccatgattatgaaaaagctacgccaaattatgataaagtcaccaaatgatttcaagccatttttgagtatagagaagtttacaaatggagttcccttaaattacctcattgagctatattctattaatagttttgattacgcagaaatcttaaagaatagaatgaatcctgaaaagccctacgagcttactaacttgattataaccatcgcggatttattcaatttcttgaatgccaataattgtccgactgatttcaaactatactatatgaaatacaaaaccacttttttcaattataatttcaagttacttttagagattttccgtaacttgaacataaaacatgataacactctgaggtcaggaacgaacgatctcatgcctaaaatatcaataatactctttcaaatctacggtaaagagtttgactacacatgttatttcaatctaatttttgaaatttataaattcgataataatcgttttaataaattgctagctgattttgacattgtatctaccaagatgaaaatctgtcatgaacttgaaaagaaggatgccaactttaaggtagaagacatcatttctagagaaagttctgtaagcttcactcccatcgacaataaaaaatccgaaggggatgaggaatccgacgatgctgtagacgaaaatgatgttaagaaatgcatggaaatgacaatgattaatcccttcaaaaacttggaaactgataaaacactagagttgaagaataacgttggaaaaagaacatcaagcacagacagcgtagttattcatgatgataatgacaaagataaaaagctttcagaaatgacgaaaatagtaagtgtttatcaactggaccagccaaacccagcaaaggaggaagatgatatagatatggaaaattctcaaaaatctgatttgaatttaagtgaaatttttcaaaacagtggtgaaaataccgaaaggaaattgaaggacgataatgaaccaacagtaaaattcagtacagatcctccaaagataataaatgagccagaaaaacttattggaaatgggaatgagaatgaaaagcctgatttggaaacaatgtcaccaaccaaaataaacggggacgagaatatgggtcaaaagcaaaggatcacagtaaagagagaaagagacgtagcactaactgaacaagatataaactccaaaaagatgaaactagttaataacaaaaaatcagagaagatgcatttgcctatcatggataattttccaagggattccttgactgtatatgaaattagtcatcttttaatggttgattctaatggcaacactttgatggattttgatgtctatttcaatcacatgtcaaaggcaataaacaggataaaaagtggatcgttcactatgaaacatataaattacctgatcgaacccttgattacttgttttcaaaatcaaaaaatgaccgattggttgacgaatgaaaatggttttgatgaactactggatgttgctattatgcttttgaaatctactgatgacacgccttcaattccatcaaaaatatccagtaagtccataattctcgttcattgtcttttggtttggaaaaagtttctaaatacactaagcgagaatgccgacgatgatggcgtttcggtgagaatgtgtttcgaagaagtatgggaacagatccttttaatgcttaataaattttctgattatggaaacgaaatctataaattagcgcaagagttcagggacagtctaatgttatcgcactttttcaaaaacattcggcaacaagaattctaa

SEQ ID NO: 79184 - DNA, 405 bp, Saccharomyces pastorianus
atgaaacaccatatgaaatctaatagaattgttgaagctaatttagagatgttaaaacacttgttaatcgaatctttccctaactttgacgacattcgttcgaagaacatcgatcatgattttgttgaaaagatgacaaaattaagctctggttgcgcctttattgatgtgtcaagaaatgaccctgccaaagaaaacttattcttgcctgtgtggaaaggcaacaagtgtatccaattgatggtttgtaaagaagatactcatgagctattatataggatctttcgtattgatgcgaatgccaaggctactccaagcgctgaagaaaaagaaaaagaaacgactgaatctcccgcagaaactactaccggaacctctactgaagctcctagcgctgctaattga

SEQ ID NO: 79185 - DNA, 1407 bp, Saccharomyces pastorianus
atggctagaagaaagaatttcaaaaaagggaacaagaagacttttggtgctcgtgatgactcgagagctcaaaaaaactggtctgaactggtaaaggaaaatgaaaaatgggaaaaatactataagactttagctcttttcccagaagatcaatgggaagaatttaaaaagacatgtcaagctccacttcctctaacttttagaattacaggttctagaaagcatgccggtgaggtcctgaatttgtttaaagaaagacatctaccaaacttgactaatgttgagtttgaaggtgagaagattaaggcccctgtagaattaccttggtatccagaccatcttgcttggcaattggacgttcctaagacggttattagaaagaatgaacaattcgcaaaaactcagagatttttagttgttgaaaatgccgttggtaatatctcaagacaagaagccgtttcaatgattcctccaatcgttctagaagtaaaaccccatcacactgttttggatatgtgtgctgctcctggctccaaaactgctcaattaatcgaagccttgcacaaggatacagatgaaccatctggtttcgttgtagctaatgatgccgatgccagaagatctcatatgttggttcaccaattgaagagattgaacagtgccaacttgatggttgtcaaccatgacgcccaattcttcccacgtatcagattacatggcaactcaaataataagaatgatgttttaaaatttgacagaatcctgtgtgacgttccatgttctggtgatggtaccatgaggaaaaatgttaatgtttggaaagactggaacacacaagcaggtcttggtttgcatgctgttcagctgaatatattaaacaggggtttgcatcttctaaagaacaacggtagattggtttactcaacctgttctttaaatcctattgaaaatgaagcggttgttgccgaagcgttaagaaagtggggtgacaagattagattagttaactgtgatgataagcttcctggcctaataagatccaagggtgtatccaaatggcctgtctatgacagaaatttgactgagaaaaccaaaggagacgaaggtacactagatagtttctttccaccatctgaagaagaggcatcgaaattcaatttacaaaattgtatgagggtttatcctcaccaacaaaacacaggcggatttttcattactgttttcgaaaaagtcgaagatagtactgaggcggctacagagaaactatcttctgaaaccccagctctagagtctgaaggacctcaaaccaagaaaataaaggtagaagaagtccaaaagaaagaaagactaccacgtgacgcgaacgaagagccttttgtttcgttgatccacagcacgaagctttaa

SEQ ID NO: 79186 - DNA, 774 bp, Saccharomyces pastorianus
atgaacgatcaggatcgtacatctattcatgaggctatggaacagcaaagtatttccatttccaaggccggtattgttactacattacaagcgcgctgctcaattattgctgcggcaaatcctaatggtggtagatataattcaaccttgcctttagctcagaatgtcagtttgaccgagcctattctttctagatttgatattttatgtgttgtcagagaccttgttgatgaagaggcagacgaaagattggctacatttgttgtcgattctcatgtaagatcccatccagaaaacgatgaagatcgagaaggcgaagagcttaaaaataatggcgaatcggcgatagaacaaggagaagatgaaataaatgagcagcttaatgcaaggcaaagaagacttcaaagacaaaggaagaaggaggaagagatctcgcctattccacaggaattattgatgaaatatattcactatgcgaggacaaaaatataccctaaattgcatcagatggatatggataaggttagcagggtatatgcggatttgagaagagaaagtatttctacaggttcgtttccaatcactgttcgtcatttagaatctattctaagaattgcagaatcttttgctaaaatgagattatctgaatttgtgtcttcttatgatttggatagagctatcaaagttgtagttgattcctttgttgatgcccaaaaagtcagtgttcgccgccaactccgcaggtctttcgcaatttataccttgggtcactaa

SEQ ID NO: 79187 - DNA, 1797 bp, Saccharomyces pastorianus
atgtctgataatagaagacgtagacgtgaggaagatgattcggactcagaaaatgagctaccgccatcctcacctcagcaacattttagaggggggatgaacccagtttcatcacctattggttctccagatatgattaaccctgaaggtgacgataatgaagttgacgatgtaccagatattgatgaagttgaagaacaaatgaacgaagtagatttgatggacgataatatgtatgaggattatgcggctgatcataatagagatagatatgatccagatcaagttgacgacagggaacaacaagaactatctttaagcgaacgtcgccgcattgatgctcaactaaatgaaagagataggctattgagaaatgttgcctacatagatgacgaggacgaagaacaagaaggtgcagcgcaacttgatgaaatgggccttcctgtgcaaagacgaagaaggagaaggcagtatgaggacttagagaatagtgatgacgatctattgagtgacatggacattgacccattaagagaagaacttactttagaatctctgagtaacgttaaggctaacagttactcggaatggataacacaacctaatgtctcaagaactattgccagagagttaaaatcattcctgctggaatatacagatgaaacgggtcgttctgtatatggtgcacgtattagaacattaggtgaaatgaattctgaatctttggaggttaattatagacacttagcggagtccaaagccatcctggcactatttttagctaaatgtccagaagaaatgttgaaaatattcgatctcgtggctatggaggcaacagaattgcattacccagattatgcccgtattcactccgaaattcacgtaagaatctctgattttccaacaatatacagtttacgtgaattgcgtgagtctaatttgtcctctctagtacgcgtcactggggtggtgacaagaagaacaggagtcttccctcaattaaaatatgtcaaattcaattgtttgaaatgtggctccattttgggcccattttttcaagattctaatgaagaaattagaatctcattctgtacaaactgcaaatcaaaaggtccctttagagtcaatggagaaaaaactgtgtaccgaaattatcaaagggttacgctccaggaagctcccggaaccgttcctccaggccgtctaccaagacatagagaagtcattttgttggcggatttggtagatgtatccaagccaggtgaagaggtagaagttaccggcatctacaaaaataactacgatggtaacttgaatgcaaagaacggattccccgtttttgcaacaattatcgaggcaaattctataaaaagaagagagggcaatacagctaacgaaggcgaagaagggttggatgttttcagttggactgaagaagaagagcgtgaatttagaaagatttctagggatcgtggtataattgataaaattatatcatcgatggcaccgtctatctacggtcatagagatattaaaactgcagtcgcgtgctcattatttgggggtgttccaaaaaacgtcaatggaaaacattctattcgtggtgatatcaatgtgttattattaggtgatccaggtactgccaaatctcaaatcttaaaatacgtcgagaaaacagcgcatagagcggtcttggcaactggtcagggtgcttcggctgtcggtctgacagcatccgtcaggaaagatcctattactaaagatgggcttgaaagcgtgcgctataattggtggata

SEQ ID NO: 79188 - DNA, 2160 bp, Saccharomyces pastorianus
atgttcagagaacaaattgcaactttttctgcttcaattcaatctgcgaccacgaacatttttgaggaaccagctagattggcagattttgccgctgctgtttctgccggcgaagaagacgaattacaagacatcctgtcatctttaaacattgagcacaggctagaaaagtcgctactagtccttaagaaagaattgatgaatgccgaattacagaacaaaatctccaaagatgtagagacaaagattcaaaagagacaaagagaatactatttgatggaacaattaaagggcatcaaaagagaattaggtattgacgacggccgtgacaaattgattgacacttataaagaaagaatcaagtcattaaaattgcctgatagcgttcaaaaaattttcgatgatgagataactaaattaagtaccttggagacttctatgtccgaatttggcgttatcagaaactatttggattggttaacatcgatcccatggggaaaacattccaaagaacagtattccattccgagagcaaagaaaattttagatgaagatcattatggtatggtagatgtcaaggatcgtatcttggagtttattgccgtcggtaaactattgggtaaggtcgatggtaaaatcatatgtttcgtaggacccccaggtgttggtaaaacgtccataggtaaatctatcgctagagctcttaacaggaaattcttccgattttctgtaggcggtatgaccgacgtggcagaaataaaaggtcataggagaacatatattggcgccttacctggcagagtagttcaagcattaaagaagtgccaaactcaaaatcctttgattttgatagatgaaatcgataagattggacacggcggcatacacggcgatccgtccgcggcattgttagaagtattggaccctgaacaaaacaacagcttcttggataactacttggatattcctattgacttatcaaaagtgcttttcgtttgcactgctaactctttggaaactattccaagacctttactggatcgtatggaagtcattgagttgacaggatatgttgctgaagacaaggttaagattgccgagcagtatttagttccaagtgccaagaaaagcgctggtctagaaaactctcatgttgatatgacagaagatgcaataacagcgttaatgaagtactactgtagagaaagtggtgtaaggaatttgaaaaaacacatcgagaaaatataccgtaaagcagccctacaagtggtaaagaagttgagtattgaagattccccaacgtcatcagccgacagcaagcctaaagaaagcgtttcttccgaagaaaaggcggaaaataacgccaaaagctcatcggagaagactaaggacaataattcggaaaagacaagcgatgacattgaagccttaaagacctctgaaaagatcaatgtttccatatcccagaaaaacctaaaggattacgttgggcctccagtctacactacagaccggttatacgaaacaactccaccaggggtagttatggggttggcatggactaatatgggaggttgctcactttatgtagaatctgtccttgaacaacctttacacaactgcaagcatccaacatttgaaaggaccgggcaactgggagatgttatgaaggaatcatcaagacttgcttattcattcgccaagatgtatttagcacaaaaattccctgagaacagattttttgaaaaggcgtctatccacttgcattgtcctgaaggtgctacacctaaaggtggtccatctgcaggtgtcactatggccacttccttcctttccctagcattgaataagtcgattgacccaacagttgcgatgaccggtgaattgacacttaccggtaaagttttacgtatcggtgggttgagagaaaaagctgtggccgctaaaagatctggtgccaagactattattttccctaaagataacttaaatgattgggaggaacttccagacaatgtaaaggaagggttggaacctttagctgctgattggtataatgatatattccaaaaattattcaaggatgtgaatacgaaagaaggtaattcagtatggaaggctgaatttgagattttggatgctaaaaaggaaaaggactaa

SEQ ID NO: 79189 - DNA, 309 bp, Saccharomyces pastorianus
atgacatggaggcaatggttaaataacgcattgaaacgtagttatggtatttttggtgaaggtgtagaatattcattcctgcatgttgacgataagctggcttacatcagagtaaatcatgcggataaagatacattttcttcgtccatcagtacatacatatctactgatgaactcgtcggttcaccattaacagtgtcaattctacaagaatcttccagtttgagacttctggaggtcactgacgatgaccgcctttggctgaaaaaagtaatggaagaagaagaacaagactgtacatgtatatag

SEQ ID NO: 79190 - DNA, 2622 bp, Saccharomyces pastorianus
atgacagtcaaatcagtggatatttcgtgtgagggagttccaaagaagggaacgaatgataaagaaatagtggttacagaaaacaaatttgatttcaagattcaattctatcaatactttgacacagtcaccgacgaatccctcctcatgatcaattcaagaggagaagcttatatatctcatgatggtggacaaacaataaaaaggttcgacagtaatggtgaaacaattattgaagttgtgtttaatccatacttcaattcttcagcttatctgtttggttccaaaggtagcattttctctacccatgataggggatactcttttatgactgctaaattgcccgaggctaggcagttaggtatgccattagactttaacgctaaggcacaggatacatttatctattatggtggtaagaattgtgagtcaatcttaagtccggaatgtcatgcggtagcatacctgaccaatgatgggggcgaaacgttcacggaaatgcttgataatgcaattcattgtgagtttgcgggctcacttttcaaatatccgtcaaatgaggatatggttatgtgtcaagtgaaggaaaagtcttcgcagacaagaagcttagtttcttctactgattttttccaggatgataaaaataccgtctttgaaaatattatcggctacttatccactggtggctatatcatcgttgctgttcctcatgagaacaacgaattgagagcatacgtaactatcgatggtactgagtttgccgaggcaaaattcccatatgatgaagatgttgggaagcaagaggcattcactatattagagtctgagaaaggatcgatattcttacatttagcaacaaacttagtaccaggacgcgattttggcaatcttttgaaatccaactcaaatggtacttcttttgtcacgttggagcatgccgttaatagaaacacattcggctatgttgactttgaaaaaattcaaggtctcgaaggcattattctcaccaacatcgtttcaaatagtgacaaggtcgccgagaataaagaagacaaacaattgaagacgaagatcacctttaatgaaggttcagattggaactttttgaagcctccgaagagggattcagaacgaaaaaagttttcttgcagctccaaatcactggatgagtgttcattgcacttacatggctatactgaacgtaaggatattagagatacatattcttccggttctgcattaggaatgatgttcggcgttggcaacgttggtcctaaccttttaccatataaagaatgttccaccttcatcaccaccgatggtggcgaaacgtgggctgaagttaagaagactcctcaccaatgggaatacggtgaccacggtgggattttagttttagttcctgaaaactcagaaactgattctatttcctattctaccgattttggtaaaacatggaaagattataaattctgcgctgataaggttttagtaaaggatataaccactgttcccagggattctgctttgagatttttgctgtttggagaggcagcagatattggaggcagctcatttagaacgtacacgattgattttagaaacaccttcgaaagacaatgtgatttcgacatcactggtaaggaaagcgcagattataaatactctcctctgagttccaaaagcaattgcctatttggtcaccaaaccgagtttttacgtaaaaccgatgaaaattgttttattgggaatattccactttctgaattttcaagaaatatcaaaaactgttcttgtacaagacaagatttcgagtgtgattacaacttttacaaagctaacgatggtacttgtaaattagtcaaaggactaagcccagcaaatgctgcagacgtttgtaaaaaagagccagatttaatcgaatattttgaatcgtcaggctacagaaagatccctctatcaacctgtgagggtggcctgaaattggatgctccctcatcaccacatgcttgcccaggaaaagaaaaagaattcaaggaaaagtactcagtaagtgccggtccctttgcatttattttcatttcaattcttttaataattttctttgccgcatggtttgtatatgacagaggtatcagaagaaatgggggatttgcaaggtttggagaaattaggctaggtgacgatggtttaatagaaaacaataatactgacagagttgtcaataacattgtgaaatcaggattttacgttttctcaaatatcgggtctcttttacagcacacaaaaactaatatagcgcatgctatttccaaaattagaggaaggtttggaaacagaacaggtccaagctactcatccctgatccatgatcaatttttggatgaagcagatgacctgcttgctggccacgatgaagacgccaatgacttatccagtttcatggatcagggtagtaattttgaaatcgaagaagatgatgttccaacacttgaagaagagcatacatcatatacagatcaacctacgaccaccgatgttccagatgcattaccagaaggaaatgaggaaaacatcgacaggcctgattctacagcgccatctaacgaaaaccagtag

SEQ ID NO: 79191 - DNA, 2028 bp, Saccharomyces pastorianus
atgatattacttcattttgtctattctctttgggccttacttctcattcctttaactaatgccgaagaattcacccccaaagtgacaaagactatcgcgcaagattcatttgatatattaagctttgatgattccaacactttaattagaaaacaagacacctccgttactataagctttgacgatggtgaaacatgggaaaaagttgaaggcattgaaggcgaaatcacttggatatacatcgaccccttcaatagacatgacagagccgttgcaacggcaatgaatgggtcgtacctttatataaccaatgatcaaggtaagtcatgggagcgtataactctacctgactccggagaaagtatttcacctcgtggatgctatatagaaacccatcccttgaataagaactattttcttgcaaagtgcaactattgtgagaaaacagaagtaaacaatgacaatgaagagaattcgggggacgaagagggacaatttgaaatatttaatattacacgttgcacagacaaggtttttgcaagtaatgatggtggaaaatccttttctgagatcaagtcttctctagaaaggaacgaaaatagtcctatcagcatttctgattgtggctttgccaagaccagcaaagattctgaccttgaaagtagtgatacctcaataatctgtctttttcaaaatatgcagcttattatggatgagtttagttctccttacaccgaaagtaaattggtcctaactacggactggggcaaatcactaaaagaatttgaccaatttaaagataaggtcgtcaatggttacaggatattgaaatctcacatggttgtcttaacccagggcgacagatataatgatatgtcttccatggatgtgtgggtatcaaatgatctgtcaaactttaaaatggcttacatgcctactcagttaaggcattctatgcaaggagaaatatatgaggacgctatgggaagaattatcttgcccatgagtagggaaagaagtgatcaagaggaggataagggcatcgtgtctgaaattttaatttccgactcacaagggttaaaattttcccccatcccatggaccgcaaatgaggtgtttggttatattaatctttatcaacctacttacttgaaaggaacgatgattgcctcactttaccctctatctaggcgtcgtaaccgtaaaggaaaagccaaaggagtaaagagtaagggggtaaccaaaatatctgttgataatggcctcacatggacaatgttaaaagttgttgatccagataacgcagactcattcgactgtgatattactgattttgaaaattgttcgcttcaaaatatgttttacacacgggagggttccactccaaccgccggaattctaatgacaacaggtattgttggcgatggtagtgtcttcgactggggagatcaaagaacctttatttctagggatggtggcttaacatggaaactcgcctttgattttccttgtttatatgctgttggtgattacggaaatgttattgtggctataccgtataatgcggatgaagacgacgatcctcaatccgaattttattactctttagaccaaggtaaaacttggaccgaatatcagctagaaactactatctacccaaatgaagtaatgaatacaacgcccgacggatctggagctaaatttattctaaatgggtttactttggcgcatatggatggtacaacgaatttcatctatgcaattgatttttcaacagcctttaatgataagacatgcgaagaaaatgatttcgaggattggaatttagctgaggggaagtgtgtcaatggagtcaagtacaagatcagaagaagaaaacaggacgctcagtgcttggtgaagaaagttttcgaagacttacaattatttgagactgcttgtgaccagtgtaccgaggctgattacgaatgcgcgtttgaatttgttagggacgccgaaccgggaaatgcataccagactacaacctaa

SEQ ID NO: 79192 - DNA, 321 bp, Saccharomyces pastorianus
atgactttaaaatctcttcaaaaggaagaggagtgtgagcaagagcagcatataccgcgattgcttatggcagattttactagtatggatgaagaatctttacgccaataccacgatacattgtgtcaatccattgactttttggttggtaaatcaagatcattgaagaaacaacagcgagacctcctaaaggataaggcaacttttgaaaatgtagtgacgaatttgacaggacatacccaaagactacagcgagacgaaattgcattgtataacaaaaagcgaaacaaaaagaaaaggttcagttgggtaggatactaa

SEQ ID NO: 79193 - DNA, 429 bp, Saccharomyces pastorianus
atgagcgatagagatcagatagaacctgtcacaaatgcattagatgcagaaagtgattctagtgatgattttgggaatttttcagatgcctcagttgaaaatgacctctataaccagaattctactttaacgacgtcttccgaatctgtagtagataactgcttgaataagatactaccaaagggagaatttgacctggaagaagaaaccataaagaatgactgtttcaagctgagtaaacttattgaagatgaacgaccccatgtcatttatgaacaactcgtacaattagatcctgtgttacagccattcatatggaataaatctcatatacgcagaaacttgctccacattttgagattatcggataataatggctctgagggtgttggtacgaagagggaggaagaaccgttgaatgatgagtag

SEQ ID NO: 79194 - DNA, 1200 bp, Saccharomyces pastorianus
atgcccgatcatcagagcacgaaggagctaaaccacaaacattcatcatcgaacctttcctttagaagtttgaagcataaaacatcacattcttcactaaataagctcaaagtaaggcgtaaaggaaatacacaagaactgaatcatccgatcaaaaaaacttgccaaatatcattgcctgttccagaccaagtctcaaaggacaagattcaactgaaattgaaaaattcaacatcattggcatccttatcttcagaagtcactcccataaacactttggactacaatgattcaattttgcaacaaatattacaactttgtgatgttaagtatatattacatgatctacgtgaagctcagtcattaggcttgtttacgttgaatactagatcggttcagctgtctcataacttttggcaaacttatcatagcgatatgcaaacttcactcatttgcaagaaagtatgtctaggggctctaagtgatttgactacttcaaacttgatatccttacatgagttgaaatcattacggttaatacaaggaactggcggtgtcgccaatttactgcaagcttatgttgtgccctcaaatcaatgtgaaaatgaccaaaacttgatactgtacttatttttcaaataccagggaactcctctatcaaggtgctctaacattgattactctcaagcattgtctattttctggcagtgtagcagtattttatatgttgctgaatccaaatttcagctcgaacacaggaatctaactttggaccatattttgatagactctaaagggaatgttactttaattgatatgaagtgctgtcgtttcttgaatatagataacaataaagcttcctatacaagattagaccatcattatttctttgaaggccgggggactcttcaattcgagatatatgaactgatgagaagaatgctgcctcagccaatatcctgggctacatttgaaccaagaacaaacctattatggttatatcacctaagtagcagcctgctaaaaatggccaaaaaagccgtagtcagcggcgctttgaaccgggaagaaaatatcttaatcgagttgacgcacttactcgatcctgctcgaaaacattccaaaacaattttcaaaaaggaacttgttataagaacttgcggtgatttgttatctttgaagggagaaataatgcagtaa

SEQ ID NO: 79195 - DNA, 597 bp, Saccharomyces pastorianus
atgaattttgatgcggtagcagatcagcagatgactgacagaaggtattttgctctcgaagtagcagaaagcgatgatgccgacagctcattaaattcttcatccatgggaagccccgcagtggatgtaggaagaaaagtttacaaaatcacttcgcacaagggttcagcagaagatgagagtcaatccttttttacttcttcagattctccaacatccaaaacaaggcctgtaggtaaaaccatcgaaaacgatgattactatggtaaaagatcttctacaggttcatcgctcaaacaactcttcaataaaattaatattaatgataccgctcactcttcaaacaaagaaaatgtatctcagtcggcgctatcggaaaacaagctgctctctccatctaaaaggttgtcgaagcaaggtcttacaaaggtgactaactccaagtttcgtacacccttgagacctatttcaaaccaatcgactttatcaagggatgagcctgttaaagatttagatcacttaagtttcggagcggtagtgatttcaaatgctggggtgacgagaagacaagttctcatgttcattcatccagtgtga

SEQ ID NO: 79196 - DNA, 897 bp, Saccharomyces pastorianus
atgtgccagaaggcgttgaaaagaaaattagtatctcatcgttcccatgccagattgggcatacattctttgattatgggtacaaaagaaaggagtgcatggaaaatctcaaattcagagctggagaatgatgatgcagataatgcgggtggtaagggttcagatggtacgagcaacagtattgacgacattgcagttctctcagaggaagaaaatgactttcataggatgactttgaacgccaagctaacccaggagaagatctggagcgaagagccgacaacacgatgccttctgcagtctgatgtcataccagacacagatgttgtcgttcttgaggggggtagtttagacgatatagccgttttagaaataagaaacggtgttgagagatcaatacaatttgattctgaagcacttttagataatcctaccagaatcttaggctatcaaggaggtaaaagaaccatcgagacctttattccagaagttatcatttgtgcaataggatcaaaagattgtaagtgctggtgcctagcttcagctaatggctctatttacatactttcatacaatggacagcagagaatcccaaaaatttgcctaggacataaagttattaaaatggtaacatcaagcaaatacctccttgttctaactgaaagaggtttattttttgcatgggacttgctggatttaaaattagtactgcgaaatgtacctatattaccaattttgaacggtcagccaattcatggaaacaaggtaagaatcaacaaggttattaaatgctttcgtttggatggttctagttgtgatttgcttttagaggttggcgatcctaaaaatgtgtataaatggactaaggatctgggttgttggtcgttatataaataa

SEQ ID NO: 79197 - DNA, 1755 bp, Saccharomyces pastorianus
atgaaagtggtaaagtttccatggttggctcaccgtgaagaatcgcgaaaatatgaaatatacacagtcgatgttagccacgatgggaaaaggttggccacgggcggcctagatggcaagattaggatatggtccatagattccattttgcgttgcatggaactagaatctctaactcctgagatacctcttccgcaagacttgcagatgccgttatgtagcatgagtaggcataccggctcgataacatgtgtcaaattctcaccggatggaaagtaccttgcaagtggatccgatgatcgaattttactgatatgggctcttgacgaggagcaaagctcacaacccgccttcggttctgagcatgagagagagcattggacagttcgtaaaagattggttgcacacgataacgacatacaagacatttgctgggcgccagactccagcatactagtgacagttggtttagatagatctgtcatagtctggaacggttctacatttgaaaaactgaagagatttgacgtacatcaatcacttgttaagggcgttgtttttgatcccgctaataagtattttgcgactacatctgatgatagaaccatgaagatatttagatatcacaagacgggggatatttcttttacaatagagcatataatcaccgagccattcaaagaatcacccttgactacttattttagaaggccatcgtggtctcccgatgggcagcatattgcagttccgaacgccactaatgggcccgtaagttctgtggcaattgtaaatagaggaacttgggatacaaatgttagtttaattggtcatgatgcacctacagaagtcgcaaggtttaatcctagattgtttgagagaaatgcgggtgtcaagcaaaaaaaagacgatgacccagaaaatgctctagtagggcaaaacgatgataaagttcaccattttgataaaaacatcgactctgttgtggcaacagctgggcaagataaatccttagcggtctggagtacaagtagaccaaggccaatattagttgctttcgatatcgcaaataaatcaattactgatatgtcttggaatccagacggctctttattatttgttgcgtcattagactcttcaatcaccttgtttaaattcgaaaataatgaactaggcaagccaattcctttggaaaaaaatatggagcagttatataggtacggtgttgacaaggactcattagatttccctgaaagtatcaaccaactgttactcgaagatcagacaaaatcatttaagcatacaaaaatttcaacatcgaaaccaggtgaaaaccacccaacacttgcaacaaattcagcttcaaatcaaaaagataacaatgatgcttctgtctctagaagtgaacatataaatatcttgattccaaagaggaaaaaggatgctatactgaataaagccgtaactcttaaaagcggtaaaaagcgtgtggcaccgacattgatatcgacttcatcatcttctcccttttctaatggaatcaaaaagcctacattggatagtaaaaggattgaaaataatgtaaaatcatccaccaagaccattaacagtaaaaatacattgctaaatgtgccagaaggcgttgaaaagaaaattagtatctcatcgttcccatgccagattgggcatacattctttgattatgggtacaaaagaaaggagtgcatggaaaatctcaaattcagagctggagaatga

SEQ ID NO: 79198 - DNA, 1677 bp, Saccharomyces pastorianus
atgatgcctgacatcaataactcaatgttaagaaccttgggtctgcgcgaaggtgatattgttagagtaatgaaacatcttgacaagaaatttggaagagaaaatattgcatcaattcctacaaatgccactggaaatatgttttcacaacctgatggttcactgaacgttgctacaagtccggaaacctcactgcctcagcaattgttgccacaaacaacaagtcctgctcaaacagctccttccacatcagctgagacagatgatgcttggactgttaaaccggcttctaagtctgaatctaatttgctctctaagaaatcagaatttactggttccatgcaggatttattagacttgcaacctttagaacctaaaaaggcagctgcctcgacacctgaaccaaacctaaaagatttggaacccgtgaaaactggcggcaccactgttcctgctgctccggtttcatctgctccggtttcatctgctcccgctccattggatccattcaaaaccggtggcaacaatatcttacccttatctactggctttgtgatgatgccaatgattactgggggcgctatgctgcctatgcaaagaaccggcggcttcgttgtaccacaaacaacttttggtatgcaatcgcaagttactggtggtatcctacctgttcaaaagacaggaaatgggttaattcctatctctaacactggcggcgcaatgatgccacaaactacgttcggcgcagcagctaccgtcttacctctgcaaaaaactggaggtggcctaataccaattgccaccacaggaggtgcgcaattcccgcaaacttcattcaatgtccaggggcaacaacaacttccaacaggttcaatattacctgtccaaaaaactgctaatggattaatttcagctaatactggtgtctcaatgccaactgtacaaagaacaggcggcactatgattccacaaacatcatttggcgtttcacagcaattaacaggtggtgcaataatgacccaacctcaaaatacagggagtgccatgatgcctcaaacatccttcaatgctgtaccacagattactggaggagcaatgatgcctcaaacgtccttcaatgctttaccacaagttacagggggagcaatgatgcctttgcagagaactggtggtgctttgaatacatttaatactggaggcgccatgattccccagacttcgttcagctctcaagctcaaaacactggcggattccggccgcaatcccaattcggtttgactttacaaaaaaccggaggtattgcgccattaaaccagaaccagttcactggtggagccatgaatactttaagtacagggggcgttcttcaacaacagcaaccacaaacgatgaataccttcaatactggtggtgttatgcaacagccccaaatgatgactactttcaatactggtggtgctatgcaacaaccacagatgatgaacacattcaacaccggtggaattatgcaacaaccacagatgatgaacacttttaacactgggggtgctatgcaacaaccacaacaacaagcattacagaaccaacctactggatttgggtttggtaatggacctcaacaatcaaggcaagccaacatattcaatgctactgcatcaaatccgtttggattctag

SEQ ID NO: 79199 - DNA, 1395 bp, Saccharomyces pastorianus
atgactgtgtttctgggcatctatagggccgtctatgcctatgagccgcagacaccagaagaactggccatccaagaagacgatctgttgtacctcttacagaagtcagacattgacgattggtggacagtaaagaaaagagtcattggttccgatagcgaagaaccggtgggtctagtgccctccacttacattgaagaagctcctgttttgaagaaggtaagagccatttatgattatgaacaggtgcaaaatgctgatgaagaattgacgtttcatgaaaatgacgtttttgatgtattcgatgataaagatgctgattggctgttggttaagtctaccgtttccaatgaattcggcttcattccaggcaattacgtcgaaccagagaatgggtccacttccaagcaggaacaggctcccgctgccgctgaagctcctgcagctactcctgcagccgctcctgcttctgctgccgtactacccaccaactttttaccacctcctcaacacaatgatagagctcgtatgatgcaaagtaaagaagaccaagctccagatgaggatgaagagggccctcctcctgccatgcctgcaagaccaacggctactaccgaaactactgatgccaccgctgcggctgttcgatctcgtacaagactatcatacagcgataacgataatgacgatgaagaggatgattactattacaacagcaacagcaacaacgttggaaatcacgaatacaatacagagtatcactcttggaacgttaccgaaatcgagggaaggaaaaagaagaaggccaagctatcaatcggtaacaacaagataaacttcataccccaaaaggggactcctcatgagtggtcaattgataaattggtctcttatgataacgaaaagaaacacatgttcttggaatttgttgatccatatagaagccttgaattacacactggtaataccaccacatgtgaagagatcatgaacattattggtgaatataaaggtgcttcccgtgatcctgggttgagagaagtcgaaatggcttccaaatccaaaaagagaggtattgttcaatatgacttcatggctgaatcacaggacgaattaaccataaaatcaggcgataaagtctacattttagatgataaaaaatctaaggactggtggatgtgccaactggttgattcagggaaaagcggtctcgttcctgcacagtttattgagcctgttcgtgacaaaaaacatactgaatctacagcaagcggtatcatcaagtctatcaagaaaaacttcaccaaatctccatctaggtcgagatctagatcaagatctaaatccaatgccaatgccagttggaaagatgatgaactacaaacgatgttgtag

SEQ ID NO: 79200 - DNA, 96 bp, Saccharomyces pastorianus
atgcaaagctgctctagagacacacgatgtttttcttgccggcgcaggacaattgtctctacccttccaatcacacatagagagccccaggaatag

SEQ ID NO: 79201 - DNA, 543 bp, Saccharomyces pastorianus
atgagtggaagtaatatggggtactatgacgtactcgcagggctttcggcgctggaaaaatcatcccaggtagggttcagtgcgactgagcttcaacagcttacgcaacaatctgatgctaccgacaagggcatagagggcagtgagaatagtaaagcgaaggtatccaagcccaaaagagtagctgtacatggttacctaggcggtaaagtgtcgctcgccgatgcggcacaggtggagtatgaagtaggccattcactgctgggcagttatgtgccacgccagcagttggaagccctgtcaagtgtcgacttttcgcaccatttccaccgcacgttagaatgcaaagctgctctagagacacacgatgtttttcttgccggcgcaggacaattgtctctacccttccaatcacacatagagagccccaggaatagcgaggctaaaaggaaaagaaaagtgataatatgcaaacggtgtcaatcacgatttataggtccccataggcggtctcaacttagagaacatgcctgcgtagattaa

SEQ ID NO: 79202 - DNA, 3537 bp, Saccharomyces pastorianus
atgcatgaatatgattttcctagaattttatcaactttcaaggggttaattgaagatggttataagtcctacagtgagttagagtggttacctctgttgttcacctttttacattttatcaatgataaggaagaacttgcattaagaacaaacgcatcccacgctataatgaagtttattgacttcattaacgaaaagcctaatcttaatgaagcttcaaaatcgatttctatgcttgaaggatatacttttacccagtataaggattggcctcagagactccctagagaggtacaaagtgagtatgtatcagtgctatcatatatggtaaaaaacacgaaatatttcaccgacttcgaagatatggccattttactgtacaatggtgatgaagaagcagatttttttacaaacgttaatcatattcagcttcatcgtcgtcagagagccattaaaagactaggtgaacatgctcatcaactcaaagataacagtatatcccattatttaattccaatgatcgaacattatgtcttttcggatgatgaaagatacagaaatattggaaatgagacccaaatagccatcggagggttggcgcagcacatgagttggaatcaatacaaagctcttcttagaaggtacatttctatgttgaaaaccaagcctaaccaaatgaagcaagccgtacaattaattgttcaactttctgttccacttagagaaactcttcgtatcgtaagagatggggctgagtcgaaacttactttgagcaaatttccttccaacttagatgaacccagtaattttattaagcaagaattgtatccgactctttcgaaaattcttggcactagagatgacgaaactataattgaaagaatgcctattgcggaggcattagttaatattgttttagggctcacaaatgatgatattactaatttcctccctagtattctaacaaatatttgccaagttttgagaagtaaatccgaagaattaagagatgcagtaagagtaaccttgggtaaaattagtattatcttgggcgctgagtatcttgtctttgtgataaaggaattaatggctacattaaaacgtggttctcaaattcatgtgttaagttacactgtccactacatattaaagagtatgcacggagtcttaaaacactccgatttggatacctcgtccagtatgattgttaagattataatggaaaatatctttgggttcgctggtgaagaaaaagactctgagaattatcatacaaaagtgaaagaaattaagagtaataaaagctatgatgctggtgaaattctcgcctcaaacatcagcctgacagaatttggaacattactctctcctgtgaaggctttgttgatggtcagaattaatctaagaaatcaaaacaaactgagtgaattattgagacgatatttgttgggtttaaatcataatagtgactctgagtcagaaagtatcctcaagttctgccatcagcttttccaggaatcagaaatgagtaattcccctcaaataccaaagaaaaaagtgaaagaccaagtagatgaaaaagaagactttttcttggtaaatttggagtcgaaatcttataccatcaactcaaacagtttgcttttgaacagcactttacaaaaatttgctttagacttacttaggaacgtaataacgagacaccgctcctttttaactgtctcgcacctagagggttttattccatttttgagagattcgttactttcggaaaatgaaggtgtggtaattagtactttacgtatcctgattacattaattaggttagatttttccgatgaatctagtgaaatcttcaaaaactgtgcgaggaaggtactaaatattatcaaggtttctccttcaacttcaagcgaattatgccaaatgggtttaaagtttctttctgcctttatacgtcacacagattcaacattaaaggatactgctttgagttatgttctagggagggtcttaccagatttaaatgaaccaagcagacaaggccttgcttttaatttcctaaaagcacttgtttcaaaacatatcatgcttccagaactctatgacattgcggatactactagggaaatcatggtcacaaaccactcaaaagaaattagggatgtatccaggagcgtttactaccaatttttaatggaatatgaccaaagtaagggtcgtttagaaaagcagttcaaatttatggtcgacaatttacagtatcctaccgagtccggccgtcagtccgtaatggaattgatcaatttgattattacaaaggctaatcctgctttactatccaaattatcatcttccttctttctggcgctagttaatgtttcttttaatgatgatgcgccaagatgccgtgagatggcttcagtattgatttccaccatgcttccaaagcttgaaaataaggaccttgaaattgttgaaaaatatatagccgcttggctaaaacaggttgataatgcatcctttttaaatcttgggttgagaacttataaggtctacttgaaaagtattgggtttgaacatactattgagctagacgagcttgccatcaagcgtataaggtacattttgagcgatacgtcggtaggatcagaacatcagtgggatttggtatactcagctttaaatacgttctcatcttatatggaagcaacagagagcgtttataaacatggtttcaaagacatatgggatggtatcatcacatgtctcttgtatccgcactcatgggtccgtcaatcggcagcaaatcttgttcatcaactcatagccaataaggataagctggagatatcattaaccaatctggaaattcaaaccattgcaacaagaattcttcaccaattaggtgcgccttctattccggagaatcttgcgaacgtctcaataaaaacattagttaatatcagtatcctatggaaggagcaacgcacgccgttcataatggatgtatcaaaacaaactggagaggatctaaaatatactaccgccattgattatatggtaactcgaattggtggtattatcaggtcggatgaacatcgtatggattcttttatgtcgaagaaggcgtgtattcagttattggccttattagttcaagttctggacgaagacgaagtaattgcagaaggggaaaagatattattgccgctatatggttatttagaaacatattactcaagagcagttgatgaagaacaggaagaactacgcactctttcaaacgaatgtttaaaaatactggaagacaaattgcaagtatccgattttacaaaaatatacactgctgtcaaacagaccgtattagaaagaagaaaggaaaggagatctaaaagggcaattctggctgttaacgctccacaaatttctgctgataaaaagttgagaaagcatgcgagatcgagggaaaagagaaagcatgaaaaggatgaaaatgggtattatcaaagacgtaacaaaagaaagagagcctag

SEQ ID NO: 79203 - DNA, 93 bp, Saccharomyces pastorianus
  modified_base (13)..(13): a, c, g, t, unknown, or other
tttaaaccaaagnagtacagattagaggaaggtgattatgacgaggaaaccaatggggaccccatcgatttgaaagaaaaaaagttgaattaa

SEQ ID NO: 79204 - DNA, 747 bp, Saccharomyces pastorianus
atggaaacggatagtggtatacctggtcattcatttgtgttaaagtggacaaaaaacatcttttcgcgcacattgcgtgcatctaactgtgtacctagacatgttgggttcatcatggatgggaacaggagatttgctagaaagaaagagatggacgtaaaggagggccatgaggcaggatttgttagtatgagtagaatcttagaactgtgttatgaagcaggattcgatacggctaccgtgtttgccttttcaattgaaaatttcaagaggagctcacgggaagttgaatcactgatgactttagcgcgcgaaaggatacgacaaatcacagaacgtggagagctggcctgtaagtatggggtacgcattaaaattatcggcgatctctctttgttggataagtctctattagaagatgttcgggttgctgtggaaactacaaagaacaacaaaagggccacgttaaatatctgctttccatatacaggcagggaagaaatcttgcatgccatgaaagaaacaattgttcaacataagaagggcgccgctatagacgaaagcacgttagaatcgcatctctacacggcgggggtaccccctttagatttattgattaggacaagtggcgtttccagattaagtgactttttgatatggcaggcatcgagtaagggcgtacgcatcgaattgctggattgtttatggccagagattggacctatacggatggcatggatcttatta

SEQ ID NO: 79205 - DNA, 249 bp, Saccharomyces pastorianus
atggatcaccagagcactggtcgtcatagtatgcttttttgcccatgtccaaattctgaatcgtatagcctcctttttagcccttgcacctttggtattttggctgatagattggttaaaacttctgatccaaaaaaaatggaaaatccgaaaggtgacgataagatagtcaagttttacatatactggttggcattctggatacctttacagactatcctatttgcagcttttttaccaccagcctga

SEQ ID NO: 79206 - DNA, 1224 bp, Saccharomyces pastorianus
atgattgtggggttgacactttattttgtattattccgttcaatacagtatttactggtttttttgactccaattaggcagtttgatacatcaacatcacttttattaaacgaattatgttcttctccctctgaaatcaacagttattggaacaagtatttttggaataagctactatcatgggacagtgttttttttatcaagaacataacttccaaaaacggaaaacctcaatttgagcatgaatacgcgttttctcagttgtggacttttttcgttaggctgtttattaaaagtaataacgatagcatctaccatgccttaagggttggagttgcaatagaaaatgttttattttacttatcaggtattgttttatattttctaacaaaaaaaattttcagccaaaatataaggcaatcacagtttgctagaactatcgctaaaaaaacatctctgttgtttttcttaacgagtgccgctggatttttaacaagcatatattctgaaccattatcttttttttttgcatttgttggtatttggagtcgtgaatgctccatttccgtgcccgtattgggtcaattcgatattccgtggagatattggtttccttactcctttatcagcatgacttgctttaccttagcatccttgaatcgttcaaactgtgttttgttagggatttactttatttttgaccttattgaactaacaaagaacaggaagtttgtaaaagcaatatgtttcccactattatcaggatcattaatgttttctgctctactatatcaacaatattacctaccatataagacattttgtcctcaaaggggtgaatggtgtaaatctcaattgttttcaagcatttttatcacgaaaacttctctatattcctacattcagagtcattattggggagttgggttattgaaatactggaccccaaacaacatcccaaactttttgtttgctgtcccaaatattattattttaatctattcctccatatatttcagcaaaatttatccctcctataacttgaaggctctcgtatggatcaccagagcactggtcgtcatagtatgcttttttgcccatgtccaaattctgaatcgtatagcctcctttttagcccttgcacctttggtattttggctgatagattggttaaaacttctgatccaaaaaaaatggaaaatccgaaaggtgacgataagatag

SEQ ID NO: 79207 - DNA, 990 bp, Saccharomyces pastorianus
atgatcacaagaaaggctgccgctgctttagctgtgggctgcacagtagtcatcaagccagactctcaaacgccgctatctgctttagctatggcatatttggctgaaaaggcaggctttcccaagggttcgtttaatgttattctttcacatgccaacacaccaaagcttggtaaaacattatgtgaatcaccaaaagtcaagaaagttacttttactggttctacaaacgtcggtaaaatcttaatgaaacaatcttcttctactttgaagaagctgtcttttgagctgggtggtaatgcccctttcatagtctttgaggatgccgatttggatcaagccttggaacaagccatggcttgtaaatttaggggtttgggtcaaacatgtgtgtgcgcaaatagactttacgttcactcatccataattgataaatttgcgaaattactcgcggagagggtcaaaaaattcgtaattggtcatggtttggacccaaaaactacacatggttgtgtcattaactccagcgctattgaaaaagttgaaagacataaacaggatgccattgataagggagcaaaagttgtgcttgaaggtggacgtttaactgagttaggtcctaacttttatgctccagttattttgtcacacgttccctcaacagctattgtttccaaggaggagacttttggtccattgtgtccaatcttttcttttgatactatggaagaagttgtcggatatgctaatgatactgagtttggtttagcagcatatgtcttttctaaaaatgtcaacactttatacactgtgtctgaagctttggaaactggtatggtttcatgtaatacaggtgttttttcggattgttctataccatttggtggtgttaaagagtcaggatttggaagagaaggttcgctatatggtattgaagattacactgttttgaagaccatcacaattgggaatttgccaaacagcatttaa

SEQ ID NO: 79208 - DNA, 1077 bp, Saccharomyces pastorianus
atgactttgagtaagtattctaaaccaactttaaacgaccctaatttattcagagaatctggttatattgacggaaaatgggttaagggcactgacgaagtttttgaggtggtagaccctgcttccggcgaaatcatagcaagagttcccgaacaaccagtctccgtggttgaggaagcgattgatgttgcctatgaaactttcaagacgtacaagaatacaacgccaagagagagggcaaagtggctcagaaacatgtataacttaatgcttgaaaatttggatgatctggcaaccatcattactttagaaaatggtaaagctctaggggaagctaaaggagaaatcaaatacgcggcttcgtattttgagtggtacgccgaggaagcaccccgtttatatggtgctactattcaacccttgaaccctcacaacagagtattcacaattaggcaacctgttggtgtatgcggtataatttgtccatggaattttccgagcgccatgatcacgagaaaggccgccgctgctttagctgtgggctgcacagtagtcatcaagccagactctcaaacgccgctatctgctttagcaatggcatatttggctgaaaaggcaggctttcccaagggttcgtttaatgttattctttcgcatgccaacacaccaaagcttggtaaaacattatgtgaatcaccaaaagtcaagaaagttacttttactggttctacaaacgtcggtaaaatcttgatgaaacaatcttcttctactttgaagaaactgtcttttgagctgggtggtaacgcccctttcatagtctttgaggatgccgatttggatcaagccttggaacaagccatggcttgtaaatttaggggtttgggtcaaacatgtgtgtgcgcaaatagactttacgttcactcatccataattgataaatttgcgaaattactcgcggagagggtcaaaaaattcgtaattggccatggtttggacccaaaaactacacatggttgtgtcattaactccagcgctattgaaaaagtgacagacataaacggatgccattatagggag

SEQ ID NO: 79209 - DNA, 75 bp, Saccharomyces pastorianus
ctagctattatcccgtttatactttataagtatgggccgtcattacgcgcaagatcttcatacaccgaggagtag

SEQ ID NO: 79210 - DNA, 1503 bp, Saccharomyces pastorianus
atggtatacacttcaacgtacagacacactatcgttgttgaccttttagaatatttgggtatagtgtccaacttagaaactttacagagtgcccgtgaagatgaaacaagaaaacccgagaataccgataaaaaagaatgtaaacccgactatgatatagaatgcggtcctaatagatcatgctctgaatcctctaccgattcagactctagtggttcacagatcgaaaaaaatgatcctttcagggtggattggaacggccccagtgatcctgagaacccacaaaactggcccctactgaaaaaatcattggtagtattccaaataatgttacttacttgcgtcacgtacatgggatcctccatttacacacctggccaggaatatattcaagaagagttccacgttggtcatgtagtggcaacattaaatctttctttatatgttcttggttatggtctaggtcccatccttttttcaccgctatcagaaactgcacgttatggccgtctaaatctgtacatggtgactttattttttttcatgatctttcaagttggttgtgctactgtgcataacatcggcggtttaatcgtcatgcgtttcatcagtggcatactgtgcagcccatcgttggccactggtggcggtacagtggctgatatcatttcaccagaaatggttcctctcgttttaggtatgtggtcagccggtgctgttgctgcgccagtcttggctcccttactaggcgctgctatggtcgatgctaaaaattggcgattcatattttggttattaatgtggttaagtgctgccacttttatcttgttggcatttttcttccctgaaacacaacaccataatattttgtaccgccgtgctttgaaattgagaaaagaaactggtgatgacaggtactatactgaacaggataaactcgatagagaagttgatgcaagaacttttttgatcaatactttgtataggcctttcaaaatgattatcaaagagcctgcaattttggcttttgatctctatatcgctgttgcttatggttgtttctacttattctttgaagcattccctattgtatttgtaggtatataccacttcagcttagttgaagttggcttggcctatatggggttttgcgtagggtgcgtacttgcttatggcttattcggtattttaaacatgaggattattgtaccacgttttagaaacggcacattcaccccggaagcttttttaatcgtggcaatgtgtgtctgctggtgcctgcctctgtctttgttcttatttggttggactgctcgagtgcattggattttgccagttatctcggaagtttctttcgtcctagctgtctttaacattttccaagcaacttttgcatatttggctacatgctacccaacgtatgtcgcatccgtttttgcaggcaatggtcctagtcgggcttcgtttgcctgtgcttcacgttgtatggtagagcatgtctga

SEQ ID NO: 79211 - DNA, 279 bp, Saccharomyces pastorianus
atgcatgtaatttcggccacttattattgcatcagtgatgacagatattatgaaactgcagcgatgtgtgtggttttgaaattatctcaagattgctcttttgatgtgaggcttcaacgaagtggaaatgggccatataagaatatctgggatatgccttgcggagaattacaacaacacattggttacaaaaatggtatatgctataatagtgaaaacacggtgttatcggcagtaggtgtagaacatcgatatcataaaagtgtttctcgtctataa

SEQ ID NO: 79212 - DNA, 330 bp, Saccharomyces pastorianus
atggaacagtcacccatgattgtatttagcaagactggctgcccatatagcaaaaaactgaaagctttgttgactaattcgtacacgttttctccatcttaccacgttgtagaattggataggcacgaacacacaaaagaactacaagaccagattgaaaaagtcactggtaggagaacagtcccaaacgttatcatcggtggtacttccagaggtggttatactgagatagcagagttacataaaaatgatgaacttctagattctttcaaaaaatggagcgatggggcgtttactgtaacagctaattcgcaatctgagagtgcctag

SEQ ID NO: 79213 - DNA, 306 bp, Saccharomyces pastorianus
atggtgaaggaggacctcgcctcgattttaaagcaactaactattaagtatgataatttatttgaaacgagtttcccatactcaatgggtatccatcaggctcctttgaatgcgactggtgatgaattgagtaatagttggtttcacatgcatttctacccacctttactgagatcagctactgttcggaaattcttggttggttttgaattgttaggtgagcctcaaagagatttaacttcggaacaagctgctgaaaaactaagaaatttagatggtcagattcattatctacaaagactgtaa

SEQ ID NO: 79214 - DNA, 864 bp, Saccharomyces pastorianus
atgggcattattatgcagagcatcaacatgataaaaaaaaaacagttgaatattccctcaaaaatgactgctgaagaatttgatttttctagccattcccatagacgttacaatccactaaccgattcatggatcttagtttctccacacagagctaaaagaccttggttaggtcaacaggaggctgcttacaagcccacagctccattgtatgatccaaaatgctatctatgtcctggtaacaaaagagctactggtaacctaaacccaagatatgaatcaacgtatattttccccaatgattatgctgccgttaggctcgatcaacctattttaccacagaatgattccaatgaggataatcttaaaaataggctccttaaagtgcaatctgtgagaggcaattgtttcgtcatatgttttagccccaatcataatctaaccattccacaaatgaaacaatcagatctggttcatattgttaattcttggcaagcattgactgacgatctctccagagaagcaagagaaaatcataagcctttcaaatatgtccaaatatttgaaaacaaaggtacagccatgggttgttccaacttacatccacatggccaagcttggtgcttagaatccatccctagtgaagtttcgcaagaattgaaatcttttgataaatataaacgtgaacacaatactgatttgtttgccgattacgtcaaattagaatcaagagagaagtcaagagtcgtagtggagaatgaatcctttattgttgttgttccatactgggccatctggccatttgagacctggtcatttcaaagaagaagcttgcctcaattagccaatttaaccaaatggtga

SEQ ID NO: 79215 - DNA, 339 bp, Saccharomyces pastorianus
tcccccggtcttaggccccaaaaatccccagttgattgttgttttgtggtggatgaaaatgctaagccaagtcaaatcaatactctaaacaatgaattgacgcttattgtcaaggcttttcatcccgattccaatattacattagaagttttaagtacagagccaacttatcaattttataccggtgatttcttgtctgctggttacgaagcaagacaaggttttgcaattgagcctggtagatacattgatgctatcaatcaagagaactggaaagattgtgtaaccttgaaaaacggtgaaacttacgggtccaagattgtctacagattttcctga

SEQ ID NO: 79216 - DNA, 378 bp, Saccharomyces pastorianus
atgctgatagataatgagaaggacaccgaatttccaggtgatctattggtaaccatacagtatactgtgaacgttgcccaaaaaagtttggaaatggtatataaaggtaaattgactgctggtgaagcgacgccaataaatttaacaaatcatagttatttcaatctgaacaagccatatggagacactattgagtgtacggagattatggtgcgttcaaaaaaatctgttgatgtcgacaaaaacatgattcctacgggtaatatcgtcgatagagaaattgctacctttaactctacaaagccaacggtcttaggctccaaaaatccccagtttgattgttgtttgtggtggatgaaaatgcaaagccaagtcaaa

SEQ ID NO: 79217 - DNA, 1326 bp, Saccharomyces pastorianus
atgacagctcagttacaaagtgaaagtacttctaaaattgttttggttacaggtggtgctggatacattggttcacacactgtggtagagctaattgagaatggatatgactgtgttgttgctgataacctgtcgaattcaacttatgattctgtagccaggttagaggtcttgaccaagcatcacattcccttctatgaggttgatttgtgtgaccgaaaaggtctggaaaaggttttcaaagaatataaaattgattcggtaattcactttgctggtttaaaggctgtaggtgaatctacacaaatcccgctgagatactatcacaataacattttgggaactgtcgttttattagagttaatgcaacaatacaacgtttccaaatttgttttttcatcttctgctactgtctatggtgatgctacgagattcccaaatatgattcctatcccagaagaatgtcccttagggcctactaatccgtatggtcatacgaaatacgccattgagaatatcttgaatgatctttacaatagcgacaaaaaaagttggaagtttgctatcttgcgttattttaacccaattggcgcacatccctctggattaatcggagaagatccgctaggtataccaaacaatttgttgccatatatggctcaagtagctgttggtaggcgcgagaagctttacatcttcggagacgattatgattccagagatggtaccccgatcagggattatatccacgtagttgatctagcaaaaggtcatattgcagccctgcaatacctagaggcctacaatgaaaatgaaggtttgtgtcgtgagtggaacttgggttccggtaaaggttctacagtttttgaagtttatcatgcattctgcaaagcttctggtattgatcttccatacaaagttacgggcagaagagcaggtgatgttttgaacttgacggctaaaccagatagggccaaacgcgaactgaaatggcagaccgagttgcaggttgaagactcctgcaaggatttatggaaatggactactgagaatccttttggttaccagttaaggggtgtcgaggccagattttccgctgaagatatgcgttatgacgcaagatttgtgactattggtgccggcaccagatttcaagccacgtttgccaatttgggcgccagcattgttgacctgaaagtgaacggacaatcagttgttcttggctatgaaaatgaggaaggttatttgaatcctgatagtgcttatataggcgccacgatcggcaggtatgctaatcgtatttcgaagggtaagtttagtttatga

SEQ ID NO: 79218 - DNA, 2019 bp, Saccharomyces pastorianus
atggataaacacacaaacgatatcgaggattggtctaataatattcaaacaaaagctcctctaaaggaagtagatcctcatttgaggccaaagaaatactcaaaaaagtcgttgggacacaagcgtgcttcaacctttgacttgctgaaaaaacacagctccaaaatgtttcaatttaacgaatctgtgatagatctagacacctccatgagcagttcactacaatcttctggttcatacagaggaatgacaacaatgaccactcaaaatgcttggaaactctcgaatgaaaacaaagctgtacattcccgtaatccatctactttgttgcctacatcctcgatgttttggaataaagcgacttcctctcctgtaccaggatcatcgctgattcagagtcttgattcgacgattatacatcccgatatcgttcaacaaccaccactggattttatgccatacgggtttccattgattcatactatctgttttgttacttgttattctgaggatgaagagggtttaagaaccactttagactctctttctaccacagattatccaaattcccataaactactgatggttgtttgtgatggtttaattaagggctcgggtaacgataagactactccagagatagcgttaggaatgatggacgactttgtcaccccacctgatgaagttaaaccttactcctatgtggcagtggcatcaggctctaaaagacacaatatggccaagatatatgcgggtttttacaaatatgacgattctacagttccaccagaaaatcaacaacgtgtcccaatcattacaattgtgaagtgcggtactcctgcagagcagggggccgccaaacccggtaacagaggtaagcgtgattctcaaattattctgatgtcctttttagaaaaaataacatttgatgaaagaatgactcaattggaatttcagcttttaaaaaatatttggcagattacggggctaatggcagacttctacgaaacggtacttatggttgatgctgatactaaagtctttcccgatgctttaactcatatggtcgctgaaatggttaaagatcctttgattatgggtctttgtggtgagaccaagatcgctaataaggcacaatcttgggtaactgcaattcaagtgtttgagtactatatttcgcatcatcaggctaaagcttttgaatctgtcttcggttcggtaacttgtttgccgggatgtttctcaatgtatcgtataaaatctcctaaaggttcagatggttattgggtacctgtattggcaaatccagatattgttgaaagatattcggataatgtcacaaacactttgcataagaagaacttattattacttggtgaagatagatttttatcttcattaatgttaaagactttccctaagagaaagcaagtatttgttccaaaagctgcttgtaaaactattgcccctgataaattcaaagtcttactttcccagcgtcgaagatggattaattctacggtacataacctttttgaattagttctaatcagagacttatgtggcactttctgtttttccatgcaatttgtgattggtattgaattgattggtactatggtactgccgttagccatttgctttactatttatgtcattatttttgccattgtatcaaaacctacacccgtaatcactttagttttactggcaattattcttggtctgcccggcttaattgttgttataactgctacgagatggtcgtacctatggtggatgtgcgtatatatttgtgctttgcctatttggaatttcgtactaccttcatatgcgtactggaaatttgatgacttctcatggggtgatacgagaactattgcgggaggtaataaaaaggcacaagacgagaatgaaggtgaatttgatcactcaaagattaaaatgaggacatggagggaatttgaaagggaagatattctcaatcggaaggaggaaagtgactccttagttgcatag

SEQ ID NO: 79219 - DNA, 1107 bp, Saccharomyces pastorianus
atgaccggcttgaatggagatgatcctgatgactactatctgaaccttaatcaagatgaagagtctctacttaggtcaagacacagcgtcggctcaggagcacctcatagacaaggctctttagtgcggcccgaaagaagccgactgaacaatcctgataatccacatttttattatgcgcagaaaacgcaggagcagatgaatcacctggatgttttaccatcaagtaccggtgtaaacccaaatgcaactcgtcggagtggctccctgcgctccaaaggctcagtgagaagcaaatttagtggccgcgaaacggatagctatcttttacaagatatgaatactactgacaagaaggcttccgttaaaataagtgatgaaggtgttgcggaagacgaatttgataaagatggtgatgtggacaatttcgaagaaagctccatgcagcccataaataagtctatcaaaccattaagaaaggaaacgaatgatacattgtcattttggcagatgtactgttatttcattacgttttgggcacctgctccaattcttgctttctgcgggatgccaaagaaggaaagacaaatggcgtggagagaaaaggttgctttaatttctgtcatcttgtacattggtgcgattgtggctttcctgacttttggtttcactaaaaccgtttgtagtagttcgaaactacgtttgaaaaacaacgaagtatcaacagaatttgtcgtagttaacggtaaggcttatgaattggatacttcctcgcgttccggtatacaagacgttgaagtagattcagacaccctttatgggccctggtcagatgctggtaaagatgcttcgttcttgtttcaaaatgtgaatggtaactgtcataaccttataactccaaagagtaattcttccattccccatgacgatgataataatttagcatggtattttccttgtaagttaaagaatcaagatggctcttcgaagccaaacttcacagttgaaaattacgcaggatggaactgtcatacgtctaaagaagatagggacgcattttacggtttaaagtcgaaagctgatgttacttcacttgggatggtataa

SEQ ID NO: 79220 - DNA, 261 bp, Saccharomyces pastorianus
atgtatgtaataatattaaaaacaactgtatggataatacttctggaccaatcggtgataccatcttccttatttatggtattattatcattattggaccccgccggtgctttttttttttaccttaaaagagtggttctcctccaagggacgcacgagtggtgtacccaggggttgtttccatggctaaagaaattggagattacaaacgtacattgtcatttaagaaggttcataatctgccaattacatttgatataa

SEQ ID NO: 79221 - DNA, 201 bp, Saccharomyces pastorianus
atgtttaaaggatctgtgtcactgtatatactttgttttgctttagggttacgaaacacatttttaatatataatgtatgtaataatattaaaaacaactgtatggataatacttctggaccaatcggtgataccatcttccttatttatggtattattatcattattggaccccgccggtgctttttttttttaccttaa

SEQ ID NO: 79222 - DNA, 162 bp, Saccharomyces pastorianus
ggcagtgcaagcttgcatgcctgcaggtcgaacaagcaagtcttgttgagattgaacccttacgccaaggtctttgctgctgaaaagctaggttccaagaaggctgaaaagactggtaccaagccagctgctgttttcaccgaaactttgaaacacgattaa

SEQ ID NO: 79223 - DNA, 1716 bp, Saccharomyces pastorianus
atgcttggaacctacagacagtttgatgcaacctcgttctacaaggttttaggcatctactataactttttccatattaattttcctgtaataccaattaacaaaagtaaatttactgacatgcttgatcctgaaaaaccaaacgtgattgatgagatcagacaaattaacaatgaaattatccagtgttttaaaaccgcgctagaggtattggtattttgcaaaataaaacaaagaaggtcatcgaaatcaacaaaatcatggtctcgtgacagtttatgcgattttcaaaaaggtctgtattacattcagaatttcaacaaatgtatagccgactgcttccaaagtttaataactataaaacccgtattaaaacaaaattccagtgttattccttcaagaataaagttcatttacttttcgacaataatagtgttaaattttatcttaatattggccggtgaggaaagctcgcttttgctaggcccctctgttggggtttttaacgaatttcaagctcataagttatttctaccttttgaaaatacgtccccaatgctattattaaattcaaacgaggaaagtggtgacgagatactggattatgctgtgttgttcaaaaggttgtacatccttttaaacattctggatacgctacaaagctttcggctaggtcaaccaaaattaattaatctaaattttggtagcgccattgaaacatattttagcgataaaacaggtcataaccaagtcgtcgaaaaagctcccgtagctttggataacattctacgaaaccttaaacttggtgaatttataacatattttgtccttaacagaaaatcattgcaagtaaatgtacctcaccacttgctgttcacaaatcaaacggattacggagagttcgctgttgaaaaaggggaacatgataatatagctggcaaatttgagacccttttgaagaaaaaggaaattttaatcagaaaattactaaatattgaacagaaaaatgaccatattctagaaaattgctgcaattcggatgctgaaatgaaaaatatcggagagctagtctgctcaatgatcactctggtatcaggcatattagattcaattactaatatgaacgcagaaaactctgttgatttggattcaaagccccttccgaacgcctattttgctcaggacagtgaagaagaattaatgtcgccaacacaaagtattacgtcaaatcttgccagtgaagaaaatacacgttgcacaaccaaagacttgatgggaactgtttctattttcatgctgccaatggtggaagaatgctataatatcattagtttgataggacccatacctaccacattaataagtttatacatccgtaatggaaatatggccaagggaataaatgacagaattatgacgttgtcaactgcgctgaacgaattggtgcaaataaccgcactatttaataccctagaaccttttaggaagaatgcacatgaccgtgctaagcgttactatgtaagtgctacaagtagtaccggatgctacgaatcggtaatgaagagcatgtattccggaaaatgtgcagctagtaacgcctcaaacgttgcgccatcggaggaagaaaacaaaaagatattgaaaaagtttgccgacataggttggaaattgatggatgattcagaattgggttgttgctgttgcttctttaactaa

SEQ ID NO: 79224 - DNA, 882 bp, Saccharomyces pastorianus
atgtcacaccatgttcctaatttatatggtacacctattcgcgaccctcacgaacacaaacgcaattcagcgtcaatgggcgaagtaaatcagtcagtttcttcgaggaattgtgaaagaggaagtgaaaagggcacgaagcaaaggaagaaagcctctcgcgcttgtgaccaatgtagaaggaaaagaatcaagtgcaggtttgataaacataccggcgtatgtcaagggtgcttagaagtcggtgagaagtgtcaatttattagagttccattgaaacgtggtcctgcaaaaaaaagggccagtgtagcatccaatgaaaaattcagctcggataatgaccctcttcaataccgaccaagaacacattcatacccaatgaactcgggaaataactacttaccatcactcgccaggaattcctcttttccttccataagcagtctatttgttccctcaataactgctcaatcgcaacaatttgtaaaggtgccgtacgatgacatcaagcgtaggagctctctggcaacattaggcagcgattcatcgatatctaccgaatttgggggaaactatcgcttagatgaaaacttaaatgtcaggcaagaggggaaggatattgtagcgaaaggaatgataacgcccgtggaggaaatgggcgcatgttcatctaacgttcgtcgtcagggttcacaatctcttccaattcaagaacagcgcgctagcccgtacattaacccttttatctctgggagatccaggctaagcagcctttcctatacaagtgaggctacaacttcagaaggtaatacgcaaggtaaaaaccaatgcatgcttactcccaatagtgtacgttccattgaaaaggaacgattaaattag

SEQ ID NO: 79225 - DNA, 1176 bp, Saccharomyces pastorianus
atggcgggaaaattttttcacaaagggaaattatatgttataaaaatagttgaagagatgagctgcctactgctcaccttgccgtttccaaaaaagagttataaccgacaaattcatccaaagaaaataatgagcaagacagccgtgaaagattctgctacagaaaaaaccaagctaagtgaaagcgaacagcgctacttcaattcgtacgatcactatggtattcacgaagagatgcttcaagatactgttcgtaccttatcttacagaaacgcaattatccaaaataaggatctttttaaggacaagattgttttagacgtcggttgcggtaccggtattttatccatgtttgccgctaaacacggtgcgaagcatgttatcggtgttgatatgtcaagcattattgagatggcgaaggaattggtagagttgaacggattcagcgacaagatcaccttgctaagaggcaagttggaggacgttcatttaccctttcctaaagttgacatcataatttctgaatggatgggttactttctactatacgagtccatgatggacaccgttctttacgctagagaccactatttggtagaaggcggtctgatctttcccgacaagtgctccattcatttggccggtttggaagactctcagtataaagacgagaagttgaactactggcaagacgtttacgggtttgattattcgccatttgttccgttggtcttacacgagcccatcgtcgacaccgtggaaagaaacaatgtcaacaccacctcagacaaattgatcgaatttgatttaaatacagtaaaaatatcagatctagcgtttaagagtaactttaaattgacggccaagagacaagatatgattaatggtatagtcacctggttcgacattgttttccctgcaccaaagggtaagagacctgttgagttctccactggtcctcatactccatacactcactggaagcaaacaatattttatttccctgatgatctagatgctgaaactggtgacaccattgaaggtgaattggtttgctctccaaacgagaagaataacagagatctaaatatcaaaatttcttacaagttcgaatcgaatggcatcgacggtaattcaagaagcagaaaaaacgaaggttcttatttaatgcattaa

SEQ ID NO: 79226 - DNA, 594 bp, Saccharomyces pastorianus
atgactacattctcctattcaatttgctatgcaagaaagaatttaagctcggttcccttatacagagacttggaaattcaactctcaaatattgcatcttccagctccaaaacccaatcaagcgttgtcttgaacattttgaagttagcccaattaacttcggttaatgttatacatccatatgtcttgatggcaactgtaatcctaacaatcctaatgtttctatttattctgtatgtaactgtccctaagttaccattcaaactagcggttaataaatttctactgttgctaagttcaactatagttttgacatggggtattggtgcgatgtggactcatgtagggataaatgcaagttacagattggttccatcatcaagtatgaatataattactgtcaagaagggcaagaaggcagcagtaatggcttggtttagctttgcattcctccttttagacagtgtggttttatggttaatatttttaagggataggaaaagcttgaaagatgaaattgataatgttccatgtgcccaaaataggtacaataactactcttcggattcatctacattgcattccaaagtttag

SEQ ID NO: 79227 - DNA, 462 bp, Saccharomyces pastorianus
atgcttttaaaaagatacaaagagaaatatggaattcttgctcctgaagctcgtatatcgtggaatgttgttacatctgtaatatctttccccattgcgctattgatatttggctggtgcctagataaaaaatgccactgggtaacgccactaataggaacagccctctttggatatgcagctatgatgacaattggtgctaccctttcctatttagtcgattcattgccgggaaagggtgccaccggtgttgctttgaataatttaataaggcaaatcttggctgcaaccgcagtttttgtcaccacacccatgttaaacggtatgggaactgggtgggctttcacaatgctggcctttatcgtcttgggtgctagtagtgtacttataatactgaaaaagcacggtgattactggagagagaactacgacttacaaaaattgtacgacaaaattgattaa

SEQ ID NO: 79228 - DNA, 444 bp, Saccharomyces pastorianus
atgctatttttcaaacagcaacctcacatcttcaacaatccaaaggtcaagacttccaagagaaccaagagatggtataagaatgccggtttgggattcaagaccccaaagaccgctattgaaggttcttacattgataagaaatgtccattcactggtttagtttccatccgtggtaagatcttgaccggtaccgtcgtctccaccaagatgcaccgtaccattgtcatcagaagagcttacttgcattacattccaaagtacaacagatacgaaaagagacacaagaacgtcccagtccacgtctccccagctttccgtgtccaagttggtgacattgttaccgttggtcaatgtagaccaatctccaagactgttagattcaacgtcgtcaaggtctctgctgctactggtaaggccaacaagcaatttgctaaattttaa

SEQ ID NO: 79229 - DNA, 2001 bp, Saccharomyces pastorianus
atgacgacgacgacaagaataagaaagatgcgggtgttggtgtggacgatgatcatcaatctatggcgatggctgccgtcgctgctgcttacactctatcgaaaaataacaataataataacagtatttgcgaacgatagcaattcgcgtaaaagacagcatgataacggaaataatcatgagaattcacagaaaaagcggaaaaacaataatgatgacgatgacagacaaattggaaacgtagatccggaattaaccaccttgggtgatgcagatgacaacgatactaataatgatgtgattgatcgtgatcaactggtccataaggccattatcgacgctgattcgattacccaacatcctgatttccagcaatacttgaatactgcggctgatactgacgataacgaaaaattaaagcatattaaagatcatttgatgcgtacacacggtttgaatcatcagaataagaatcacaatgatgatacagatgatttatcaaatagtacaaagcaatactctgaactgcagaaagactctatgctggatagttccctcaacaaatctagaaattatatggaagtcttgcccaaagttatctctcaagatactcaaccacaccaacaaaaatctccctctcatgataatgaagctggcagcgtggacaattcagaaatatctcaactacttcaatcagccgccacaaaggcatcatctttggtatctttatcctcatcctcagcaacgccatcgacttcaaggtctaacaatagcaaagcttttgataaagccgaagacgccgctttagaaagatttattaacgagtatgaggccattgaacgtttgactagacaacaagtttgtgagaggatatggagttccgacaggccaaaggacaacttttggaataatatttacaaagtcttaccctatagatctagctcctctatctacaaacacatgagaagaaaatatcacatttttgaacaacgtggtaaatggaccgcggaggaggaacaagagctagctaaattatgtgcagaaaaagaaggtcaatgggcagaaataggtaaaaccttaggcagaatgccagaagattgtagggatcgttggagaaactacgtaaaatgtggtaccaatagagcatcaaatagatggtccgttgaagaagaagagcttctgaaaaaggttatcagcgatatgctggaagaagcccagcaacaacagtctcaattacatccaaacttattggaagaagaacagcatttactgcaagatgaccagaatgatcatcgcaataacgatgaagacgatgatgatacagcttctgcagcagcagctgctgctgctgctattcaagaacaacaacaacttcttcaacaaaagcagcaagatgatgacgatgctattgccgctgctgccgctgctgcttcttcatccctgggagacaacaaagacgaagacaaaccccacgattcattaggtatacagctcgatgataattcccagaactcaatggtacctgctccatcagcaacaagcacacattctaaaagtttgtcaaatacaatcagacgtcacaataataaactgaggaaatctttgatgggtaacggtaagttagatttcaaagacatcattaactggaccattgtcagtgagcgtatgggcggtacgagatcacgtattcaatgtcgttataaatggaataaattggtcaaaagggaagcaattgccaaaattcagactgtaaaagatgatgatatgttatggatttttgaaaaattaagagatttaggtataacagaagattctcaagtagattgggatgaacttgcagctttgaagcctggcatgaaattaaatgggttagagttgaaattgtgctatgaaagaatgaagaaaaaggtcaaaggctataagcaaaaatcaatcaatgaaatcagtaaagagctagttgattattttagctccaatatttcaatgaaaacagaaaattaa

SEQ ID NO: 79230 - DNA, 573 bp, Saccharomyces pastorianus
atgccttcaggtcataacgataaaaacgcaaatcaagagtctgtggaagaggctgttttgaaatatgtcggcgtaggtctagatcaccagaaccatgaccctcaattgcatacgaaggatctggaaaacaaacactcgaaaaagcagaatattgtggaaagtagtagtgatgttgatgttaataacaatgatgacagtaatagaaacgaggataataatgatgattctgaaaatattagcgcattgaatgcgaacgaatcatcttcgaatgtggatcatgccaactccaatgaacaacataacgcagttatggattggtatttaaggcaaacagcgcataatcaacaaggcgacgaagatgacgaaaacaataataacactgacaacggcaatgacagtaataatcacttttctcaatctgacatagtcgtggatgacgacgacgacaagaataagaaagatgcgggtgttggtgtggacgatgatcatcaatctatggcgatggctgccgtcgctgctgcttacactctatcgaaaaataacaataataataacagtatttgcgaacgatag

SEQ ID NO: 79231 - DNA, 450 bp, Saccharomyces pastorianus
atgatcccttttgtcccgcctcctaatgtccccaagaaagataagagagaagtggatgaggtatcattgacttcaatgttatccatgggactaaatcccaacttatgtcgtaaagccttgatactcaacaacggagatgttaatcgtagtgttgaatgggtatttaacaacatggatgatgatggaacatttcccgaacctgaagtgccaaatgaagaacagcaacaaaaaaaggatcttggatattcgaccgctaaaccgtacgctttaactgcagttatttgtcataagggaaattctgtccattctggtcactatgttgtttttattcgtaaactagtggcagacaaatggaagtgggttctttataacgatgagaaactagttgctgccgacagcattgaagatatgaaaaaaaatggttatatttatttctatacaagatgctaa

SEQ ID NO: 79232 - DNA, 120 bp, Saccharomyces pastorianus
atggtaggcgtgcgcgccctatttaacaccggaaaccaagacgctgagagcgctatgaatggcgtattccagcatatggatgaccctgatttaaatgatcccttttgtcccgcctcctaa

SEQ ID NO: 79233 - DNA, 309 bp, Saccharomyces pastorianus
atggataaaggcaagagtgcaggctgtcctgatacttttgcagcctctttaccacgaatcaataaaaaaaagctcaaagcaactgacaactgctccatttgttacactaattatttagaagatgagtaccccttagtagttgaattacctcattgccatcataaattcgacttagagtgtttgtctgtctggctatctcgaagtacaacatgtccattatgcagagataatgttatgggccaccgaatcattaatgagattgatacaactgaagcagaactggaagaagattggggtatgtacggttaa

SEQ ID NO: 79234 - DNA, 171 bp, Saccharomyces pastorianus
ttcggtcatctttcaagacataacagaatccatacaggtgaaaaaaatcatatctgtccgcatgagggctgtggacagaggtttagtagacatgataactgtaatcagcattatcgaactcatgcaaacaagaagaaaagaaactggaagaggagggaggctagcagttga

SEQ ID NO: 79235 - DNA, 474 bp, Saccharomyces pastorianus
atgtccataggttacaaagacaacttgatgtcaactattctagctaaagataggaaatgtgaatttcccatcaatttcgaatgttcgccctcccagataactcttatgcctgaaatgttctcttttaacaatgaaaggaaataccaaaccctgatacccttgatgaaaacatcacatctaattgatgatgacttgaaagataaattgaataagtgcgctttcgattttttctccggaaaacaagcgaacagaacgagtgacgggactatttcaagattaacagcaagtggaaaaacgtcaccgatactgccattgcaaaatattaatattgtaaaagcagagaataccggtaacggtaaatcagatccatatggctcaattaaaataagcaaaccgacaaaaaccgtgataaaattgaaatctacgaaaaccaatacagcaggacagaggactcgtcatttctgtaagatctga

SEQ ID NO: 79236 - DNA, 813 bp, Saccharomyces pastorianus
atgatcctcattggattcaatgttccatataatgatgaccaactaatgggcgcaggcggatccgctacacatgcatctccctatgtcttagccgcttctattcacggtgtgaaaattgttccacatattatcaacgctgttattttgatttctgtggtttcagtggcaaattcctctttgtatgctggtccaagactgatttgctctttggcccaacaaggctacgcacccaagtttttagattacgttgacagagagggcaggcccttgagagctcttattgtgtgttgcgttttcggcgtcattgcttttgttgcagcttcatcaaaggaagagatcgtgtttacatggttagcagctatcgcaggcttgagtgaattattcacatggacttccataatgttgtcccatctgcgattcagacaagcaatgaaagtacagggaaggtctctagacgagttgggatacaaggccacaacagggatttggggttccatatacggtgtcttttttaatattttagtgtttgttgcccaattttgggtagcattggcccccttaggtaatgggggcaaatgcgatgcggaatccttctttcaaagttatttagcttttccaatatggttggccttttacttcggatatatggtttacaaccgtgattttacgctattaaatcccctcgacaagattgaccttgacttccacagacgcatttatgatccagagctaatgagacaagaggacgaagaaaataaagaaaaactaaggaatatgtctttgatgagaaaagcttatcatttctggtgttaa

SEQ ID NO: 79237 - DNA, 813 bp, Saccharomyces pastorianus
atgctatcttcagaagattttggatcttctgggaaaaaggaaacttctcctgattcgatatcgatacgttcctttagtgccgggaataatttccaatcatcatcaagtgagaaaacttattctaagcaaaaatccgggagtgacaaacttatacatagatttgcggattcattcaaaagagccgagggtagcactacaagaactaagcaaataaatgaaaatacgtctgatttagaggatggcgttgaatctatcacgtcggattccaagttgaaaaagtccatgaagtcgcgccatgttgtcatgatgtctttagggacaggtattgggactggtcttttggtagctaatgcaaaaggtctacattacggtggtcctgctgcgctagtaattggttacatcttggtttctttcgtgacgtacttcatgatccaagctgcaggtgagatggcggtaacctatccgactttaccagcaaatttcaacgcatactcctccatattcatttccaaatcatttggattcgccacagtatggctttactgtttccaatggctaacggttttgcctttagagttaataaccgcgtctatgactattcaattttggaatgataaaataaatccggacatttatattcttattttctatgttttcttagtattcattcatttcttcggtgtaaaagcctatggtgaaacggaattcatcttcaattgctgtaaaattttaatgattgcaggtttcattattctttctattgttatcaactgtggtggggccggaaatgacggttatatcggggccacttag

SEQ ID NO: 79238 - DNA, 2775 bp, Saccharomyces pastorianus
atgcagataccgaaatatgagaacaagccattcaaacctccaagaagggttggatcaaataaatacacacaactcaaaccaaccgccactgcagtcacaacagcccctatatctaaagccaaagttactgccaacttgaaaagaagcatttcggcgggacctaccttaaatcttgctaagaagccgaataatctgacctcaaatgaaaacactagatattttactatcatgtacaggaagcctactaccaaaaagcacaagacttggagtggtgatggctacgctaccttaaaagccaatagcgataagttatgcttttataacgaagcagggaaatttcttgggtcaagtatgctaccaagtgattcagattctctcttcgaaactcttttcaaagcaggctccaatgaagtacaattggattacgaattgaaggaaaatgcagaaatacgtagcgccaaagaagccttatcacaaaacatgggaaatcccagcccaccgaccacaagtacaacagaaacagtgccttctacgaagaatgacggtggcaaatatcaaatgcctctgtctcagctgttttcactaaacactgtgaaaagattcaaatcagtaacaaagcaaacaaatgaacacatgaccacagtacctaaaaccagtcaaaattccaaagccaaaaaatattatccagtatttgatgtcaacaaaatcgataatcctatagtaatgaacaaaaatgcagccgctgaagttgacgtaattgttgatccattactgggcaaattcttgcgccctcatcagagggaaggggtgaagttcatgtatgattgcttaatgggcttggcaagaccaactattgaaaatccggatattgattgtactactaaaagtttagtgttagaaaatgactcagatattagtggatgccttttggctgatgatatgggtttaggtaaaacactaatgagtataactttgatttggacattaattaggcaaactccttttgcatcaaaagtttcatgttcgcaatcaggcataccattaactggactttgtaagaagattttagtcgtttgtcccgttactttaataggaaattggaaaagagaatttggaaaatggttaaatttgtcaagaataggtgttttgacattaagctcaaggaattctcctgatatggataaaatggctgtcagaaattttttaaaagtgcaacgaacttatcaagtcttgattattggctacgaaaaactcttgagtgtttctgaagaattagagaaaaataaacatttgattgacatgctggtgtgtgacgaaggccatcgactaaaaaacggggcttctaaaattttaaatacgctgaagagtttagacataagaaggaagcttttgcttacgggaactcctatacaaaatgatcttaatgagtttttcagtattatagatttcataaacccaggaatccttggaagcttcgcttctttcaaaagaagattcattatccctataactagagccagagacactgcaaacagatacaacgaagaattgttggaaaagggggaagaaaggtcaaaagagatgatagaaattacgaaaagatttattttgagacgaacaaatgcgattttagaaaagtaccttcctccaaagacggatataattttattctgtaaaccatacagccaacagatattggcattcaaagatattttgcagggcgcacgtttagattttggacaattgacgttcagttcttcgctaggactgataacattactgaaaaaggtttgtaactctcctggattggttggctcagatccctattacaaatcacatataaaggatacccaatctcaggacagctatagtcgttctttgaactctggtaagttaaaggtattaatgacattactagaaggtattaggaagggtaccaaggagaaggtcgtcgtagtgtctaactacactcaaacattggatataattgaaaatttgatgaatatggctgggatgtcacattgcagactcgacggttccatacctgctaaacaaagggactctatcgtcacatctttcaatcggaatccagccatatttggattcttgttgagtgcaaaatcgggaggtgtaggattgaatctagtcggtgcttcgcgacttattttatttgataatgattggaatccttcagtagatttgcaagcgatgtcacgaattcatagagatggccaaaaaaagccgtgcttcatatatagacttgtcacaactgggtgtatcgatgagaaaatattgcaaaggcaattaatgaagaacagtttgagccaaaaatttctaggtgactcagagatgagaaataaagaatcttctaatgatgatcttttcaataaagaggacttgaaggacctgttttctgtccatacagataccaagagtaacacacatgacttaatttgttcttgcgatggtttaggtgaggaaattgaatatcctgaaacaaaccaacagcagaacactgtagagctgagaaagcgtagcactacgacatggactagtgcgctggatttacaaaagaaaatgaatgaagcagccaccaacgatgatgccaaaaagtcacaatacattaggcaatgtctcgttcattataagcatatcgatccagcaagacaagatgaattatttgatgaggttatcacagattcgttcaccgacttgaaagatagtattacctttgcagttgtaaagcccggcgagatatgtctcagagaacaatga

SEQ ID NO: 79239 - DNA, 594 bp, Saccharomyces pastorianus
atgtatgatggaatgcaacctaatttattgagcacgaatggaaatacgaacatcagcagtatggtcaaggttcatgttttacataataaccgaaactcaacagagagatctccttacgaaccaatagttgcagagttacttttggaggtgaaggagaacagggcttgcactttaacttttgaaagtagacatcaggcgaagtcacctgtcagagaaatcacggtatatcaaaagaaaaattcggccccacagaaagctaatatcacgaagacgatcaagtctgcttctggcataaacgaactgcaattgcataaacttgatttcgatcaggaaacttaccatatcggagtccagtggtttccaaaacttttgacggatggaaatgtagaggatgacaagttggggacaaaagacgaactgtctgtttctattagctgttattggggagaatatgattcggaatcggttgtaaatggtaccgctgttaggaaaattccagcatttgatgaattgataaattacgcacctctaagtttttcctttaccaacgaacagaaaggattagttattgtcaaggatgctataattttataa

SEQ ID NO: 79240 - DNA, 1857 bp, Saccharomyces pastorianus
atgggtgtagtgtctttactagcgaacctcaagtaccatataaagcacagaccgaacaggactttaattttcaactttaataataatgaagagtttggcctactaggtgcatcaacttattttgatcactcatggtctaatttaaccaagtatgtgataaatttagagggaactggtgctggtggtaaagctgtactgttccgaacttcagatacttcaacagcaagaatataccaacagtctgttaaggaaaatccatttggtaactctatctaccagcaaggtttttatagcagatatgtcaggagtgagacagactacaagatttacgaagaaaatggcatgagaggctgggatgtcgcattctacaaaccgagaaacctttatcataccataaaggattcaatacaatatacctccaaggcatctttatggcatatgctacatacttccttacaattaagtgcatatgtggcttctaattcattggatacagctgaccaaacgccggcttgttattttgattttatcggtttgaagtttttcgttataagcgctaaaacgcttttctattggaactgcatatttctattagtttcacccgttgtggccattggcttgtatttaatttctcgtgatagaatgacttggaaatcttattcatggctatcgtggacacgctttcctctttcattagccgctggtattattgtccaaaagcttttctctaacgacataattcgttccaatcctttgacgttctcaaggaactacttttggcctatctcggcttttttcactcaagtaatttttaccagttatgttctgattaattgctccaatttttttttcccctgtgccgatatgaaaagcctatcaattatcgaattgttcattattttatggaccattttactttttacgtcgaagttattgtatagttccgactataggtataccgggctttatcctctctcgattttctttcttctgagcacaatagctgctatattgagactacttgcactagcgttgggaatgagaacaaggaagaggcttggtagagaatgtagggaccatcactccaattacagctcccattctcaaatagatatggaacgagacggtcaggaaaacttggaacaaccccaagatcaacttacatcgtcacaagacgatcaagcaagtatccaagatgataatgtgtcaactacttcagctggcccatcacataatgttgacgaggatcatggtatggattcatcgtcacaacaacatgatgaaagggtaccattactgaaggggtctaatagcatggaggaaggattgagtactagagaaaattctctaaaacttgagtataccgattatgcctggatcattcaatttttgctaattgtaccaataccatcatttattttgtttaacagtgtggatgttatcatggacgcactaaaccatactgtccaggaaggaagtaaggctacatttgatgtactcaggttcggaatggtgggcagtattttgatcgcgctaccaattttaccttttttctataaggtcaactatatcacaatttctttaactgcactgcttttcttgatttccgcatccaaaacgctcctagtgcacccctttaccaatagtaacccattaaaagtaaggttttctcaaaatattgatttgtctcaagggaacgctgccagtgtacatgtccttggaagagaaggaaattttttaaaacctatgctgcaagatttaccaagtataaaatatagctctacacatattaactgtacttccgtaaccaatggaatggaacttgtatgtatgatggaatgcaacctaatttattga

SEQ ID NO: 79241 - DNA, 264 bp, Saccharomyces pastorianus
atgcctccaatgctcaagctaacgtttcagcttccgctagctcttcttcctcttcttctaagaagtctaagggtgctgctccagaactggttccagccacttcattcatgggtgtcgttgctactgttgccgttgccttactataagattaaagcaacaatttgtgtttctattattactttaatttcttctctaatgatttctttaccattccttttttattatgaggcggttggttcatcactgaattttatatgtagataa

SEQ ID NO: 79242 - DNA, 984 bp, Saccharomyces pastorianus
atgcaagaattgatcattttgaccagtgcttctttcggttctttgcaagaagtagactccattaacatggtgactttgcctgccatttctaccttctccaccgatttacaaaatgctaacaacattattgtttctgacaccactttggaaagtgtcgaaggtttctccactttgaagaaggttaatgtctttaacatcaacaacaacagatatctaaactctttccaatcttccttggaaagtgtctctgactctttacaattctcttccaacggtgacaacactactttggccttcgataatttggtctgggctaacaacatcactttgagagatgttaactctatttctttcggtagtttgcaaactgttaacgcttccttaggtttcattaacaacactttgccaagtttgaacttgacccaattgagcaaggttggtcaatctttgtctatcgtctccaacgatgaattatccaaggccgctttcagtaacttgactactgttggtggtggtttcatcattgctaacaacacacaattgaaggtcattgacggttttaacaaggttcaaactgttggtggtgccattgaagttactggtaacttctcaaccttagacttatcttctttgaagtctgttagaggtggtgctaacttcgactcttcttctagtaacttctcctgtaacgctttgaagaagttgcaaagtaacggtgctattcaaggtgactcttttgtttgcaagaacggtgccacatctacctccgttaagctatcctctacttctactgaatcatccaagagctctgctacatcttccgcttcttctagtggtgatgcctccaatgctcaagctaacgtttcagcttccgctagctcttcttcctcttcttctaagaagtctaagggtgctgctccagaactggttccagccacttcattcatgggtgtcgttgctactgttgccgttgccttactataa

SEQ ID NO: 79243 - DNA, 471 bp, Saccharomyces pastorianus
atgctggatgctggttcattctggaatactctacttcccctattacaaaaagattatgaacgttccaaggcctatatagcaaagcaaagcaagtcatctgcaaatgataaagcctcaatcacttccacagaagaccattctttcgctttactagaagaggatcagtttgtctcaaagaaaaccgcaacgaaggcaagattacctcctactggtaagataagtaccacatacaaaaagaaaccgatcgcaagcgcgtttatacttccagaagaagacttggaaaacgacgtaaaagcggatccaacaacaattgtaaacgccaaagtgggtgcagaaaatgatggagattcttccttatttttgcgaacgcctcaacctttagatcctttggatatggatgatgcttttgatgataccaatatgggcagcaatagttcatttagcttgagccttcctcgccttaatcaataa

SEQ ID NO: 79244 - DNA, 1641 bp, Saccharomyces pastorianus
atgactgaaagaataccaataaagaattatcaaagaacaaatgccaaagctttacttaaattgactgaaaaactttttaacaagaacttttttgatctctatttaacctctcagcaattggtcgttcttgaatacctgctgtcgatttcaagtgaagaagacaaactgaaagcatgggactatttcttaaagggaaacatagcattaaatgtcgaaaaatcatttccattaacccaagaagaagaacatcacggagcggtctctcctgccgttggcacacgatcagatgatgtatcatcacaaacaattaaggacaataacaatactaataccaacaccagtatcagcaatgaaaatcatgttgaaaatgaaattgaagataaaggcgataacgcaatagcaaatgaagataattttgtgaataatgacgaaagtgataatgttgaagaagacttattcaaattagatctagaggacttgaagcagcaaataagcggaacaaggtttattggaaacttatccttgaaaatcagatacgtcttgtggcagtgcgccatagattatatatactgtgatcgtaatgagtttggtgatgaaaatgatacagaatacaccctattagatgttgaagagaaggaggaagaggaaattggtaaaaatgagaagccacaaaacaaagaaggtatttcgaagttcgccgaggatgaagattacgacgaagaagacgagaactatgatgaagacagtacagacataaaaaatgtcgatgatcctccaaaaaatctcgattctatttcctcttctaatatcgaaattgacgatgaacgacgcttggtgctaaatatctcaatatcaaaagaaacactgtcaaagttaaaaacaaataatgtagaagaaattatgggaaattggaacaaaatttaccacagttttgaatacgataaagaaactatgataaagcgattaaaacttgaagaaagcgataaaatgatagagaaaggaaagaagaaacgaagtcgaagtgatttagaagcagctaccgatgaacaagatcgcgaaaatacaaatgatgagccagatactaatcaaaaattgcccactcctgaaggttcaacattcagcgatactgggaacaagcgccccaaacaaaataatatagatttaacagtcaatctaggcatcgaaaatttatcattaaagcaccttctatcatctatccagcaaaaaaaatcccaattaggaatatcagattacgaattaaaacatctgattatggatgtcagaaaaaatcggtcaaaatggacatcggatgaaagaattgggcaagaggaattatacgaagcctgtgaaaaggttgttttggaacttagaaactacactgagcattctacaccatttctgaataaagtgagcaaaagagaagcccccaattatcatcaaatcatcaaaaagtctatggacctgaatactgttttaaaaaaactgaaaagctttcaatatgactccaaacaagaatttgtagacgatattatgctaatatggaaaaattgtttgacctataattcagatccttcacattttttgagagggcatgctatgctatgcagaagaatctcttcagtgattcgggatcctctagag

SEQ ID NO: 79245 - DNA, 456 bp, Saccharomyces pastorianus
atggttgaggaaagtagtaagactgaggatgcatcaaaagatgctgatgctgccaaaaaggatacggaagacggactacaagataaaactgcagaaaataaggaggctggggaaaataatgaagaggaagaggatgatgatgacgaagatgaagacgaagacatggtcgactcccaatcttatttacttgaaaaggatgacgatagagacgatttggaaatatccgtgtggaaaactgtaactgccaaagttcgtgcggaaatttgcttaaaaagaactgaatattttaaaaatggaaaattaaatagtgattcagaggcgtttttgaaaaacccacaaagaatgaaaaggttcgaccagctttttcttgaatataaagagcagaaagctttagaatcatatcgtcaaaaaatagagcaaaattccattatgaaaaatggcttggaacagtactaa

SEQ ID NO: 79246 - DNA, 468 bp, Saccharomyces pastorianus
atgcagtttcataatgatcactctttaaatggaaatgaagcttttgaaaagcaacccaatgatattgagttagatgataccagattcctacaggaatatgatattagtaacgccattcctgacatagtatacgagggagtaaatactaaaacattagacaagatggaagacgcttccgtggaccgcatgcttcaaaatggtatcaacaaacaaagcagatttctggctaacaaggatttaggactaacacctaaaatgaaccaaaatatcacactgattcagcaaattaggcacatatgccataaaatatccctgatcagaatgttacagagccctttatcggctcaaaactccagaagcaatcccaacgctttccttaacaaccacatttataattacactattattgatgactcactcgatattgatccggtgtcacagcttccaacgcatgatcactccggctag

SEQ ID NO: 79247 - DNA, 255 bp, Saccharomyces pastorianus
atggccaaagggttagaaactgcccatccatcagcaataaacatgcttactgaaatcgccggggataaccaatctaatctgataaagactttgaagcttcatcatgaaactaactccttaaatagaggaacaaatgtggaaatgatgcagacaacactgttggataacggtatgaacaggccagacgatctattgtcctatgtagaatctgaatttggtaaaaaaactaagaacttcaggactatcaaacagtaa

SEQ ID NO: 79248 - DNA, 333 bp, Saccharomyces pastorianus
atgggacctgccgattccccatatgccggcggtgttttcttcttgtctatccatttcccaaccgactacccattcaagccaccaaagatctccttcacaaccaagatatatcatccaaatatcaatgccaatggtaacatctgtctggacatcctaaaggatcaatggtctcccgctctaactctatcgaaggtcctattatccatctgttctttgttaacagacgctaatcctgacgatcctttagtaccagaaatcgctcatatctacaagactgacagacccaagtacgaagctacagccagagaatggacaaagaaatatgctgtataa

SEQ ID NO: 79249 - DNA, 3414 bp, Saccharomyces pastorianus
atgacaacaagcacaccgatatcagataacacttgcaccaatagtaccttggaagacaatgtaaaacttttagatgaaactacggaaaaaatatacagagatttttcccaaatatgtcattgtttggactttcctttaataaaagacgggggtgagattggttcagaccccccaattttggaatcttacaaaatagagatagaaattagtcggtttttaaacacaaacttatatttcccccaaaattaccatttagtcttacagcagtttaccaaagtatccgaaaaggtaaaatcagttaaagaggaatgtgccttactctttatctcttatttgtctcatagtataagaagtattgtttcgactgctacgaaacttaaaaatttagaactattagcagtatttgcacaattcgtttctgatgaaaataaaattgatcgagtcgtaccttatttcgtatgttgttttgaagatagtgaccaggacgtccaggccctatctttgttaacattaatccaggtactcacctctgtaagaaaattgaatcaattgaacgagaatatatttgtggactacttacttccgagactgaaaagattacttatttccaataggcagaataccaattatttaaggattgtgtttgctaattgtttgagcgacttggccattatcattaatagatttcaagaatttacatttgctcagcactgcaatgataactcaatggataacaacacggaaatcatggaaagcagtaccaagtattcagcaaaattgatccaaagtgtcgaagatttaactgtctcttttttaacagataatgatacttatgtaaagatggcacttttgcaaaacattcttccactttgtaaattttttggtagggaaagaacaaacgatattatactgagtcatttaataacctaccttaatgataaggacccagcattgcgagtttccttaattcaaacaatatccggaatatcaattcttttgggtaccgttacattagaacagtatattttaccattgttaatccagaccatcactgattcggaagaattagtagtgatcagtgttttacaaagcttaaaatctttgttcaagactgggttgattaggaaaaaatattatattgatatatcaaaaacaacatctcccttgttgttgcatcctaataattggataagacagtttactttgatgataattatagaaattattaataagttatcaaaagccgaagtgtactgcattctctatccaataataaggcctttcttcgaatttgacgttgagttcaacttcaaatcaatgataagctgttgcaagcaaccagtgtcaagatcggtttacaatctattgtgtagttggtctgttagagcgtcaaaatctttattttggaaaaaaatcatcacaaatcatgtagattcattcggaaataatagaatcgaatttataacaaaaaattactcaagtaaaaattatggatttaataaaagagatacgaaatcaagttcctcgctgaagggtattaaaacatcatccaccgtctattcacatgacaacaaggaaattcccttaactgctgaagacagaaattggattgataagttccacattattgggctaacagaaaaagatatttggaaaattgtggctttgaggggttatgtaataaggacagcgagagttatggcagcgaaccctgattttccatataataatagtaattaccgtccattagtacagaactcaccacctaacctaaaccttacgaatattatgccaagaaacattttctttgatgtagagtttgctgaagagtcgacaagtgagggacaagattctaacttagagaaccaacagatatataaatatgatgaaagtgagaaagatagcaataagctaaatattaacggtagcaaacagctatctaccgtcatggacataaatggatcactaatattcaaaaataagtccattgccactactacttctaatttgaagaacgtttttgttcagttagaaccaacgtcctatcacatgcattctccaaatcatggcttgaaagataatgcaaatgttaaaccagaaaggaaggtagtcgtcagcaacagctatgaaggcgacgttgaaagcatagaaaaattcctatcgactttcaaaattttacctcctctgagagattataaggagtttgggcctattcaagagattgtacggagtccaaacatgggtaatttgaggggcaagttgatagctactttgatggaaaacgaacccaattctattacgtcttctgctgtttctccaggagaaataccctatttaataacaggttcagatcaaggtgtaatcaagatttggaacctgaaagagattatcgtgggcgaggtttactcttcttctttaacttatgactgctcctctaccgtaactcagataaccatgattcctaactttgacgcgtttgccgtttccagtaaagatggacaaataattgtattaaaggttaatcattaccaacaagaaagtgaagtcaaatttttgaattgcgaatgcatcaggaaaattaacttgaagaattttggtaaaaatgaatacgcagtgagaatgagagcatttgtgaatgaggaaaaatctctactagtagcattgacgaatttgtcaagggttattatatttgatattagaaccctggagaggttacaaattatagagaattctccaaggcatggtgccgtttcaagcatctgtatcgatgaagagtgttgtgtcctaattttggggacgactagaggtattattgatatatgggatatccgtttcaacgtgctgataaggagttggtcctttggggaccacgcaccaatcacgcatgtggaggtttgtcagttttatggaaagaattctgtaattgttgtaggaggtagttcaaaaacatttctaacaatatggaattttgttaaggggcattgtcagtatgctttcataaattctgatgaacagccatctatggagcactttttaccaattgagaaaggcttagaagaattaaatttttgtggaatcaggtctttaaacgcactaagcactatctcagtatctaatgataaaattcttcttaccgatgaagcaacaagttccattgttatgtttagcctaaatgagctttcttcttctaaagcagtaataagtccttcaagattcagtgacgtttttattcctacacaagttacggcaaatctcacaatgttattgagaaaaatgaaacgtactagcactcattcagtagatgattctctatatcatcatgatattataaattctatatctacatgtgaagttgatgagacacctttgctggttgcttgtgataactcagggcttattggaatcttccaataa

SEQ ID NO: 79250 - DNA, 870 bp, Saccharomyces pastorianus
atgggggcacaattatcactagtggtccaagcatcaccttccatagccattttttcatatatcgatgtcttagaggaagtacactacgtttcacagttaaactcatcaagattcttaaaaacatgcaaggcactggaccctaacggcgaaattgttatcaaagtgtttattaaaccaaaagaccaatatagcttacgaccttttctccaacgtataagggctcaatcgtttaagttgggacaactaccgcacgttttaaactacagtaaattgatcgagacaaatagagccggctacatgatacggcagcacttaaaaaataatttatatgacagattgagtttgagaccttacttacaagacattgaactgaaattcattgctttccagttgttaaatgcattaaaggacattcataatctgaatattgtccatggtgatataaagacagaaaatatcctagtaacaagttggaattggtgtatattgacagattttgctgcatttatcaaacccgtatatttgcctgaagataatccaggtgaatttttattctacttcgacacctcgaagagaagaacctgttatctagccccggagaggtttaactctaaactttaccaagatggaaaatctaacaatggtaggctaactaaagaaatggacatatttagtcttggatgtgttattgcagaaatatttgctgaaggaagacccatcttcaacttatcacagctattcaaatataaaagtaattcatatgacgtaaacagggaatttctcatggaggaaatgaattctactgatttaaggaacttggttctagacatgattcagacctgcaggcatgcaagcttgcactgccgtcgt

SEQ ID NO: 79251 - DNA, 1353 bp, Saccharomyces pastorianus
atggcaaaaagagtatacaataaaggtgaagacgagcaagtacaccttccgaaaggaaagaagagaaccatagcgttatcaagaacactaatcaacagcaccaaactacctgatacagtagaactaaatctttctaaatttctcgattcctcagatagtattactactgatgtactttcaacccctgcaaaggggtctaacatagtaaggacaggtagtcaaccaatctttagcaacgctaattgttttcaggaagcaaaacgctcgaaaacattaacggctgaggatcccaaatgtactaaaaatactgccagagaggtatcacaactagagaattatattgcctatgggcaatactatactagagaagactcaaaaaacaaaatacgacacttgttaaaagaaaacaaaaatgcttttaagcgagttaaccagatatatcgagataatataaaagcacgctctcaaatgattatagagttttcgcctagccttctccagttatttaaaaaaggagacagtgatctgcaacaacaattggcaccagcagttgtgcaatcaagctataacgattctatgccgcttttaagatttcttcgaaaatgtgacagtatttacgactttagtaacgatttctattacccctgtgatcccaaaatagttgaagaaaacgttttgattctatattatgatgcgcaagaattttttgaacaatacacttcacaaaagaaagaattatataggaagatacgatttttctcaaagaatggaaaacatgtgattcttatactaagcgatataaataaactcaaaagagctattttccaattagaaaatgaaaagtacaaagctagggtagaacaacgattgtcaggaacagaagaagctttaagaccgagaagtaaaaaatcaagccaagttggaaaattagggataaaaaaatttgatttagagcaacgattgcgcttcattgatagagaatggcatgtcaaaatacatactgtaaattcacatatggagtttattaattctctgccgaacctagtgtcattaattggaaaacagcgcatggatcccgcaattcggtatatgaaatatgctcatttgaatgtaaaatccgctcaggatagtacagaaacgctaaagaaaacctttcatcagatagggagaatgcctgaaatgaaggcgaataatgtcgtgagcctataccccagttttcaatcattacttgaagatattgaaaagggaagactgcaatcagacaacgaaggtaaatacttgatgactgaggcagtagaaaaaagactgtacaaactgtttacttgtactgatccaaatgatactattgaatga

SEQ ID NO: 79252 - DNA, 651 bp, Saccharomyces pastorianus
  modified_base (642)..(642): a, c, g, t, unknown, or other
atgagccagatcgttgattttgttgaggacaaagattcaagaaacgatgccagtattcagatcatcgatggaccctcaaatgttgaaattatcgctctctcggaatcaatggatcaagatgagtgcaaaagggcacatgtaagctctgcagagatgattccatcatcaccgcaaagaaaatctgtttcgaatgatgttgagaatgttgacctaaacaaatctatcgaactttctgcgccgttcttccaagatatcagtataagcaagctagatgacttttctacaacagtaaattccatcatagattcgtctctcagaaatgagaataatgcaaaaggaaacgcgaaaaaacttttggatgatctaataagtgatgaatggtcagctgatcttgagtcgagtggaaagaagcacaacaaatcacaatacaatttgagggacatcgcagagaaatggggagtacagtctttaaaaaatccagagcctattgctgttgactgcgaatataagacacaacgaatcggaaataccaatagtgacattagtgatagtccgaaatcacagataggagcagctgatatactgttcgattttccactgtctccagtaaaacatgagaacccaactgaagaaaagcacaanttcgatgct

SEQ ID NO: 79253 - DNA, 174 bp, Saccharomyces pastorianus
atggggaaaagaggtaacgggaatacgcctctggttcaaagactagtgacgttgtcgtatttggctttgttgattctagtcctctcaattgaactcctgacgtggtttgtaaaaaaacagagaacaggaaacaaaaaacaaaaagacaaagaaaaaaatgcgcttttgctttga

SEQ ID NO: 79254 - DNA, 1293 bp, Saccharomyces pastorianus
atgtattctttgatcaggttcttaaatatcaatcctttcacaaagtacttttgtaccaagtgtgattgcgcttcgaaggactggaaatttacggatcgcatgcattgtgaccattgtagtcacgtcattatgcaacacacgaatttcttcaaccatttcatgttgaagaacattcagaaatttggtgtggaaggtcctggtttagagtcttttaataacattcagacattattgaaaaacatcatgctgcgaagaactaaagtggaaagagcggatgacttgggtctaccgcccagaattgttaccgtgaggagagacttcttcaatgaagaggaaaaagatctttacagaagtttatacacagattctaaaaggaagtataattcctttgttgaggagggtgttgttctaaacaattatgcaaacattttcaccctaatcacaagaatgaggcaactggcagatcatcctgatttagttttgaaaagattaaacaattttcctggcgatgatatcggcgtcgtgatctgccaattatgtaatgatgaagctgaggagcccattgaatctaaatgtcaccataagttctgtcgtttatgcatcaaagaatatgtggaatctttcatggaaaacaacaataaacttacttgtcctgtttgtcatatcgggctaagtatcgatttgtctcaacctgctttggaagtggaccttgattccttcaaaaagcaaagtattgttagccgtctaaacatgagtggcaagtggcaatcatcaacgaaaatcgaagcacttgtggaagaactatacaaactgagaagcaacaagagaacgattaaatccattgtgttttcccagtttaccagtatgctggatctggtagagtggagattgaaaagagctggatttcaaacagtgaagcttcagggtagtatgtcaccgacgcaaagagatgaaaccatcaagtatttcatgaacaacattcaatgcgaggttttcttggtcagtttaaaggcgggtggtgttgctttgaatctttgtgaagcttcacaagtattcattttagacccatggtggaaccctagtgttgaatggcaaagtggtgatagagttcatagaattggtcagtatcgacctgtgaagatcacaaggttttgcattgaggatagtatagaagcaagaatcatcgaattacaggaaaaaaaggcaaatatgattcatgctacaataaaccaagatgaagctgccatcagcagactaacgccagctgatttacagttcttattcaataactaa

SEQ ID NO: 79255 - DNA, 891 bp, Saccharomyces pastorianus
atgcaagaagggggctttatccgtagaaggcgtacgagaagtacgaaaaaaagtgttaattataatgaactaagcgatgacgatacagctgtgaaaaactcaaaaactctgcagctgaaagggaacagcgaaaacgtaaatgacagccaagatgaagaataccgtgatgatgctacgctcgtgaaatcacccgacgacgatgacaaagattttatcatagacctaacaggttcagataaagagcggaccgccaccgatgagaatactcatgcgatcaagaatgataatgacgagataatagaaatcaaggaggaacgtgatgtttcggatgatgacgaaccgttaacaaagaaaaggaagacaactgctaggaagaagaagaaaaaaacgagcaccaagaaaaagtcaccgaaggtaaccccatatgaaagaaacactttgcgattatatgagcatcatcctgaactaaggaatgttttcacggatttgaaaaatgcacctccctatgtcccccaaagatccaagcagccggatggtatgaccatcaaactgctacctttccagttagaaggtcttcattggctaatatctcaagaggagagcatttatgcgggcggtgttttggcagacgaaatgggtatgggtaagaccatccaaactattgccctattaatgaacgatttgactaagtctccgtctttagttgttgcccctaccgtggcgctgatgcagtggaaaaacgaaatagaacaacatacaaagggacaactgaaaatatacatttatcacggtgcttccagaaccacggatatcaaagatttgcaaggctacgatgttgtactaaccacttacgcagtgctggaatcggtatcagaaagcaaactacgggtt

SEQ ID NO: 79256 - DNA, 786 bp, Saccharomyces pastorianus
atgggtgccattatgaacggtatctctgcctttggtgcaaactacaagccttacggtggtacctttttgaacttcgtctcttatgctgcaggagccgttaggttagccgccttgtctggtaatccagtcatttgggttgcaacacatgactctatcgggcttggtgaggatggtccaacgcaccaacctattgaaactctggctcacttgagggctattccaaacatgcatgtatggagacctgctgatggtaacgaaacttctgctgcgtattattctgctatcaaatctggtcgaacaccatctgttgtggctttatcacgacagaatcttcctcaattggagcattcctcttttgaaaaagccttgaagggtggctatgtgatccatgacgtggagaatcctgatattatcctggtgtcaacaggatcagaagtctccatttctatagatgcagccaaaaaattgtacgatactaaaaaaatcaaagcaagagttgtttccctgccagacttttatacttttgacaggcaaagtgaagaatacagattctctgttctaccagacggtgttccgatcatgtcctttgaagtattggctacttcaagctggggtaagtatgctcatcaatcgttcggactcgacgaatttggtcgttcaggcaaggggcctgaaatttacaaattgttcgatttcacagcggacggtgttgcgtcaagggctgaaaagacaatcaattactacaaaggaaagcagttgctttctcctatgggaagagctttctaa

SEQ ID NO: 79257 - DNA, 960 bp, Saccharomyces pastorianus
atggcacagttctccgacattgataaacttgcggtttccactttaagattactttccgttgaccaggtggaaagcgcacaatctggccacccaggtgcaccattaggattggcaccagttgcccatgtaattttcaagcaactgcgctgtaaccctaacaatgaacattgggtcaatagagacaggtttgttctgtcgaacggtcactcatgcgctcttctgtactcaatgctccatctattaggatacgattactctatcgaggacttgagacaatttagacaagtaaactcaaggacaccgggtcatccagaattccactcagcgggagtggaaatcacttccggtccgctaggccagggtatctcaaatgctgttggtatggcaatagcgcaggccaactttgccgccacttataacgaggatggctttcccatttccgattcatatacatttgctattgtaggggatggttgcttacaagagggtgtttcttcggagacctcttccttagcgggacatctgcaattgggtaacttgattacgttttatgacagtaatagcatttccattgacggaaagacctcgtactcgttcgacgaagatgttttgaagcgatacgaggcatatggttgggaagtcatggaagtcgataaaggagacgacgatatggaatccatttctagcgctttggaaaaggcaaaactatcgaaggataagccaaccataatcaaggtaactactacaattggatttgggtccctacaacagggtactgctggtgttcatgggtccgctttgaaggcagatgatgttaaacagttgaagaagaggtgggggtttgacccaaataaatcatttgtagtacctcaagaggtgtacgattactataagaagactgttgtggaacccggtcaaaaacttaatgaggaatgggataggatgtttgaagaatactaa

SEQ ID NO: 79258 - DNA, 906 bp, Saccharomyces pastorianus
atgaccaataaaaacagactgtactttcaaaatttacccagtaggccagcaaataaagaaaattataccagattacttctgaaacacattaatcccaacaacaagtatgccattaatctgtcgctaccccttccccacaataaattacaaatatcatcacaaccgctgatgttactagatgatcaaatgggccttcttgaagtttctgtttcaagatcatcaaagatgactaaccaagcatttttaacgtttgtcactcaagaagaggcagaccggtttctagaaaaatacacgacaacagcattaaaagttcaaggtcgtaaagttagaatggaaaaggctcgaacaaattcgttattgggtctttcaatagaaatgcaaaaaaaaaaaggtaatgacgaaacgtacaaccttgatataaagaaggtgcttaaagcaaggaaacttaaacgcaagttacgtagtgatgatatatgcgccaaaaagttcaggcttaaaaggcaaataagacgcctgaagcataagctgagatcaagaaaggtagaggaggctgagattgataggattgtaaaagaatttgaaacccgtagattggaaaacatgaagtctcagcaagaaaatctaaaacaatcgcagaaacctcttaagcggactaaggtgtccaatacaatggaaaatccaccgaacaaagtccttcttatacaaaatttgccaagcggcactactgagcaactattgtcgcaaatacttggcaatgaggctttagttgaaatcagattagttagcgttcgtaacctagctttcgtggaatacgagaccattgctgatgctacgaaaatcaagaatcagttaggctccacttacaagctacaaaacaatgacgttaccataggatttgctaagtag

SEQ ID NO: 79259 - DNA, 156 bp, Saccharomyces pastorianus
atgaataataaattcagaaactattacgatattggcgataagctctataaacctgcaggaaatccccaatattatcaacggttaataaatgccgttgacggtaagaaaaaggaaagcttatttactgcaatgagaactgtattatttggtaaataa

SEQ ID NO: 79260 - DNA, 186 bp, Saccharomyces pastorianus
atgtcttcttcccaggtcgtcagggattctgccaaaaaattagttaatttactggaaaaatatccaaaggatcgtatacaccacttggtctcattcagggatgtacaaatagcaagatttagacgtgtagcgggtctgccaaatgtagatgacaaaggacaatctataaaagagaaaaacctcatt

SEQ ID NO: 79261 - DNA, 534 bp, Saccharomyces pastorianus
atgttgaagtctatatttgcgaagcgatttgcttccacagggtcatatcctggttctacaagaattactttgccaagaaggcctgcaaaaaaaattcaactggggaagtcacgaccggctatttatcaccaattcaatgtcaaaatggagttgagtgatggaagtgtagttatccggagatcccaatatccaaagggtgaaattagattaattcaagaccagagaaataatccgctgtggaatcctagcagggatgacctagtcgttgtggacgctaattctggtggtagcttggacagatttaacaagaggtatagctctttgttttctgtcgattcaacgaccccaaattcaagctctgaaacagttgaactatctgaagaaaataaaaagaaaacacagattaaaaaggaggagaaggaagacgtttctgaaaaagcgttcggtatggatgactatctatctctgttagacgatagtgaacaacagatcaaatcaggtaagttggccagtaagaagagagacaagaagtga

SEQ ID NO: 79262 - DNA, 906 bp, Saccharomyces pastorianus
atgaagatagcgctagcactcatatcttatcgtttcacaatggggccttggagaaatacatacatcaaatttggtatagaccccagaagttcagtggaatacgcccaatatcaaacagaatattttaagattgaaaggaaattactatcttctcccatagtgaaaaagaatgtaccaaagccaccacccctggtattcgaatcagacactccaggcggtattgacagcaggttcaaatttgatggaaaaaggataccgtggtacctgatgttgcagattgatttattaattggtgagccaaacattgcagaagtttttcacaacgtcgaatatttagataaggcgaatgaactaactggatggttcaaagaattagacttggtcaagatacgaaggatagtaaaatacgaacttggttgcatggttcaaggaaattatgagtataataaatacaagttgaagtatttcaagacaatgttatttgttaaagaatccatggtacccgaaaacaagaactcagaagagggaatgggtgttaaagccaataaagatgctgatggggacataaatatggatgcaggtagtcaaatgtcctcaaatgccatagaggaggataagggtatcgctgctggtgatgattttgatgataatggcgccataactgaagagccagacgacgctgctttggaaaatgaagagatggacactgatcagaacttgaaggtgcctgcaagtatagacgatgacgtggatgacgttgatgcagatgaagaagaacaagaaagttttgatgttaaaacagcgagcttccaagatatcataaataaaatagctaaactagatcctaaaaccgcggaaacaatgaaaagcgagctcaagggatttgttgatgaagtcgatctgtaa

SEQ ID NO: 79263 - DNA, 822 bp, Saccharomyces pastorianus
atgccagtggaggagcctcttgctacactttcatcaattccagattctagcgcggaccaggccccaccgttaatagcagatgaatttacgttagacctgcccagaattccaagtttagaattgccacttaatgtctccacaaaacactctagtatacagaaggctataaaaatgtgtgggggcatcgaaaaagtgaaagaagcctttaaagaacatggacctatcgaatctcagcacggattacaactgtacttaaacgatgatactgatagcgacggatccaagagctattttaatgagcatcctgtaattggtaaaagagttcccttcagagatgagtcggtcatattaaaggttacaatgcctaagggaactttaagtaaaaataataatagcgtcaaagattctatcaaatccttaaaagattcgaataaattgagagtcactcctgtttccatagtagataacactataaaatttagagaaatgtcagattttcaaatcaaactggataatgtcccctctgcaagagagttcaaaagtagctttggctctctggaatggaataatttcaaaagttttgtcaattctgtaccagataatgactctcaacctcaggaaaacatcgggaatttgatcttagaccgtagcgttaaaattccgagtacagatttccaactgccgccacctcctaagttatcaatggttggtttccccctgctttataaatataaagctaatccatttgcgaaaaaaaaaaaaaaagggtttcccaaaattaaggggaacttttttcaaaaactatcagttgtttgttcatga

SEQ ID NO: 79264 - DNA, 102 bp, Saccharomyces pastorianus
atgactgccatcattgtagtgctaaaccggaaaggcgaaacattgcaagactggtttaataaaatgaagacccgtttggaaagagaaaggggcctagtgtaa

SEQ ID NO: 79265 - DNA, 828 bp, Saccharomyces pastorianus
atgggtcaattgctttcccatccgttgacggagaagaccatagaatataatgaatataaaaacaaccaggcgtcaactggtattgttccacgattttacaattgtgtggggtccatgcaaggctatcgtttgactcaggaagatgcacatctaattagaaatgaaaactctgttgtgtacgtacgatttttcaacccattcatagacaaatacgaaaccctgtcattgaacgtcttcgcagtattcgatggtcatggtggagatgattgttcgaaatttctaagcggcggccgccaccatcgcgatggtaacggcagtagcaacggtaatggtgaacccaacgctggcctgatcaaatggattgtgtatagtttcgaaaaccaccattacacatctacaactaataacgactcatcaaaatttaaaagatccttcaatacgttggaaggacttgtttctcaaatttttaaagacgctttcatattgcaagatgaagagttatatcgacattttgccaacagttcgtgtggatctacagcagtagtagcatgcatcataaacgaggaatcactgtatgtggctaactgtggtgattcgcgatgtattctttcctccaaatcgaatggcataaagacgatgtctttcgatcataagccacaacacataggagaattgatacgtataaacgataatggtggtactgtctctcttggaagagtcggtggagtactggctctcagtagggcatttagtgatttccaattcaagagaggtgtcacttatccacatagaaggacaaaactaacaaatattacgggatcctctaga

SEQ ID NO: 79266 - DNA, 1350 bp, Saccharomyces pastorianus
atgcacatactgctaagtttggctgttgaatacccctctcatattttatggtatatcacagcccttgtaaattccaattcttcaaaaagagttcttcgtggtaagcatattttagaaaagtatagacaacattcgcaaaatcctcatgatctagtttctagtgcattggatttaacgaaagcattaactcgtgtctgtttgcaagatgtcaaaagcattacaagtagatcaggcaaatctttagaaaaagacttcaaatttgacatgaacgtggccccatctgcaatggttgttccagtaagaaaaaatttagacatcatttcaccactagagtctaactcaatgaggggctatcaaccatttaggccggttgtttctataattagattcggatcatcttataaagtgttttcttcattaaagaagccaaaacaattgaacataataggttcagatggcaacatttatgggatcatgtgtaagaaggaagatgtccgacaagataaccaatatatgcagtttgccacaacaatggattttcttctgagtaaggacatagcttcaagaaaaagaagcctgggcataaatatttactccgtactatctcttcgagaagactgtgggatattggaaatggtaccgaatgttgtaactttaagatatattctttctacaaagtacgaaagtctgaaaattaagtatagcctgaaaagtctacatgataggtggcagcacaccgcagcagatggaaaactcgagttttacatggaacaggtagataaatttcctccaatcttgtaccaatggtttttagaaaactttcctgatccaatcaattggttcaacgccaggaatacgtacgccagatcttacgccgtcatggcaatggttggccatatattaggtctaggtgataggcattgtgaaaacatattactagatatacagacgggtaaagttcttcatgtagacttcgactgtttatttgagaaaggcaaaaggttacctgtcccagaaattgttcccttcagactaacaccaaatttattggatgcgttgggcataattgggacagaaggaacatttaagaagtctagtgaagtcacgttggctttaatgagaaaaaatgaagtagcgttgatgaatgtgatcgaaacaattatgtacgatagaaacatggaccactcaattcaaaaagcgctaaaggtcttaagaaacaaaatccgcggtatagatccgcaggatggcctggtattgagtgttgctggccaaacagaaacattgatccaagaagcaacatcagaagacaatctaagcaagatgtatattggttggcttccattttggtaa

SEQ ID NO: 79267 - DNA, 636 bp, Saccharomyces pastorianus
atggaatcacacgtcaaatatcttgacgaattgatattggcaataaaagacctgaactcgggggtggattcaaaggtgcagattaaaaaagtgcccacggatccatcttcttctcaggagtacgccaagagtttaaagatcctgaacaccctcataagaaacctaaaagatcaaagaaggaacaatattatgaaaaatgatactatattttcgaaaacagtttccgcccttgccttattgttggagtacaaccccttcttgcttgttatgaaggattccaacgggaactttgagatacaaaggctgatagatgatttcctcaacatatccgttctgaactatgataattaccacagaatatggtttatgaggcgaaaattaggcagctggtgcaaagcatgtgtcgaattttacggaaaacctgctaagtttcagcttactgcacattttgagaacaccatgaatctttacgaacaggccttgactgaagtcttgttgggcaagactgagcttctcaaattttatgacaccttgaagggtctatacattcttttatactggttcacttcggagtatagtacttttgggaactctctcagcattcttagattcttctttggggttcgcgaaatttga

SEQ ID NO: 79268 - DNA, 1005 bp, Saccharomyces pastorianus
atgcatcattttttggataacaagtatgggctcttggataatgaccccactatggccaaaggaattcttcgactatattctctttgcatttctaacgatttctcaaaatgctttgtagaccacttcccaattgaccagtgggcagatttttcacaaagtgaacattttccgttcacgcagttgactaataaagctctctcgattgtatattttgatttgaaaagaaggtccctacctgttgaagctttaaagtacgataataagttcaacatctgggtataccaatcggagccggactcgagcttgaaaaatgtcacttctccctttgatgatcgatataagcagctggaaaagctaaggttgctagtactaaagaagtttaacaagacagaaagaggaactttgctcaaataccgtgtgaaccagctaagtcctggattttttcaaagagctggaaacgatttcaagctaattttaaatgaagcatctgtatccattcaaacttgtttcaagacaaacaatataacaaggctaacatcatggactgtaattctcggacgtctagcctgtctagaatcagagaagttttccggcactctgccaaattccacaaaggatatggataattggtatgtttgtcatttatgcgatattgagaaaactggcaaccctttcgtgcgaataaatccaaatagaccagaggctgcgggtaaatcagaagtcttcaggatacttcattcaaactttctatctcacccaaatatagatgaatttagcgaatctttgttaagtggcatcttattttctctacataggatattttctcactttcaacctccaaaacttacagatggaaacggtcaaatcaataagagctttaaactggtacaaaagtgctttatgaattctaacagatacctacgtttattaagtactagaattatacctttattcaatatatcagactctcatagcatccggaagatgaactctctgccacgctga

SEQ ID NO: 79269 - DNA, 3462 bp, Saccharomyces pastorianus
atgtgtgatggcgatacaagtttaattaaccaaatgaaggttaatttactgaaaaaaaacagtaggcaaatatttgccgtagctttggtaaaacacggattattttctttggatatcttggaaaccctttttttaaatagggctccaacttttgacaaaggatatataactgcataccttcccgattataaaactttagctgaaataacgaagctctacaagaacagcgttactaaagatgcaagtgacagcgagaatgctaatatgattttatgctctttgcgatttttaatcaccaattttgaaaaagacaaaaggcatggttcgaagtacaaaaatatcaataactggacggatgatcaggaacaagcgttccaaaagaaactacaggataatatcttaggtattttccaagttttttcgagtgacatacatgatgttgaaggccgcaccacttactacgaaaagttaagggttatcaatggcatttcttttcttatcatatatgcccccaaaaaatcaataatttccgcattagcccagattagtatttgtttgcaaacaggacttgggattaaggaagttcgatacgaggcctttagatgttggcatctgttagttcgccatctaaatgatgaagaactctctactgttatagatagcttaattgcattcatacttcaaaagtggtctgagttcaacggaaaacttcgaaatatagtgtacagtatactggataccttaatcaaagagaaatcggacctgattttgaaattaaaaccttacactactttggctttagtaggcaagcctgaattaggtattttagctcgtgatggccaatttgcaagaatggtgaataaaataagaagtaccacggaccttatacccatatttgctaataacttgaaaagtagtaacaagtatgtcataaaccaaaatttagacgatatagaggtatatcttaggagaaagcagacagaaagatcgattgattttacaccaaagaaggttgggcaaacttctgatataacattggttttgggtgctttattagacacttctcataagtttagaaatttagacaaggacctatgcgagaagtgcgccaaatgtatcagtatgattggtgttttagacgttacaaagcatgagtttaaaagaacaacatattcagaaaacgaagtttatgatctgaacgatagtgttcaaactattaagttcttgatatgggtcataaatgatatcctcgttcctgcgttttggcaaagtgagaatcccagcaagcaattgtttgttgcccttgtcatacaagaatcattaaaatattgcgggctaagttcagagtcatgggatatgaaccataaagaattatatccaaatgaagccaaactatgggaaaagtttaactcagtctccaagacaaccatctatccgcttttatcttccttatatcttgcgcaatcatggaaagaatatgtcccgcttaaatatccttctaataacttcaaggaaggatacaaaatttgggtgaaaaggtttacattggatttattgaaaacaggtacaacagaaaatcatccattgcacgtgttttcttctttgattagggaagatgatggctcactatcaaattttttgctaccttatatttctctggacattattatcaaggcagaaaaaggaactccatacgctgatattttaaacgggattatcattgaatttgacagcattttcacgtgcaatctggaaggaatgaataacttgcaagtggattcgttaagaatgtgctatgaatccatcttcagagttttcgaatattgcaaaaaatgggcaactgagtttaaacaaaattacagtaaactacacggcacttttatcattaaagatacgaaaacaactaacatgcttttgagaatagatgagtttttgcgaacaaccccttcagatttgctagctcaacgctccttagagacggattcttttgaaaggtctgctctataccttgaacagtgctatcgacagaatcctcacgataagaaccaaaatggacaactactgaaaaatttacaaatcacatacgaagaaataggagacattgactcactcgatggtgtactgagaacctttgctacaggaaacttggtttctaaaattgaagaattgcaatattctgaaaactggaaactcgcacaagactgctttaatgtcctcggcaaattttcagatgaccccaaaactacaaccaggatgctaaagtctatgtatgaccaccaattgtattctcaaataatatcgaactcttcgttccattcttcagacggaaaaatttctttgtctccagatgtgaaggaatggtacagcataggtcttgaagctgcaaatctagaaggcaatgttcaaactttgaaaaattgggtagaacaaatagagagtttaagaaatattgacgatagagaagtacttttgcagtacaatattgcgaaagctttaattgccatctcaaacgaggatccattaaggactcaaaaatacatccacaattcctttaggcttatcggaacaaattttataacgtcatctaaagagacgacgctgctaaagaaacagaatttattgatgaaattacacagtttatatgacctcagttttttatcttctgcgaaagataagtttgaatacaaaagtaacactaccatactcgattatcgaatggaacgtattggggctgacttcgtgccaaatcattacatattgtcaatgagaaagtcatttgaccaattgaaaatgaatgaacaagcagacgctgacttaggaaaaacattcttcactttagcccaattggcgagaaacaacgctaggctagatatagcctccgaatcattaatgcattgtttggaaaggcggttgcctcaggcagagttggagtttgctgaaatactatggaagcaaggtgagaatgatagagccttaaagatagtgcaagaaatacatgaaaagtatcaagaaaattcctcggttaatgctcgcgatcgtgccgccgtgctattaaagtttactgaatggttagacctttcgaacaattcagcgtccgaacaaattattaaacaatatcaggatatttttcagattgattctaaatgggataaaccatattactctattggcttatactatagtagactacttgagcgcaaaaaagcagagggttatattactaatggtcgttttgagtacagggcaatatcttactttttattggcatttgaaaagaacactgctaaagtaagagaaaatttgcccaaagttatcacgttttggctagatattgcggccgcatcaatttctgaagctcctggaaacagaaaggaaatgctgagtaaggctacggaagatatatgtagtcatgttgaagaagcgctgcagcattgtcccacttatattggtactttgttttga

SEQ ID NO: 79270 - DNA, 1488 bp, Saccharomyces pastorianus
atgagtctcattgtacaagttgttgatgaatgttttcattctttaaccaacaatgagtccttacctgagaggaataggaaaaatttggatatcgtctgtgcaacattcgcacgtcaaaagttgaactttatctctggttttagccaagaaaaaggtagagttttaccaaattttgccgcttcctccttctccagtaaattcggaacattagatctcttcactaaaaacattatgctattgatggaatatggttctatttcagagggtgcacaatgggaggcaaaatataagaaatatttgatggatgcgatttttggccatcggtcgttcttctctgcgagagctatgatgattctaggtataatgagtaagtcgcacacgtcccttttcctttgtaaagaacttttagttgaaaccatgaaggtcttcgcagagccagttgtggatgatgaacaaatgttcatcattatagctcatgtctttacttacagcaaaattgtcgaagggttagatccttcttcagaattaatgaaagagctattttggcttgctacaatatgtgttgaatcccctcatcctttactctttgaaggtggtctcctgttcatggtaaattgtttgaagcgactgtacacggtccatcttcaacttggattcgatggcaaatcgctagccaaaaaattaatggaatctagaaattttgctgctacgcttttggctaagttagaatcatacaatggatgcatatggaacgaagataattttcctcatattattttaggtttcattgcaaacggtttatccattcctgtcgtaaaaggagccgcattagattgtctacaggcccttttcaagaatacatattacgaaagaaagtccaacccaaaatcctccgattatctttgttaccttttcttactccatttggtcttaagtcctgaacaactttctaccttgttacttgaagtcggcttcgaagatgaactggtacctttaaataatacactaaaagtgccacttactttgatcaactggctaagttcagactcagataaatctaatatagtcttataccaaggagcacttttgtttagctgtgttatgtcagacgaaccatgtaaattccgttttgctctattgatgaggtatttgctcaaagtcaaccctatttgtgtattcaggttctatacgctgactagaaaggaactcaggaggttatcaaccctagaacaatcatctgaagcggttgctgtctcttttgaattgattgggatgcttgttacacacagtgagtttaattacctagaggaatttaatgatgaaatggtcgaacttttaaagaagagaggcttgtcagttgtgaagcccctggatatttttgatcaggaacatatagaaaagttaaaaggagagggtgaacatcaagtggcaatttatgagagaaaaagattagcaacaatgatactggcaagaatgtcgtgctcctaa

SEQ ID NO: 79271 - DNA, 504 bp, Saccharomyces pastorianus
atgctggatggccttgaaaacgacgtgattcctcaagaacatattcctacggttgtctgttcattgtcatactgggtaccaaacttatatgaacatgtatatttggcaaatgacgaagagggaccagaggcgatttcacgtataatctatagcttaatcaggttgacggtcaaagagccaaatttcacgacagcttaccttcaacagatttggtttttactggcattggatggtcgtctcacgaacgtgatagttgaagaaatagtaagtcatgcgctggatagagattcagaaaacagagactggatgaaagctgtgtcaatactaaccagttttccaacgacagagattgcttgtcaggtaatagagaagctaataaatatgatcaaatcttttctaccttctctagcagttgaggcttccgcacacagttggtctgagcttactattttatcaaaaattagtgtgtcaattttctttgaatcaccctactttccgggatcc

SEQ ID NO: 79272 - DNA, 1047 bp, Saccharomyces pastorianus
atgctcaacgacaaaattcttggtgtattgggacaacctagcatggaaataaaaaatgaaattcctccttttgtagtcgagaatcgggaaaaatatccttcattgtatgaattcatgagtcgctatgccttcaaaaaagtggacatgaaagaagaagaagaggataatgcgccatttgtacatgaagcaatgacattggatggcatacaaatcattgtcgtaacttttaccaattgcgagtacaataattttgtaatggactcactggtctataaagttctgcagatatatgcaagaatgtggtgctctaaacattatgtagttatcgattgtaccaccttttatgggggtaaggctaatttccaaaaattgactactctatttttcagtttgataccagagcaagcatcaagtaattgtatgggatgttattacttcaacgtcaacaaatcatttatggaccaatggacctcatcatatactgtagaaaatccgtacttggtcactacaattccccattgtttcatcaacagcaatactgaccaaagtttgataaagtccttaggattgagtggtaggagtttggaagttttgaaagatgtaagagttactttgcatgatattaccctttatgacaaggaaaaaaagaagttttgtcccgtgtccttgaagataggaaacaaatacttccaagttttacatgagattccgcagttgtacaaggttaccgtatcaaacaggacattcagcatcaaattcaacaatgtttacaagatatcaaatttaatttcagtcgatgtctctaacaccacaggcgtttcctcggaatttacgttaagtcttgataatgaagaaaagttggtattttgcagtccgaagtacctagaaattgtgaaaatgttttattatgcccagttaaagatggaagaagactttggtacggatttaacgaacgatatttcattttcaacatcctcttcagcagttaatgcttctgactgcaatgttaagaagttggtgaaattatatcacatttgtcattggtga

SEQ ID NO: 79273 - DNA, 2463 bp, Saccharomyces pastorianus
atgatgaacattttcagcattttcaaaagaatgaccaactggtttatacgcccagatgctaatacagaattcccgaagacttttacggatattataaaaccactttttgtctctatattggattctaatcaaagactacaagttacagcgcgggcttttattgaaatcccattaagttatatagctacttttgaagacattgataatgatcttgacccaagagtactgaatgaccattatttgttatgtacatatgccgttactttgtttgcttcatcactgtttgatttgaagttagaaaatgcgaagagagagatgctactagacattattgttaaatttcaacgagtccgttcttatttatcaaatctagcagaaaaacacaacctagtccaggcaataattacgacggagaggttgacgctgccattattagttggtgctgtaggaagtggaattttcatttcattatactgcagtcgtggaaatacgccacgcttaataaaaatttcatgttgtgaatttctacgatccttgagattttatcaaaaatacgtaggcgctttggatcaatactccatttacaatattgatttcatagatgctatggcccaggacaatttcactgcctcaggatcagtggcttttcaacggcgtctaagaaataatattttaacttatatcaaaggatccgactcaatccttttggattcaatggacgtgatttacaagaagtggttttacttcagctgttcgaaatcagttacgcaagaggaactagtagattttagaagcttggcaggcattctagcttctatgtcaggtattctgtctgatatgcaagagttggaaaaaagcaagagcgctccagataatgaaggagacagcttatcatttgagtcacgaaatcccgcttatgaggtgcacaaaagtcttaaactcgagttaacgaaaaaaatgaatttctttatttcaaaacaatgtcaatggttgaataatccaaatctattaacaagagaaaattcgagagatatattaagtattgagttgcatcctctatcttttaacttattgtttaacaacctaggactgaaaatagatgaactgatgtcaattgatctttcaaagtcacatgaggattcatcgtttgttttactagagcagataataattataataagaactatactaaagagggatgatgatgaaaagataatgctactcttttcgacggacttgcttgatgcggtcgataagttgatcgaaatagtggagaaaatttccatcaagtcctccaaatattataagggaattatccaaatgtcgaaaatgtttagagcatttgagcactctgaaaagaacctgggcatttcaaatcatttccatttaaagaataaatggttgaagttagttattggttggttcaaactatctattaataaggattatgattttgaaaacctgtcaagaccattaagggaaatggatttgcagaaaagggacgaagattttttgtatatcgacacttctattgaatctgcaaaagcattggcttacctaacacataatgttcctttagaaataccgccttcaagctcaaaagaagattggaacagatcttctacagtatcatttggcaatcactttactattttgttaaaaggtctggagaaaagtgcggacctgaatcagtttccagtttcattaaggcataagatcagtatacttaatgaaaatgtaataatagcgctaacgaacttatctaatgccaatgtcaacgtttctttaaaattcactttaccaatgggttattctccaaataaagatatcagaatcgcctttttaagagttttcatcgacatagtaaccaactatccagttaaccctgagaaacatgaaatggataaaatgctagctatagacgacttcctgaaatatataatcaagaacccaatattagcatttttcggaagtttagcgtgttctcctgctgatgttgatttatatgctggtggattcttaaacgcctttgacactagaaatgcgtctcatatccttgttactgagctccttaaacaagaaatcaaacgggccgcaagatcagacgatattctcagaagaaatagttgtgcaacaagggctttgtcactttacactagatctagaggcaacaaatatttgataaaaactttgagacccgttttgcaagggatagtggataacaaggagtcttttgaaattgataagatgaaaccaggatccgaaaactccgaaaagatgttagacttatttgagaagtacatgacaagattaattgacgcaattacaagttctattgatgatttcccaatagaattagttgatatctgtaaaacaatttacaatgctgctagtgtaaattttccagaatacgcatatattgccgttgggtcttcgtttcttgaggttatcgggcctgcctaa

SEQ ID NO: 79274 - DNA, 2457 bp, Saccharomyces pastorianus
atgttactatgtaaaatttctaagctgaagttcaatacaagaactttaaaggttttacagaacatgtctcaccatctttctggcagcgctactatctcaaaatcgagtattttacccgattcacaggaatttttacaaaagagaaactatccagcatataccgagaaaatagatttaacaatagattatatccagagattcatatctgcttccaatcatgttgaattcacaaagtgtgtcaaaacaaaagttgttgcacctttattgatatcacacacctcaaccgaattgggcgtagtaaaccacttggatttatttggttgtgagtatttgactgataagaatctgctagcatatctggacatactacaacacctgtcaagttacatgaagaggaccatttttcattcgcttttgttatattatgcttccaaagcttttttattttggataatggcaaggccaaaagaatacgtcaaaatttataacaatttaatatcatcagattataatagtccgtcttcttcatctgataatggtggttcgaataattctgataaaacgtctatatcccaactagtctcactgttattcgatgacgtttattccacttttagtgtatcatcattattaacaaatgtcaataatgaccaccactaccatcttcatcattcatcttcttcatcaaagacgaccaacactaatagtccaaactctatatcaaaaacgtcgataaagcagtcgagtgtgaatgcttctggcaatgtttctccgtctcagttttctactgggaatgatgcatcgcctacttcccctatggcatcattgagttcacccttaaacacgaacatcctagggtatccgttatctccaatcacttcaacactaggacaggcgaatacttccacatcgactacggctgcaactaccaaaacagatgcagatacgccctctactatgaatactaacaacaataataacaataacaacagcgctaatcttaataatattccacaacgcatattttccttagatgacatttcatcctttaactcgagtagaaaatcactcaatctagatgatagtaactccttgtttctttgggatacttctcagcattctaatgcatcgatgacaaatacaaatatgcatgcaggagttaataattctcagtctcagaacgatcagtcttctttaaactatatggaaaatattatggagctgtattccaactataccggatcagaactatcctcccatactgccatattaaggtttttggtggttctgaccttattagacagtgaagtatatgatgagatgaactcaaattcgtatagaaaaatttcggaaccgataatgaatattaatccgaaggactctaatacttcaagttggggctcagcatccaaaaacccaagtatcaggcacctcacccatggcttaaaaaaacttactttacagcaaggcaggaaacgtaacgttaaatttttgacatatttgattaaaaatttgaatgggggacagttcgtttcagatgtttccttgattgactctatcaggtccattctattcttaatgacaatgacgtcttctatatcccaaatcgattcaaatattgcttctgttattttttcgaagagattctacaacttgttgggtcaaaatttagaggtcggcaccaattggaattctgccactgcaaatacttttatttctcattgtgttgaaaggaatccccttacacataggcgtttacaattagagttttttgcaagcggtttacagctggattctgatttatttttaagacatttacaactggaaaaagaactcaatcacatagaccttcccaaaatatcgttatacactgaaggatttagggtattttttcacctagtaagcaccaaaaaacctcatgaggatattgcagaaaaaacctcctctgtgttaaagagacttttctgcataattgctgatattttgttgaaagcaacgccttattttgacgataatgtaaccaagattattgcttctatattggatgggcatattttagatcaatttgacgctgcgcgaacactttctaatgatgatcatgtcagttttgatgctgccacaagcgtttacactgagccaaccgaaattattcataactcatcggatgcctcgttagtctcttcactttcccaatcacccttatcaattaactcaggaagcaatatcgccaatacgcgcacctgggatattcaatcaatcttaccaaccttatcgaacagatcaagtgcttctgatttgagcttgtctaacattttgactaatccgttggaggcacaacaaaataataatgcaaacttgttagcccatagattatctggggttcctactactaagagatacgcttcaccgaacgactctgaaagatcacgacaaagtccatattcttctccgccgtaa

SEQ ID NO: 79275 - DNA, 291 bp, Saccharomyces pastorianus
atgaaaaattgtttcgaagactcctcatttcgtttacaagaaaacagcttcaagaggcaattgggccctctgttcgcaaacatcaacttctccttaatcgaccaactgacaatgaacttcaggttctacgagagatctgccaatttccagaaggaaacaataggtgggttaagaatgatgctacaagataaggataactatatcaaaacactgatgcaacatctgaagaaaaaagagagtacaaagttgataaaagacagcaagaatggcgcctccaccttaacatcttaa

SEQ ID NO: 79276 - DNA, 1272 bp, Saccharomyces pastorianus
atgtccagcttaaccgatacagtagagggtagcgaggccaaacgcggcagattttccaacaatgcattaacctccgatactggtatattacagaaaaatagtacactaagaaactggtttttaaaaccgacagcagacttaaaaaatggttgcgaagatagagttgaagatagcgtcaatgatgtctacttaaatgacaaaaactcacaaaaatctgttgaagaaagaaaactaggaagaaaagttagatcttttttcaaacaaacaaactcaaataaggacgagtctgtgttggaagatgaagatgatgcgttagtttggaagaaaactagcaataagtgtgcaaaaaaggaaaattcccatgacatccaaaaaggaagtttcacaaaaaaaatcagaaacagtattttcaagagtgcaaatgacgtgaaagaattcaggaatgaaaataagttactattgcccgttgaactttcttctgatgatgagaatgagtctcatttcactgatgctaactcacatgttatgcaatcaaaaagtcccgagaaaatctcttccaaggatcaatgcttgactaaaggcgctaagaataaaggtctgaaaaagggatatgaaaaaagttttgaagagtgtagcgacgacagtgacgatgaattttctcctgctactccaccggagaatgttcttgaaggtccttacaaatttgtgtttcagacaccaaacacatttacatctcagcctaatataacagtagaaaatgattttcacaaaggtgggagacatgtgattgactatctgaacaaaaaattggctactatgaacattgatattgatttgacttcaggggggaaacaaaacgtatcttgggaggaagagctcgaccaattgagcgaccacgttatagaaagtattactaaccacatttcaaagggtagaatgcacgcacaagagaagcaagataggttggaaaagttaaaattggagaatttgaacttgtcaacattaaagcaagaaaatctcctacataagcaggaaattaactccttgaaaaacaaccttgaatccattagtaaaaaaaacaatgatcttataatggaaatgaacaaattgaaaaaaaaaagtacgactaataaaacaaatgagtacttatctacggatgaaaacgaaaatgaggagattaccaaatccaatatgggtcctggcattttagaactgaacgtcaacgaaacctcgaaaaaattacagcatccacattcaaaccctcgaaatatc

SEQ ID NO: 79277 - DNA, 423 bp, Saccharomyces pastorianus
atgggctcatttggtggtctgattcccaccccacttttggctacatacagtggctcgaaatcattcttacaaagttggtctaactctttggctggggaattatctaaagatgctatcgatgttgaattaatcatttcatatttggtcactagctcgatgtctaaaatcagaagatcatctttaacgatcccaaatccacaacagtttgtgaaatccactttaagaagcgttggcagacgctgcggctctcaagaaagatacgctactatgaccccttactgggcgcacgcagtgtatcaatttgtaattacagagacctttggcgtttactctaagattgttaattccattaattattccttccataaatctatcagaattagagccttgaaaaaagccgcaagacaggttaaaaaggaatag

SEQ ID NO: 79278 - DNA, 522 bp, Saccharomyces pastorianus
atgacttttatgcaacagcttcaagaggctggggaaagatttaggtgtatcaatggtcttttatgggttgtttttgggcttggtgtcttaaaatgtacaacgttatcacttagatttttagctcttatttttgatctttttttactaccagcagtcaatttcgacaagtatggtgctaaaagcggtaaatactgtgttatcactggtgcaagtgacggtattggtaaagaatttgctagacaaatggcgaaacgtggcttcaacttggtattgatctcgagaacgcaatctaaattggaggctttacaaaaagaattagaagatcaacatcatgtcgttgtaaagattctagccattgacattgcggaggataaagaatccaactatgagtccattaaggaattgtgtgcgcagttaccaatcaccgttttggtcaataatgttggccaatcacactccattcctgttccatttttggaaacagaagagaaggagcttagagatattatcactatcagataa

SEQ ID NO: 79279 - DNA, 576 bp, Saccharomyces pastorianus
atgtcatttcgaccaaaatgttttttcttcatttttttcctgcgattgtttgaccatttgtttaatttcactctctgtaaagagctacttaactattcagaaataagcaataagattgacggtcaaagaagaaaagagaactctgcacccaggatggcactcaaaaagaatacccacaacaaatctaccaaacgagtaacgaaacacccatctttgaaaactctaacgcataagcaaatacacacaacaattttcgttaagtctacaacaccatacgttagtgcactgaaaagaataaataagtttctcgatagcgttcataagcacggatcatcctatgttgcggttttgggtatgggtaaagctgtagaaaagacactggcattaggttgtcattttcaagatcagaagaacaagaaaatagaggtttacactaaaactatagaagttcttgatgaagtaataactgaaggccaagctgatatcgacatggaaagtgatgttgaagatgacgataaagaaacccaactaaagaaaagggctgtaagcggtgtagaattgcgtatttatgtttaa

SEQ ID NO: 79280 - DNA, 93 bp, Saccharomyces pastorianus
atgaacataattcttgtttcacttgattgtgagctccaaaagcttgctcttaagctgtcaaagaaaactagtggcactcacactacgcactag

SEQ ID NO: 79281 - DNA, 177 bp, Saccharomyces pastorianus
atgaattatgtacaaggtagtatcagctataacaggactattcttaccggcttatggaaattatttcacagattgtgctgcaaagatcgttataggaaaaccaatctgtcagaaacattgttctatgacgattcaacggaaagatgggttagaatgggagagttaatgcattattga

SEQ ID NO: 79282 - DNA, 1044 bp, Saccharomyces pastorianus
atgtaccaaaataatgtattgaatgctattttggcttctgaaaaatcaaactttcaatacgatagtggaacaatattaagaaaccacaaaagaccaataataacatttaataacaacatagagcacacagtatccgaacctaataattttacaggctatgaggaaaaggaagatttggatataatggatatttgcccttattacccaaaagcaagaatgctggcggatgccattcaacatgccaaaacgagcgcaagtgaaaacaaaatggaactatcaatgaaaactatcccatgtctcaagaaggaaaacgtccatgttgagaaagggcacgattggtctcaactcagtacgagcagaatttgtaaaattttagaagacatagcagataaaaaaaataaaactagaaggcaatctgccccattacaaaagacgaagtattttccaacaaatgagaatcaaaataccgatatagaaaatcagaattggtcccaaatccccaatgaagacatatgtgcacttatagagaagattgctagcagacgcaataaaaatcgcaaacggaaaaatctttcatgttctaaagtccaagaaattcagggaaatattgatttacccaaaaaagacgtacaagagggagatatttcagattcgtctctattggcagcagtaagaggaaccaaaaaagtttccggatatgattacaattcaggagataagatacctaatgcgatacgtcttccttactgtaagcaaatattacgattattttcatttttacaaatgaagagaaatgacttaatagtcacctctgaaaattgtaatagcggagttttcttcagcaattttaattatcaacttcaagttaaatcgaattgtattgcaaatattgcttctacactcagttttctaccccatcatgaaataaccgtatacacatcctttattctctatccaaacgttgtcgataatatttgggaatgcacacgatacgctattcaacttttgaaagtccgaagcagcacagtttacgctactgcgtga

SEQ ID NO: 79283 - DNA, 102 bp, Saccharomyces pastorianus
atgtgtctgtctgaatacttccggacatttcctgtagacgacgatgagtttgttctggcattagctatgtcagcgcggaagctgagcgcagcgcggaagtga

SEQ ID NO: 79284 - DNA, 1611 bp, Saccharomyces pastorianus
atgagctacatagttgatctacaagtgcgaggatcatctctgagggttatcaaatgtatgtttagagaggatgagcaaatttcttctctacattctggttctgactcgaaacaaaacagcaacaaaaagctgggagaatttttgaatctgttaaaagcagtggtcaagaggaagttggaaagtttcccaaaagaccgtttaaagacttcgattataactggccaagaattaatgagagaggggcaaggaagtattgaaattaaggatccaccaacggaggcgcaacaacatttgattagaagcctagcaaaagttttattacaccagctttcaagcataaatgacaaagttaacacagtaaatgaaggacaagataatttgtttctatccttattcgttaaaaaaatttctatagagcaacagtccacatcacacgtccctattaaattgaactttcatgagaaaataaatttgggtcagcacatagattctattttagattcagaggagaccaacgagtcagacacttatcacgtgggatctgctgacgaattcattatatatcccttttgctgtctggaagagcaaggtgagctgaaaaatggcagcatactgtccacagagttcgacaagattgacttagaactagacgaggatgatggttttgagggagaaactttaaacaattgtatcaattcagtgggaaattttgacattccactaagtaagcaaacactaaacttagtaaatatatcatatcttccaggcacaactttcgagggccaatgggaatcgttgtattttggtaacaatattaaagaaaggttatatagctacgcaactatatctctcaagatagcaagattcaaacaaactggagactccaatcaagaagacattacaacgctaatcacaaataataaattactccttgtccatggtcctccgggaacaggtaaaacaacgttatgcaaagcactttgccaaaaattatctgtgaggcgggaattttcagacggttccgataccattgatactaattataaggggataataatagaattgtcttgtgcacgcatcttttctaaatggtttggagaatcgtcaaaaaatatatcaatagtattcaaagacattgaggagcttttaaaggtcaatgagggacgagggatctttatatgccttttgatagatgaggttgaagcaatagcaagttcaagaacaaatttgtcaagtagaaatgagtcaacagatggaatccgagttgtgaacactttacttacgcaacttgacaggctgaaaaaataccataactttttagcattagccacgtctaatttattagattcattagatgatgcttttgttgatcgagcagatggagttttctatattggaaatccaacagctgagggcatcctccacattctaaaggtttgcatagaggagatgataacttcaggtataattctttttcacgcaacatcaactggaatcaagttcttcaataaatatcaggacattttgcggaaaattgctatcaaatgctcggtatgtttttttcttttattctacttttacgattctttttctttctttccttcttcataa

SEQ ID NO: 79285 - DNA, 150 bp, Saccharomyces pastorianus
atggtcagattggactctgaaaagcacattgacttcgctccaacttctccattcggtggtgctagaccaggtagagttgctagaagaaacgctgctagaaaggctgaagcttccggtgaagctgctgaagaagccgaagacgaagaataa

SEQ ID NO: 79286 - DNA, 456 bp, Saccharomyces pastorianus
atgccatcttgcattcactttggtatatatctcttgacctcaatatatctcgataatataaatcgcaatattatacttgttagtctgacagttttacacctgtacatctccaccatcaccacaccttttttactggaggcaaggatgcgtttgaatatcgcctttttcccagccgttagaacatgctcagaaccgaggaaaagcaccgctgccaaacctcctttgatgtgttggcccaccgctactagtggccgtgctggaagcccaggcagcggtgggggccacaatacgagagctggaaaggtaaacggtctctgcgcctctgtgaaattttatcaccaatggagtgtcatgtctggtaaagataatatagaaagtagtgtgcaatttcaggcattaccgattgaactttgggataagagaaccaagacaaaaataactagcaacaatgggtaa

SEQ ID NO: 79287 - DNA, 444 bp, Saccharomyces pastorianus
atgttccaacgtgacttcagaaagcatggtgccgtccatctttctacttacttgaaggtctacaaggttggtgacattgtcgacatcaaagccaatggttctatccaaaagggtatgccacacaagttttaccaaggtaagaccggtgttgtctacaacgttactaagtcttctgttggtgttatcatcaacaagatggtcggtaacagatatctagaaaaaagattaaacttaagagttgaacacatcaagcactccaagtgtagacaagaatttttggaaagagttaaggccaatgctgctaagcgtgctgaagctaaggctcaaggtgttgctgtccaattgaagagacaaccagctcaaccaagagaatcccgtatcgtttctactgaaggtaacgttcctcaaactttggccccagttccatacgaaactttcatctaa

SEQ ID NO: 79288 - DNA, 294 bp, Saccharomyces pastorianus
atgcaatatcttgaagaaaagggaggattctactatgaaaggtggggtgatgcccctgtaagaagtttggcacttgctttatttgcggataagtcaagcatccattggttcagggatataggttatcaccatactccgtacacgaactgtccaacttgtccagcagattcagataggtgtaatggaaattgtgtaccaggcaaattcactccttggagtgatctagacaaccaaaattgccaggcaacctggataagacactctatgtctgaggaagagttagaaatgtattga

SEQ ID NO: 79289 - DNA, 972 bp, Saccharomyces pastorianus
atgaggtttctttcaaaaaggatactgaaaccggtactttcagtgatcattctaatatcgattgccgtaaccgttgttctttactttttaacggcgaatgagaactatttgcaagcagtaaaggatagtgccaagtcccagtatgcttctctccgggagagctacaaaagtattacaggtaaaactgaaagcgctgatgaacttcctgatcatgatgctgaggtgttagatagcataatggacaggctacacgagcccctttatgaaaaggacacttttgacccgaatgaagtccttgctgaaaataaacagttgtacgaggagtttttacttcaagaaatttctgaaccaaaggtggacaatttggtacgtagcggggatccgttagccggcaaggcaaaaggaactattttgagtttggtgagaaattctgatttagaggatataatttcttctattcaacagctagaagaggagtacaataagaattttggatatccctataccttccttaacgatgaggaatttactgacgaattcaaagatggaataaaaagtattcttcctaaggaccgtgtagtagaatttggcaccattgatccagataactggaatatgcctgatagcatagatagggagagatacgaccaagaaatggacaaaatgagtaaagagaacattcagtatgcagaggtggaatcctatcataacatgtgtcgtttctattctaaagaattttaccatcatcctctgctatctaaatataaatatgtgtggagattagagccaaacgtgaatttctattgcaaaattaactatgacgttttccaatttatgggcaagaatgacaagatttatgggtttgttttgaacctctatgatagtccgaaaaccatcgaaacgctatggacttcaactatggattttgtcgaggaacacccaaactatatgaacgtcaacggagccttcgaa

SEQ ID NO: 79290 - DNA, 162 bp, Saccharomyces pastorianus
gcctggataagcggcgtaaatgatgaggcgaaatacagccaaagatgcgtgccgttgcagttagctagcaacctggcgttcggcgatcgccataagagatctgccaattttaaaaagggtattgccaatacacatagtagccttatctgcagcaagccatag

SEQ ID NO: 79291 - DNA, 687 bp, Saccharomyces pastorianus
atgggcctttataaaatgcatgtggaaagaatttcttccattgcagtcattgacaaacaagataatttgctaggtaacatatcggtaacggacgtaaaacatgtcacaagaacctcccaataccccttactacataagacatgtcgccatttcatttctgtcattttaaactccagaggattagaaacgggtaaagattctttccccatttttcacgtataccccagtagttcactagcaaggactcttgccaagttagttgctacaaagtctcacagactatggatcgtacaaccgccggagtcgtcaacctcggcgtcatccacaaatttaacagctgctaatactgcagccaatgcagtttctgccaccgctcaatcgtctgctaatggtgcgactccaatgtcaaagtcatcctcttcaacatccctcaactcccactctccgttgatgacagcaatggaagacccaccatccccacgttcttcggccatcgcgatcccaccaccaagtcccgcctcctcaacaaacacaccaaacctattcgaaaaggaatatagaacgggtaagttgatcggtgtggtctcattgacagacatcatcaacttattagcaaggaaacaaacagggaataaagaagtggatccgcaatccgcaagaagacagagaggcagtatcgccatgtga

SEQ ID NO: 79292 - DNA, 321 bp, Saccharomyces pastorianus
atggggattctcggttcgggtgttcatcgtgtagcgataacaaacgaagaaatgaccaaagttaaaggtattttgtcccaacgtcgtttgataaagtatctttgggacaacgctagatcttttacaagcttagaacctctattaaactcctcattacaagatttgcacatcggtgttctcaatattcaatctaagccaacttcaagacaatcccgtgttatctctattcaaggcgaggagcccttatcatgggcctttataaaatgcatgtggaaagaatttcttccattgcagtcattgacaaacaagataatttgctag

SEQ ID NO: 79293 - DNA, 645 bp, Saccharomyces pastorianus
atggcttctacttcgaacacgttccctccaagccaaagcaattcttccaacaaccttccaacttctagacatgcatccattgtggagatgctgtctactccgccattgctgccccacgttcaagtgaacgatacagacgacaaggaacaaccagaagagtccacgccgccaacagcaacagcggcagcgcctggtccaggtagtgctgctacacccgcccccttgcgcgatgaaaagcctcaattcaaactatcagctgttcctatgacccagacgccatcgcagtgtctgtcatgtgtgcacgcccaaaaatggcaacacataccgttgtcgcaattgatcgaacagaataagcttatttttgttccaggttccatatcggtagaggaggcattcaacactttgatcaagtatcatctaaactctattcccgtggaatctttccccggcgacatgaactgttttactttcgactacaatgaccttaattcgtaccttttgctggttttgaataaaatcaccgtcagcaacaaacaacttactgcagattgccagaatggaaaacccgtaccagtgggcgaaatggtgaaactaactcctaagaatccgttctataagctgccggagaatgagagtttgtcgtga

SEQ ID NO: 79294 - DNA, 351 bp, Saccharomyces pastorianus
atggctattgatgcgataaataaaggcttacatatccatcctacaaaacacttaacgaggacattcaaggatgtagggtttacaggcatcaagtcctcggtcctaagtttgaaaactggtgacttcaaaacagatatgggctttttgaatgaatttaattctttagatatgtgggactacatgttaaggaggcaactaccagatagtagttgtcctccaaaggataccgaccctaccactcttttcaaaagatatgtggaagaacacataggaaaaatcgatgacaacgctggctgctttagaactttgtatgtggtggcgcaaaagccaaaactgccatataccaaataa

SEQ ID NO: 79295 - DNA, 933 bp, Saccharomyces pastorianus
atgggctccaataaggaagcaaaaaacattgatagtaagaatgatagggggttaaccagtataaccagtaacaaaatttccaacttaaaagcacatgataaccatacaagttcaacgattactgaacataaaaatgctgacaaagaaaaggggaaacaagaaaaagagagtagaaatggaaccacgcaatcaagtagttcagtagaatcacactcaccacaagtaagccatcattcagataagctctcgtcctttgattcgcccttacatttgccaaactttagactggcggatgacttgttctcaaactcgtcaagacgatcatctgactccgctgcctcatcctcagtatccaaactgaagtccgctcagctttccaaaataggtctacatcatcatcatacaagtaataataaacatagtcatagaagcggaactccgacttccgaagtgaaagctaattactcaccagacccttctgcaccgcgattcattgtatccaatatggtcggcaatggccggggaggtggtggtctacacggtgcaacttcgaacgttgtcaagaaactccattctagaaaaaaatgggactggaacactttaccggcatcagattcttctcttctaatcaaaaccgtttcaggaaatcataatttaatcaacatttgcatagacggtgaattcaaacaaataatgtacgacccgaatcataatgagctctttaatagaatggacttgtttctatctttcaacatggactcctcgccagaagactctttaatatttgccaagaaaagattacggtcgtacattgatttcctaacaaaatatttggaatctaggaaatatgcatttgaatgttatccatttaacattgaaaacatcataaatatagagactgaggttaaatgctttccttcgttgacccgttag

SEQ ID NO: 79296 - DNA, 393 bp, Saccharomyces pastorianus
atgaatggtatagaatatataaatatagatgtaataaatgtagtaaatgaacaaataatcttcctacaaagtactatgccatgggaagtaaaaaaaattaataaatattggctaaagtgtttcaaattggttctacgatactgggagactactccttatcataatgctttttgtcaagtagtaaaaattgaagtaattcttgaacaatttaaaaaaaaaattggtacggcggcacaattatttggtatatggcagttttggcttttgcgccaccacatacaaagttctaaagcagccagcgttgtcatcgatttttcctatgtgttcttccacatatcttttgaaaagagtggtagggtcggtatcctttggaggacaactactatctggtag

SEQ ID NO: 79297 - DNA, 417 bp, Saccharomyces pastorianus
atgaccatctttcttttccccagtgctaaacacgacagtaacgctagcccaaattctgactctgaagacggtcaccaccacaacaataagaaggaatgcgctatcgaatatctgaaggcacggttaaatagtgcatcagcagtcgcttgcggctacctccaagcttttgtcagtaagacgcaagactttgccaaagtatgctttttagaacttcagaatcccgttgtcttggtcaacttgttgctgcattcttcagtggtatgttatttatgtaacgggtatgcgaaccacaacgccagattcttgaaggggaaacctaactctacagtcttagcaacaaccgccggcgctctgggtcttttgacgctggacggtataatttcaaagaaatactactccagatacgacaagaaataa

SEQ ID NO: 79298 - DNA, 3408 bp, Saccharomyces pastorianus
atgcagaaataccctattatggcctatatgttagctattgcaaattttcactttttcaagttctatactagaatgagaaaaaaacacgaaaacaattcttgcaatgaaaaggacaaaggtgagaacctattcaaaattattctcgccatatttttgcaagaaaaaaaaaaatacgattgtatttcatctggttcaattatgactgcttcagaagagtacttggagaatttaaaaccgttccaggtcggtctccctccacatgatcctgaatcgaataaaaaacgttacctgctgaaggatgctaatggtaaaaagtttgatctggagggcactacaaaaagatttgaacatctgctatccttgagtggtttattcaagcattttattgaaagtaaagccgctaaagatcccaaattcaggcaggtcttagatgtattagaagaaaataaagcaaatggtaaaggcaaaggcaaacaccaagatgttcgtagacgaaagactgaacacgaagaagatgcggaattattgaaagaagaagactcggatgatgatgagagcattgaattccaattcagagaatcacctgcttacgttaatggtcaattgagaccttatcaaatccaaggtgtcaactggttggtgtctctgcacaagaacaaaatagcgggtatccttgctgatgaaatgggtttaggtaagaccctgcaaactatttcatttctgggatatcttaggtacattgaaaaaattccaggtccatttttagtcattgcgcctaagtctaccttaaataattggctgagagaaataaatagatggacgccagacgtaaacgcctttattttgcaaggagataaagaagaaagagctgaactgatccaaaaaaaacttttaggttgtgactttgatgttgtgattgcttcttatgaaattattataagagaaaagtcgccccttaagaagattaactgggagtatattatcattgatgaggctcacagaatcaagaatgaagagtcaatgctttcgcaagtcttaagggaatttacctcacgtaataggctgttgattactggtactcctttgcaaaacaatttgcatgaactatgggcgttattaaattttttgttaccagatatcttttccgatgcacaagatttcgacgattggttttcttctgaaagcacagaggaagatcaggataaaattgtcaagcaactccacactgttttacagccttttctactacgtcgtatcaaaagcgatgtggaaacatccttactgcctaaaaaggaactgaatttatatgtcggtatgtctagcatgcagaagaaatggtacaaaaagattttggaaaaggatctggacgctgtgaacgggtctaatggcagcaaggaatccaaaacaagacttttaaatatcatgatgcaacttagaaaatgttgtaaccatccatatttattcgatggtgctgagccaggtccaccgtacactacggatgagcacttggtttataacgctgccaaacttcaagttttggataagttattgaagaaattgaaggaagaaggttctagagttctgattttcagtcaaatgtcaagattattggatattctcgaggattattgctacttcagaaactatgaatattgcaggatcgacggttccaccgctcacgaagatagaattcaagccattgatgattataatgctcctgattctaagaagtttgttttcttattaacgacacgtgcaggtgggttaggtatcaatttaacgtcagcagatgtcgttgtcttgtatgattcagattggaacccacaagcagatttacaagcaatggatagagcgcatcgtattggtcagaagaagcaggtcaaggtattccgtttggtcacagataactccgtggaagagaaaattttagaaagggctacccagaagttaagattagatcaattagttatccagcaaaacaggacttctttgaaaaagaaggaaaataaagcagattccaaagatgctttattatccatgattcaacatggtgccgccgatgtattcaaaagtggtacatctaccggttcagctggtacgccggaacctggttcaggagaaaaaggagatgatattgatctggacgaacttttactgaaatcagaaaacaaaactaagtcattaaatgcaaaatatgaaactttaggtcttgatgatttgcaaaaattcaaccaagattcggcctatgaatggaatggtcaagatttcaagaagaaaatacaaagggatattataagtccgctactgctcaaccccaccaaacgtgaacgtaaggaaaattactccattgataattattataaagatgttttgaatacaggaaggtcctcgaccccatcacaccccagaatgcctaagcctcatgtcttccattcccatcaattacaacctccccaattgaaagtcctgtacgaaaaggaaagaatgtggacggcgaagaagactggttatgtaccgaccatggatgacgtaaaagcagcatatggcgatatttcagatgaagaagaaaagaaacaaaaattggaattgttaaaattgtcggttagcaactcgcaaccattaactgaagaggaagaaaagatgaaggccgattgggagtctgaaggatttacaaattggaataaattagaatttagaaaattcatcacggtatctggtaaatacggtaggaactccattcaagccattgcgagagaattggcccctggcaaaacactagaggaagttcgcgcatatgctaaggccttctggtctaacattgaaagaattgaagattatgagaaatatctgaaaataattgagaatgaagaagagaagatcaagcgtgtcaaaatgcaacaagaggctttacgtcggaagttgtctgagtataagaatccattcttcgatttgaaattaaaacatcctccttcttctaacaacaaaaggacgtactctgaagaagaagatcgttttatccttctcatgttattcaagtatggcttggatagagatgacgtatacgaattagtgcgtgatgaaattagagattgtcccctattcgaattagacttttacttcagaagcaggacacctgtagagctagccagaagaggaaatacattactgcaatgcttggaaaaggaatttaacgcagggattgtattggatgacgccactaaagatagaatgaagaaagaagatgaaaatggtaaaaggataagagaagaatttgcagatcagaccgctaatgagaaggagaacgttgatggagtagagagcaaaaaagcgaagattgaggatacgtcgaatgttgaaactgaacagttggtagcagagaaaattccggaaaacgaaaccactcattaa

SEQ ID NO: 79299 - DNA, 1170 bp, Saccharomyces pastorianus
  modified_base (93)..(93): a, c, g, t, unknown, or other
atgacggttggaaaattgcaaaagctaagtacggttcagaatttattgcggcagtcaacaagaataatatattcgctactcagttccatcctngaaaaatcaggtaaagctggtttgaacgtcattgagaattttttgaagcaacaaagtcctccgattccaaactatagtgcggaagagaaggaactcttaatgaatgactattcaaattatggtctaacacgcagaattattgcttgtcttgatgtacgtactaatgaccaaggtgatttggtggttactaaaggtgatcaatacgatgtacgtgaaaaaagtgatggtaaaggtgttagaaaccttggtaagcctgttcagttggcacagaaatattaccaacagggtgcggatgaagtaacatttttgaatataacttcttttagagattgtcctttgaaggatactccgatgctagaggttctgaaacaagccgcaaagacagtctttgttccattgacagtcggtggggggatcaaggatattgtcgatgttgatggaaccaaaatacctgctttagaagttgcaagtctatacttcagatctggtgctgataaagtatcgatcggtacggatgcagtctatgcagccgaaaaatactacgagttgggtaacagaggagatggaacgtcaccaatagagacaatctcgaaagcatacggtgctcaggcagttgttatttctgtcgaccctaagagagtatatgtaaattcacaagcagatacgaagaacaaagtcttcgagacagaatatccgggccccaatggagagaaatactgctggtaccaatgtacaatcaaaggtggaagagaatctagagaccttggtgtgtgggaattaacaagggcatgtgaagctctaggtgctggggagattttattgaactgcatagacaaggatggctctaattctggttatgatctggaattgatagaacatgttaaagatgcggtcaagattcccgtcattgcatccagtggcgccggtgtacccgaacatttcgaagaggccttcctaaagacccgcgcagatgcttgcttgggtgcaggtatgttccacagaggtgaattcactgttaacgatgtaaaggagtatttactagagcacagattaaaggttagaatggatgaagagtaa

SEQ ID NO: 79300 - DNA, 165 bp, Saccharomyces pastorianus
atgccggtcgttcacgtgattgacgttgaaagtggtaacctacagtcactaaccaatgcaattgagcatttaggttacgaagtacaactggtgaaatcaccaaaggattttaacatatcaggcacgtcgagattgattttgcctggtgtcggaaattatggccat

SEQ ID NO: 79301 - DNA, 150 bp, Saccharomyces pastorianus
  modified_base (136)..(136): a, c, g, t, unknown, or other
ttttgctgcattctgaattcagaaaagaaaaaaaacctagaaaatgacggttggaaaattgcaaaagctaagtacggttcagaatttattgcggcagtcaacaagaataatatattcgctactcagttccatcctngaaaaatcaggtaa

SEQ ID NO: 79302 - DNA, 159 bp, Saccharomyces pastorianus
atgggtgctgtcttcagagctgataagcaattgctcaagttccagacaaattattatcgtgaggaacagaaaagaagagaaaagattatggatgaagctgctgagagaggcctttttctggaggatgagagtttgaactcttcccggtcaactacatga

SEQ ID NO: 79303 - DNA, 1461 bp, Saccharomyces pastorianus
atgactgacccaacaaaaacaaagctgaccttgagaggttccaaaactacgaaagaacaagaagaagaattgttaagaaaaatcgataacgccgatctggaatataagcaaaaagtagatcattctaattctttgagaaacacatttataacgaaggagagacctagaattgttcaagaattaaaagatttgattttagaaatagacacagcgatgactatccaattgcagaagtacacgatatggacggaaaatttggttctgaatacaggtgttacaataagcccattggactccaccaaatctatgaaatcatttgctggatctgtttccaatgaacgtgatctttacagttttttgaacaagtataaccaaacaggaaaacattccctactgatcaacaaaaacttgatccctgtatcatacaaaaagcatccatcaatgaatcatggtcagaaaaataagagccctccaaagtttgccgtggacccttcaagaaactccatcccgaagagaatgatatccactcataatgaatctccatttttgagcagtaatagtaacactgccgctgttccgaatgctaatcttaacagtgctacaccgtccttaaataccaacaaacaattaccacctactatggcttcatctatttcttccactagcaatgcggctggcgctatgtcaccgtcttcttccattgtaacaagcgacaccacatcatccataacaaagaccctggatcctggcaacaatagtccacaaattccagaagaattgattaactctttagactcggatcgcccgatttctcacattcagactaacaacaatatgccacccggtgttcaaaaaaatttcaaaacattcggtgtaccgctagaatcacttatagaattcgaacaagacatggtccctgcgatagtgcgccaatgcatatacgttatcgataaatttgggcttgatcaagaaggaatttatagaaaatcggcaaatgtacttgatgtcagcaagttgaaggaggaaattgataaggatcctgcaaacatttccatgattctaccatcaaagccacattctgattcggatatttatttagtaggatcactgctgaaaactttttttgcgtcgctgcctgatagtgttttaccaaaggccctatcatcggaaatcaaggtttgtttacaaattgaagacccaacaacaagaaaaaattttatgcacggactaatatataacctccccgacgcacaatactggacgttaagggctcttgtctttcatttgaaaagagtgttggcacatgaagcccaaaacagaatgaatttaagggctctttgtataatttggggtccaactattgcgcctgcaaatccagatgacgctaatgatgtaaattttcaaattatggcaatggaagtattattagaggtttcagatcaagcttttgagcctgaataa

SEQ ID NO: 79304 - DNA, 540 bp, Saccharomyces pastorianus
  modified_base (365)..(365): a, c, g, t, unknown, or other
atggaagagactgcgaagaaaccagctagtgccacagtaagtgcgaagtcgtcgcacgatggtggcaccgacgatttggcgcacctttttagcacgccagagatcaagaaggtgctaaattccgatgtggcgattaacgctttgttgagccgtttaaagcagtcgttgttgacttgtgaagagtttatgaaatttattagaaagaaatacgccttcgaagaagagcacgtccaggagctctccaagcaatataagcactttttcaacattcagggttccacaaattcatccttaaaaaagatgattcacgaagttttgggattcgatggcaagatggctcaagtaaagcagagttatatcaccgncttgcagaaaatgtactccgagattagtagtcttttattaacaatgacaaaaattaagaaagtctgtcaaggtagaacagtaaaaggctggaaaaggatgtttctgatgccatacacagcgcagaacaggcgcaatctcgttacaattcgttgtgccaagattgggacaaattga

SEQ ID NO: 79305 - DNA, 1473 bp, Saccharomyces pastorianus
atgtttcccagagcttctgcattggccaaatgtatggcaactgttcatcgtcgtgggctactcaccagtggtgcacaatcgctagtctccaaaccagtttcggagggagatccagagatgtttgacatcttgcaacaagaacgtcacagacaaaaacactctatcacccttatcccatcagaaaacttcacctcgaaggccgttatggatttgctaggttctgagctccaaaacaagtattctgaaggttatccaggtgaaagatactacggaggtaacgaaatcatcgataagtccgaatccttgtgtcaagcaagagctctggaactgtacggattagaccctgccaagtggggagttaatgttcaaccattaagcggggcacctgccaatttgtatgtttactccgctatcatgaacgttggtgaaagattaatgggattggatttgccagatggtggtcacttgtctcacgggtaccaacttaagtcaggaacgccaatttctttcatttccaaatacttccaaagtatgccataccatgtcgaccacactacggggctaatcgattacgataacttgcaagtattggccaaggcattcagaccaaaggtgatcgtggccggtacttctgcgtactcgagattaatagactacgctagattcaaggaaatttcccaagaatgcggcgcatatttgatgagtgatatggcacacatatccggtttggtggcagccaatgttgtcccatctccatttgaacattccgatatagttaccacaaccactcacaagtccttgagaggcccaagaggtgctatgattttcttcagaaagggtatcaagtctgtcaccaaaaagggcaaggaaatcccatatgagttagaaaagaaaatcaacttctcagttttcccaggacatcaaggtggtcctcacaaccatactatcggtgcaatggcagtggcattaaagcaagcgatgtctccagaattcaaagaataccaacaaaaaattgtcgacaacagcaaatggtttgctcaggaactaaccaagatgggttataagttggtttccggcggtaccgataaccacttgattgttattgacttatccggtactcaggtagacggtgcccgtgtggagacaattttaagtgccttgaacattgctgctaacaagaacaccatcccaggtgataagagtgctcttttcccctttggtctaagaatcggtactccagcaatgaccacgagaggatttggccgtgaagagttttctcaagtcgcaaagtacattgattctgccgttaagctcgctgaaaatttgaaaactttggaaccaacaacgaaactagatgcaagatcaagactcaatgagttcaagaagttgtgtaatgaatctagtgaagtcgctgctttgtctggcgagatttccaagtgggtcggtcaataccctgtcccaggtgatatctaa

SEQ ID NO: 79306 - DNA, 144 bp, Saccharomyces pastorianus
atgattctctccgttatctgctggttcttagtccactgtctgttctgtcccccttctgtccaagagatagaatataaaaaagactcattatttttttttaggtacttcgcttattggtggtcaataagaaaaaaaaaatactaa

SEQ ID NO: 79307 - DNA, 933 bp, Saccharomyces pastorianus
atgaatacacttcatgcaggttcatctactgatggcataaatgtcggaaacgcaggacgaactagagacacacaaactggcgtagaaggggaaacggaaatagggtctgacgaggaagatagcatagaggacgagggaagcagcagtggaggaaatagtacgacagaaagactagtaccacaccagctgagggaacaagcagccagacatataggaaaaataggaagacattttaatattcttgatagactttttaagaaacgtacacaacagtcttcggatatacaacaaggtgccatgtttgatggtgtctttagcaatttaagcgcaaaaccagataccacagagactgaaggtaataacgaacaagacataccacctacatacgacgaagctgctgctgatatggccccctcgtattatggaatggatttgaacaattcagatatctactacgacgaaatatgcattgaggggcttcctgtaggaaatatagcaaatttattatggaatatcatcgtaagcacgagttttcagttcattggatttttaataacctacattttacacacatctcacgcagcaaagcaaggttcaaggtttggattagggttaacgttcattggatatggttattcaatgattcccaatgatgttacttcaaaagtcggcaaaaataaaagcttaaatagaatggaattagaggatccaaatgaattcgatgatgttcgtctaaattcacaatcaacgacacaagataaatttgaatcacatttgaatcacggtctggatgaagaaaaacaaaacataccatggttggctgtttttgtggcatttcttgggctatttatcaccctgaagagtatatacgactacattcaagtcaaaaaattggaaaagaaatacctcaaccaaagtcaaaatcaagcataa

SEQ ID NO: 79308 - DNA, 1110 bp, Saccharomyces pastorianus
atgctttcctacgatgatcttcacaagcttttggaggaaaattatgaggactgcagcacttattggtttctggtatccctttcggcagctactcttagcgacttgcaaattgaaatagagtatgaggaaggagtcacttttactggagagcagttatgcactctttgcatgttatctcggcaatcctttgacgaccttagtaacagcgacatatttcgaatcatgacatactattgtttgcaccgttgttacgcgcagtttgcggatacgagaacttcatatagactttcttgtgaagccgtgggcctcatcaagatagctggattccatcgggaagaaacctatgaattccttcccttcggtgaacaacaactcagaaggaaagtttactatttacttcttatgacagagagattttactctgtatatattaagtgtgtcacgagcctagatacaacaatagcgccaccactaccagaggttgtaacagaccctcgtctttctctggaaagcttccttgaggtgattagagttttcactgtacctggaaagtgtttttatgatgctttggctactaactgtgtcgatgattcctgcaccgaagactctctaaaaaggatatggaacgaacttcataccacatcacttgatatagagccatggtcttatggctatgtggacatttcattttctcgacattggattagggcgctggcttggaagctagtgtttcagatgaatggtaccaagtttttctcaaacgccaataatgctcacatattggtcgaaattgctagagacatgttgggagacacgtttttaactccgaaaaacctgtatgatgtacatggtcctggaataccaatgaaatcattggaagtagccaatgcattggtagatatcgtaaataagtatgatcacaatatgaagttggaggcttggaatattttgtgcgatgtatctaagttcgttttctccctgaaacattgcaatcataaaatgtttcaaaggttttcaactaaatgtcagagtgctctaatcgatttgcctatctctagaccactgcgcctaaatgatgattccaaagatgaagacgacataattccttaa

SEQ ID NO: 79309 - DNA, 153 bp, Saccharomyces pastorianus
atggggaaaacgagaaaattaatagcaccaaagaggaaaactgaagggagccaccgctaccaccatgaccatcataataaaaaaatgaaaatgaaaacgaaaacaaaatcgaataaactttttgaaagtggacaagatagctttgataattag

SEQ ID NO: 79310 - DNA, 1182 bp, Saccharomyces pastorianus
atgatccaagataaggattctgccgctgatgcggacgatttagaaagcgagttgaatgccatgtatagtgattataaaactagaaggtcggaaagggatgccaagtttagagctaagcaagcacgtggtggcgataatgaggaagaatggaccggttttaatgagggaagtctagaaaagaaagaagaggaaggtaaagattatatcgaagacaatgacgatgaaggtgtcgaaggagactccgatgatgatgaagccatcaccaatttgattagcaaattgaagggacaagaaggtgatcacaaattgagtagtaaggcacgtatgattttcaatgatccgatatttaataacgttgaacctgatttgccagtaaataccgtcaatgatggcataatgagttccgagtctgttggtgatatttctaaattaaataagaaaagaaaacatgaagaaatgcaccagaaacaagatgaagcagattcttcggatgagagttcaagtgatgactccgatttcgaaattgtggccaacgataatgcatcagaagaattcgattctgattatgattcagaggaagaaaaaaatcaaacaaagaaagaaaagcattccagagacattgatattgctactgttgaagccatgactttggcacatcagttagcattgggtcagaaaaacaagcatgatcttgttgatgaaggtttcaatagatacaccttccgtgacaccgaaaatttgccagattggtttttagaagatgaaaaggaacattccaagataaataagccgattactaaggaggcagcgatggcaattaaagaaaaaataaaggcaatgaacgcccgtcctattaagaaggttgctgaagctaaggcaagaaagaggatgcgtgccgtagctcggttagaaaagatcaagaagaaggcgggcttgattaacgatgattcagacaagacagagaaggacaaggctgaagaaatttctagattgatgcgtaaggttaccaaaaaaccaaagaccaagccaaaggttactttggttgttgcctcaggtaggaacaaaggtttggcaggtagaccaaagggcgttaagggtaagtataagatggttgatggtgtcatgaagaatgaacaaagagccctaagacgtatcgcaaagaagcatcacaagaaaaagtag

SEQ ID NO: 79311 - DNA, 591 bp, Saccharomyces pastorianus
atgatggtgctcctaatgttggtttgggttgggttcaggatgctttcacccaaatctcaattaaccttacaagctttgaagttggccgtcgaaaatttggtggtgaacggtacttttgttactaaaattttcagatccaaggattataataaattgatttgggttttccaacaattgtttgagaaagttgaagccacaaaaccacccgcatcaagaaatgtttctgcagaaatttttgtagtgtgtaaaggtttcaaggcaccaaagaggctggacccaagattactggatccaaaagaagtttttgaagaattgccagatgggcaacaaaatatggagtccaagatttataatcccgaaaaaaaagttagaaaaagacaaggttatgaggaaggtgataatttactgtatcatgaaacctcaattttggattttgtcaggacggaagacccaataagcatgcttggagaaatgaataagtttacaattgatgagaatgaccatgaatggaagatcttgaagaaattgaaacaaaccacagacgagttccgttcctgtattgaagatttaaaagtcttgggtaaaaaggat

SEQ ID NO: 79312 - DNA, 477 bp, Saccharomyces pastorianus
atgggtaagacacaaaagaagaatagtaagggacgtttagatagatactattatctagcaaaggagaaaggttatcgtgctcgttcatcctttaagattattcagattaatgaaaagtatggccacttcttagaaaaatcgaaggttgttattgatctgtgtgctgctcctggttcatggtgtcaagttgcatccaaactctgtcctgtcaactccttaattattggtgttgatattgttccaatgaagccgatgcccaatgttataacttttcaaagtgatattacaacagaagattgtagatcaaaattgaggggttatatgaagacttggaaagctgatacagtgttgcatgatggtgctcctaatgttggtttgggttgggttcaggatgctttcacccaaatctcaattaaccttacaagctttgaagttggccgtcgaaaatttggtggtgaacggtacttttgttactaa

SEQ ID NO: 79313 - DNA, 1065 bp, Saccharomyces pastorianus
atgaacgccgacttcaacgccaccttgtactccatggccaacaaacatttcaatgactacgattttgtctccgctgaaaacgcagacgatgatttcaagctttctatttacttgccctccgccatggacgagcctgtagtatacaatggtaagaaagccgatatcgctgacgctgatgtttttgaaaaatggttgcaagtggaagccttgccctactttggtgaaatcgacggttccgttttcgcccaatacgtcgaaagcggtttgcctttgggttacttgttctacaatgacgaggaagaattggaagaatacaaacctctctttaccgagttggccaaaaagaacagaggtctaatgaactttgttagcatcgatgccagaaaattcggcagacacgccggcaacttgaacatgaaggaacaattccctctatttgccatccacgacatgactgaagacttgaagtacggtttgcctcaactctctgaagaggcgtttgacgaattgagcgacaagatcgtgttggagtctaaggctattgaatctttggttaaggacttcttgaaaggtgatgcctccccaatcgtgaagtcccaagagatcttcgagaaccaagattcctctgtcttccaattggtcggtaagaaccatgacgaaatcgtcaacgacccaaagaaggacgttcttgttttgtactatgccccatggtgtggtcactgtaagagattggccccaacttaccaagaactagctgatacctacgccaacgccacatccgacgttttgattgctaaactagaccacactgaaaacgatgtcagaggcgtcgtaattgaaggttacccaacaatcgtcttatacccaggtggtaagaagtccgaatctgttgtgtaccaaggttcaagatccttggactctttattcgacttcatcaaggaaaacggtcacttcgacgtcgacggtaaggccttgtacgaagaagcccaggaaaaagctgctgaggaagccgatgctgacgctgaattggctgacgaagaagatgccattcacgatgaattgtaa

SEQ ID NO: 79314 - DNA, 225 bp, Saccharomyces pastorianus
atgaaaacgcgcccatataaatatccgctatcaacagaacccccaaccccctcatcagtgcccaactcagcttccgtaaaccacaacaccaccactaatacaactctatcatacacaagatgtcattcgacgacttacacaaagccactgagagagcggtcatccaggccgtggaccatatctgcgacgatttcgaggttacccccgagaagctggacgaattaa

SEQ ID NO: 79315 - DNA, 156 bp, Saccharomyces pastorianus
atggaaaaaaaaaaaattttagacgcggcgcttgcaccccgcattataagtggtgtgccgacggacggtcaacccctttcagggggccccccaatcttgggcgtggtgtcacaccacgctcaaacggtgggcactaatgaaaacgcgcccatataa

SEQ ID NO: 79316 - DNA, 885 bp, Saccharomyces pastorianus
atgcctatgatcaaggttgttgcattaaccaacgataccgtcggaacgtacctatcgcattgctacacgtccgataacacggactcaatgacgtccggagaaatctcggagccggtcatcggatgtattttcggtaccggtaccaatgggtgctatatggaggagatcaacaagatcacgaagttgccacaggaattgcgtgacaagttgataaaggagggtaagacacacatgatcatcaatgtcgaatgggggtccttcgataatgagctcaagcacttgcctactactaagtatgacgtcgtaattgaccagaaactgtcaacgaacccgggatttcacttgtttgaaaaacgtgtctcagggatgttcttgggtgaggtgttgcgtaacattttagtggacttgcactcgcaaggcttgcttttgcaacagtacaggtccaaggaacaacttcctcgccacttgactacacctttccagttgtcatccgaagtgctgtcgcatattgaaattgacgactcgacaggtctacgtgaaacagagttgtcattattacagagtctcagactgcccaccactccaacagagcgtgttcaaattcaaaaattggtgcgcgcgatttctaggagatctgcgtatttagccgccgtgccgcttgccgcgatattgatcaagacaaatgctttgaacaagagatatcatggtgaagtcgagatcggttgtgatggttccgttgtggaatactaccccggtttcagatctatgctgagacacgccttagccttgtcacccttgggtgccgagggtgagaggaaggtgcacttgaagattgccaaggatggttccggagtgggtgccgccttgtgtgcgcttgtagcatga

SEQ ID NO: 79317 - DNA, 606 bp, Saccharomyces pastorianus
atgtcattcgacgacttacacaaagccactgagagagcggtcatccaggccgtggaccatatctgcgacgatttcgaggttacccccgagaagctggacgaattaactgcttacttcatcgaacaaatggaaaaaggtctagctccaccaaaggaaggccacacattggcctcggaaaaaggtcttcctatgattccggcgttcgtcaccgggtcacccaacgggacggagcgcggtgttttactagccgccgacctgggtggtaccaatttccgtatatgctctgttaacttgcatggagatcatactttctccatggagcaaatgaagtccaagattcccgatgatttgctagacgatgagaacgtcacatctgacgacctgtttgggtttctagcacgtcgtacactggcctttatgaagaagtatcacccggacgagttggccaagggtaaagacgccaagcccatgaaactggggttcactttctcataccctgtagaccagacctctctaaactccgggacattgatccgttggaccaagggtttcgcatcgcggacaccatcggaaaggatgtcgtgcaattgtaccaggagcaattaa

SEQ ID NO: 79318 - DNA, 330 bp, Saccharomyces pastorianus
atgttcttattggccatttggtatggattatcactaggtggcctgtccgcggtttcaagatcagttttcagtttgattgtacctccaggaaaagaatccacgttttttagtatgttcagtatcacagataaggggtcgtccatcctgggacccttccttgttggactgcttaccgataaaacgcataatattcgctattcgttttatttcttctttttgcttttgatgctatcattgcctgtgctaaactgtttggatgtcaagagaggtagaagagaggctgaagaactcagtcaagttttacctgaaagtgaaagaaggttggattag

SEQ ID NO: 79319 - DNA, 384 bp, Saccharomyces pastorianus
atgtccttcggaggtgacactaacctgattttagccgcattgagagaaattgtcgctaacgaagccgctaccgtcaatgttgcagaaggtactttggccgccaaggaaggtgataacgttaccggtgaagccaaagaaccatctccattggataagtacttcgttcgttccaagagctggtcaaactggttaccagaaacttttgaaactgaaattaatattgaaaaagaactggtcggcgatgcattggaccaattcatgatatccctaccacctgttcctcaacaagaagaggaatcatccactgaactcgcttctcaagaacaagaaaccaaagaagactctgcgccggttgctgccggtgaatccgagtcttccttataa

SEQ ID NO: 79320 - DNA, 1044 bp, Saccharomyces pastorianus
atgaagatcttttgggatcctagatcggtaatagaacatcaggattactctggacctgctaacgtgtttcatcttcttttcacttctctgcccacgatgtctgctgaaaccgccgccgcaaacactgctactgccccagtcccagaagtgcaagaacaagagagctccaagagcaagcaagtcaacttgacgccggcaccattgcccacatcttccccatggaaacttgctcctactgagatccctgtttctactatctcaatagaagacttggatgccacaagaaagaagaagaacagaacacccactccgaaatcatcgactgctaccaagtgggttcccatcaaggcctccattaccgtctctggcaccaaaagatccggttccaagaatggtgcaagtaatggcaacagcaacaagagcaaaaacaacaaaactgcagcatcgtcgacatcgtcgagtaatgctaacaggaaaaagaagcatcaccaacataatgctaagaagcaacaacaaatgaagaaagatggctttgaatcggcagtaggtgaggaagattcaaaagacgctacctctcaagaaaatggtcaatctacacaacagcaacaaccacctcaccaccgtaatcatcaccacagtcatcaccataacagcaatggtcctcaaaggagaaagttccacaacagtaataacgccggtatgcctcagaaccaaggcttcccaccacagtttaaaccttaccaaggacgcaacgctcgtaataacaacaacaaccgctctaaataccacaaccacttccatcacaaccaacaacatcctcaacaacctatggtcaaattacagcaacagttttatccagtccaaccagtgttaatggccatcaacaacattgctagacaaattgaatactatttcagcgaagaaaacttgaccgtcgacaattacttaaggtccaaactctccaaggatggttttgctccattgtctttaatctctaagtttacagagttgttaacatgtccttcggaggtgacactaacctga

SEQ ID NO: 79321 - DNA, 150 bp, Saccharomyces pastorianus
atgcctgcgagggtggagatatgttgtgcaaggtgtggtggacacttgggacatgtgtttgaaggtgaaggctggaaacagttgctaaacttgcccaaggacaccagacactgtgtgaacagtgcgtctttaaacctcaagaaggattaa

SEQ ID NO: 79322 - DNA, 357 bp, Saccharomyces pastorianus
atgaataagtggagcaggctgtacgctataactgtacgcaggacttttccagggagaagaaacattgtactgacgcagtactggaataagagcaagaaaatgagtgacgaatcgaatgacgtgaagtggaacgatgccctgacaccattgcagctgatggtgctgagagataaggccactgaaaggcccaacaccggtgcgtatttacacaccaacgagtccggtgtctaccattgtgccaactgcgacagaccgttgtattcgagcaaggccaagttcgacgctcgtagtggatggcccgcattctacgaagaggtatcccctggagccatcacatatcatcgtgacaattcttaa

SEQ ID NO: 79323 - DNA, 1092 bp, Saccharomyces pastorianus
atgtcaactattgaatcattaattcaaaaaatcgcaggatacgtcatggacaaccgtagtggtggtagtgacgcctcgcaagatcgtgctgctggtggtggttcatcttttatgaacactttaatggcagactctaagggttcttcccaaacgcaactaggtaaactagctttgttagccacagtgatgacacactcatcaaataaaggttcttctaacagagggtttgacgtagggactgtcatgtcaatgctaagtggttctggcggcgggagccaaagtatgggtgcttccggcctggctgccttggcttctcaattctttaagtcaggtaacaattcccaaggtcagggacaaggtcaaggtcaaggtcaaggtcaaggtcaaggttcttttactgctttggcgtctttggcttcatctttcatgaattccaacaacaataatcagcaaggtcaaaatcaaagctccggtggttcctcctttggagcactggcttctatggcaagctcttttatgcattccaataataatcagaactccaacaatagtcaacagggctataaccaatcctatcaaaacggtaaccaaaatagtcaaggttacaataatcaacagtaccaaggtggcaacggtggttaccaacaacaacagggacaatctggtggtgctttttcctcattggcctccatggctcaatcttacttaggtggtggacaaactcaatccaaccaacagcaatacaatcaacaaggccaaaacaaccagcagcaataccagcaacaggccaaaactatcagcaccaacaacagggtcagcagcagcaacaatgccactccagttcattctcagctttggcttccatggcaagttcctacctgggcaataactccaattcaaattcgagttatgggggccagacaacaggctaatgagtatggtagaccgcaacagaatggtcaacagcaatccaatgagtacggaagaccgcaatacggcggaaaccagaactccaatggacagcacgaatccttcaatttttctggcaacttttctcaacagaacaataacggcaaccagaaccgctactga

SEQ ID NO: 79324 - DNA, 237 bp, Saccharomyces pastorianus
tttaaacgacggcagtgcaagcttgcatgcctgcaggtcgagcctagattgacagacgaaataagaatctcgctgggtgaaaaagttaaaattctggccactcataccgatggatggtgtctggtagaaaagtgtaatacacaaaagggttctattcacgtcagtgttgacgataaaagatacctcaatgaagatagaggcattgtgcctggtgactgtctccaagaatacgactga

SEQ ID NO: 79325 - DNA, 198 bp, Saccharomyces pastorianus
atgatcataacaggaaaattggtgaatgacagtattttatttttacgatctacgctttttgaaattatggttttaccaaatggagacggtagaagtttaattaaattcaataagaaaacaggatctactaaaacgctgaccaagcttgctacagaaatccaaattattttacaaaaagaaggtgttttggacaaataa

SEQ ID NO: 79326 - DNA, 1848 bp, Saccharomyces pastorianus
atgcctgcaggtcaatatcaaaccattaaggattccaaaagtatcaaagatttacctcgtgaaaatacctatctatatccactggctgactcgaacaaccatactagcgcctctatcgatgattcaatcctacaaaacttggtggtactttggcatggtagacacgccgatgacatcgtatctaaactgaaagagaatggaaccaacaaagaaaaaattctatatgcgctactataccgtttcaaactggactctgtaaggggatcgaataagaagaaccgcaataagataaagaaaaccaaaaaaaataaaagatctagcacactttcgtcatcgtcatcattattattgaacaaccgaagcatacaatctacgccacgcagacgtacatccaagaggcattccagggaattctcttctagcaggaagagatcgttctttttactgtcctcgaatcctaccgatagttctccaatacctttgagaagtagtaaaagaattacacatattaacgtagcgtctgcaaatacccaagcaacgccaagtggtgtcccgaatcctcacaagaggaactcaaaaaaacggtcaagcaaaagattatcttatatgcctaatacaaaaagaagctcactaacatcaaaatcattatcaaactttactaacctaatagatgatgatgattgggagtacattgaaaaggatgcaaagagaacaagttccaacttcgctacactgattgatgaaatatttgagcctgagaaatttgaattggcgaaaagagaaaaggctgaacttcaaagaaaagttcaggaagcaaaaaggcaatcagtgaatgcgcagaagattaatgaggacgagtttggatccgaagtttctgatggaatgaaagagctgaaaaaaataaacgacaaagtatcgtccccgttgataaattacgaattttcgcaacaagaactattgcaagatatagacaccttactaacgaatcgttatcaactttcgtcatatactaggcctatttcgagactggatcccggattaacgcctgttaccgagacacttcctaacaacctaaaagaaaaaacagctctgctgcaggatactgaaaagaaaataatagaaacgatacgcagatccaaatttttaggatcgctactaaatgttagagggggactatcgccagggaaaagtgaactggcacctatcgaagagtctcccatagtttcaaccacaccactaatatataatgatcgaatggaaccccgtaggatatccgatgtggaagtcccacatttcacgaggaaatcaaaacactttactactgctaataatcggcgctcagtcttatctttgtatgcgaaggattcaatcaaagacttaaacgaatttttaataaaggaagatcctgatttgcctccacaaggaagcactgattatgaaagtaggagcgaagatcccgaaatagccgagagtatcactgattcaaggaatatacaatatgatgaggatgatagtaaggatggtgataatgtgaataatgataatatattgagtgactttcctcaaggcgttggcatatcacaggaatacgacatgaaggataaaaatccaaaccaatctccaatatcaaaaagcgcagagcccacactggtagtgaaacttccgtctttgagttctttccaagggaaaaacgccagtgggttgggcctataccaaagagagccttctaaggtaaccttaccgagccttacaagtaataacagcagcgtcggagaaaacatagaggatgaggcggaacaagggactgaaagtgagaaaatcactgcttccctgtcagacgatgacgtg

SEQ ID NO: 79327 - DNA, 219 bp, Saccharomyces pastorianus
atgttttctccgacgctgctgttattacttgtaaggctcggtaaggttaccttagaaggctctctttggtataggcccaacccactggcgtttttcccttggaaagaactcaaagacggaagtttcactaccagtgtgggctctgcgctttttgatattggagattggtttggatttttatccttcatgtcgtattcctgtgatatgccaacgccttga

SEQ ID NO: 79328 - DNA, 135 bp, Saccharomyces pastorianus
atgatcatattggtgatgttaaacaccaggtttttcaacccgtattgcttccagccttctagtagtttatgtaggccctcgtatagtctcttttcaggtattttggcatgtatttcaagttctaagatttacctt

SEQ ID NO: 79329 - DNA, 1185 bp, Saccharomyces pastorianus
atgcaagccactacaccaacagaccctagggttttggatacgatgttgaagttttatacgggactttatggtaatcctcattccaacactcactcttacggttgggaaacaaatactgctgtggaaaatgctagagcccacgtagcaaagatgatcaatgccgaccccaaggaaataatattcacttcgggagcgaccgaatctaataatatggttcttaagggtgtcccaagattttataagaagactaagaaacacatcatcaccactagaacggaacacaagtgtgtcttggaagccgcacgggccatgatgaaggagggatttgaagtcactttcctgaatgtggacgatcaaggtcttatcgatttgaaggaattggaagatgccattagaccagatacctgtctcgtctctgtgatggctgtcaataatgaaatcggtgtcatccaacctattaaagaaattggtgcaatttgtagaaagaataagatctactttcataccgacgccgcacaagcctatggtaagattcacattgatgtcaatgaaatgaacattgatttactatcaatttcttctcacaagatttacggtccaaagggaataggtgccatctatgtaagaaggagaccaagagttagattagaacctttactatccggtggtggccaagagagaggtttaagatctggtactttggcccccccattggtagcgggatttggtgaagctgcgagattgatgaagaaagaatttgacaacgatcaagctcacatcaaaagactatccgataaattagtcaaaggtctattatccgctgaacataccacgttgaacggatctccagatcatcgttatccagggtgtgttaacgtttctttcgcctacgtggaaggagaatctttattgatggcactaagggatatcgcattatcctcgggttcagcctgtacatctgcttccctagaaccttcttatgttttacatgcgctgggtaaggatgatgcattagcccattcttccatcagatttggtattggtagatttagtactgaagaggaggtcgactacgtcgttaaggccgtttctgacagagtaaaattcttgagggaactttcaccattatgggaaatggttcaagaaggtattgacttaaactccatcaaatggtcaggtcattga

SEQ ID NO: 79330 - DNA, 357 bp, Saccharomyces pastorianus
atgttgaaatcaactgctacaaaatcgataacaagattatctcaagtttacaacgttccagcggccacatatagggcttgtttggtaagcaggagattctattcccctcctgcagcaggcgtgaagttagacgacaacttctctctggaaacgcataccgatattcaggctgctgcaaaggcacaggctagtgcccgtgcgagtgcatccggtaccaccccagatgctgtagtagcttctggtagcactgcaatgagccatgcttatcaagaaaacacaggtttggtactcgtcccatatatcttgacatgcaagccactacaccaacagaccctagggttttggatacgatgttga

SEQ ID NO: 79331 - DNA, 1059 bp, Saccharomyces pastorianus
atgactcaaatttctgaagtgattgagtatgaaatgcagcaacctatcccaacttatttgcctaaggcgcatctagatgactcgggtattgaaaaaagtgatgacaaattcttcgaaattgaagaagaacttaaggaagaattgaagggcagcaaaaccggtgatgaagatgtcggtaataataatccatccaattatattccaaaaatcgagaagcccccagcattcaaagttattagaacatcgcctgtgagaattatcggaaggacttttgaagacactagaaaatatgaaaatggctctccatctgatatttcgttcacttatgatactcacaacaatgatgaacctgacaaaaggctgatggaattaaaatttccatcccaagatgaaattccggatgacagattctatactccagcagaggaacccactgctgaatttccggtggaagaacttccaaatactccgcgaagtattaacgttacaacttcaaataacaagagcacagacgataagttgagtagcggtaatattgatcaaaaacctaccgaactgttagatgatttagaattcagttcatttaatatagcatttggaaatacctccatgagtactgacaatatgaaaatatcatccgacttaagttcgaataaaaccgtgttaggaaatgctcagaaagttcaagagtctcctagtggaccattaatctatgttttgcctcagagtagcacaaagcatgagaaagaggggttccttcgaaagaaacaaaaagacgagcccatttgggtttcccctagcaaaattgactttgctgatctaagtaggagaactaaagcattgacgccagagcgtaatactgtgtctttgaaaaacaacgacagtagaaaatacaaatatactggagagggatctatcggtaatatgacaaatatgctgttaactaaagatgcttcgtacgcgtacttaaaagattttgttgcgttgagtgacgatgaagatgaagatgggaaacagaattgcgctgttggtggcccagagaaactgaaattttattga

SEQ ID NO: 79332 - DNA, 312 bp, Saccharomyces pastorianus
atggttggtcataatcacgccaaaggtattcggctatccgctcgtgataaaaatgatgctaacaattggagaccctttatcacggttataggatcttcaaactatacgagaagggcgtattcattagatttggaatcgaatgctctcattattacaagagatgaagagctaagaaaaaaaatgaaagcagagttagataatttattacaatatacaaaacctgtaactctagaagactttcaatcagacccagaaagacatgttggcactggtgtaaagatagctacctccattttggggaaaaaactttag

SEQ ID NO: 79333 - DNA, 1302 bp, Saccharomyces pastorianus
  modified_base (1285)..(1285): a, c, g, t, unknown, or other
atgacgactcgtttgctccaactcactcgtcctcattacagattattatccctacctctccagaaacccttcaatataaaaaggcagatgtccgctgcgaacccttctccatttggcaattatttgaacacgatcactaagtccctacaacagaatttacaaacatgctttcatttccaagcaaacgaaatcgatataatcgaatctccatctcaattttacgatctcttgaagacaaaaatacttaattcacaaaatagaatattcattgcgtctctgtatttaggcaaaagcgagactgagttggtggactgcatatcccaggcattgaccaagaaccccaagttgaaagtttcttttctacttgatggccttcgaggaacaagagaattgccttccgcctgttccgccactttattatcgtctttagtagccaaatatgggtcagagagagtggattgccgattgtacaagacgcctgcttatcatgggtggaaaaaagtcttggttcccaagagatttaatgaaggtttaggcttacaacatatgaaaatatatgggtttgataacgaggtcattctttcgggagccaacctttccaacgactatttcaccaacagagaagatagatactatctctttaaatctcgaaacttctccaactattatttcaaattacatcaactcataagttccttcagttatcagattataaagccaatggtggatggtagcatcaacatcatctggccagattcgaatcctactgttgaaccgacgaaaaataaaaggctgtttttaagggaagcatctcaattactagatggctttttaaagagttctaaacaaaaaagcctcccgattactgccgtgggtcaattctccacattagtttacccaatttctcaattcactccactttttcccaaatataatgacaaatcgaccgaaaaaagaacaatattgtcattgctttccactataacaagcaatgccatttcttggacgttcactgcaggatacttcaatattttgccagacatcaaagcaaaactgctggcaacgccggttgctgaggcaaatgtaataacagcttccccctttgcaaacggcttttaccaatcaaagggcgtctcatcaaatttacctggtgcttacttgtacctgtcaaaaaaatttctacaagatgtatgtaggtacagacaagatcatgctattacattaagagaatggcaaagaggcgtagtaaataagccgaatggttggtcatatcacgcaaaaggtnatttggctttccgctcg

SEQ ID NO: 79334 - DNA, 207 bp, Saccharomyces pastorianus
atggcgcggaagaaaaccgagagagctgcaaaattagatgcaatagaaacactacttattacagatagtgtactaaaaaggaacaacgtaaaaaaacgtgaaatatacctagacctaatagagaatagtggaaagaacaatggcaaaatattcgtactcattacttcaaaaatcacagtgagcaacttgacaaaccaacagatatag

SEQ ID NO: 79335 - DNA, 264 bp, Saccharomyces pastorianus
atgattcaccatttgaataagtgcccatcatgcggccattataagagagccaatacactgtgtatgtattgtgttggacaaataagtcatatatggaaaacgcataccgctaaagaagaaattaagccgagacaagaggaggaactttccgaactagaccaaagagtcctatatcctggtagaagagataccaaatacaccaaggatttgaaagataaagataactatttggaacgtcgcgttcggactttaaaaaaggactag

SEQ ID NO: 79336 - DNA, 276 bp, Saccharomyces pastorianus
atgaattctttgatttttggtaaacaattagcatttcacaaaattgtgcctaccactgcaattgggtggttggtaccgctaggaaatccttcactgcaggttccaggccaaaaacaactgggatctatccaccgttggttgagagaaaagctacaacaagatcataaggacactgaagataaagattttttctctaataatggtattctactagcagttcctaaaaaaaaagtatcacaccaaaaaaaaaaggcaaaaactttacggtccaggtaa

SEQ ID NO: 79337 - DNA, 1191 bp, Saccharomyces pastorianus
atgagaggtattccagggagcgtatgggaaggttccgttttggacccagaagacggtattcgtttcagaggtcgtacgatcgccgacattcaaaaggacctgcccaaggcaaaaggaagctcacaaccactaccagaagctctcttttggttattgctaactggcgaggttccaactcaagcgcaagttgaaaacttatcagctgatctaatgtcaagatcggaactacctagtcatgtcgttcaacttttggataatttaccaaaggacttacacccaatggctcaattctctattgctgtaactgccttggaaagcgagtcaaagtttgctaaggcttatgctcaaggaatttccaagcaagattattggagttatacttttgaagattcactagacttgctgggtaaattgccagttattgcagctaaaatttatcgtaatgtattcaaagatggcaaaatgggtgaagtggacccaaatgccgattatgctaaaaatctggtcaacttgattggttctaaggatgaagatttcgtggacttgatgagactttatttaaccattcattcggatcacgaaggtggtaatgtatctgcacatacatcccatcttgtgggctcagcactatcatcaccttatctgtcccttgcatcaggtttgaacgggttggctggcccacttcatgggcgtgctaatcaagaagtactagaatggttatttgcacttaaagaagaggtaaatgatgactactctaaagatacgatcgaaaaatatttatgggatactctaaactcaggaagagtcattcccggttatggtcatgctgtgctaaggaaaactgatcctcgttatatggctcagcgtaagtttgccatggaccattttccagattatgaattattcaagttagtttcatcaatatatgaggtagcacctggcgtattgactgaacatggtaaaaccaaaaatccatggccaaatgtagatgctcactctggtgtcttattacaatattatggactaaaagaatcttctttctataccgttttatttggcgtttcaagggcatttggtattcttgctcaattgatcactgatagggccatcggtgcttccattgaaaggccaaagtcctattctactgagaaatacaaggaattggtcaaaaacattgaaagcaaactatag

SEQ ID NO: 79338 - DNA, 495 bp, Saccharomyces pastorianus
atgcatgaaatgggtgtttgtcatagagatttgaagcctgagaacttactgcttacgcacgatggtgtgctaaaaattacagactttggtaacagcgaatgtttcaagatggcatgggaaaaaaatattcaccttagtggaggcgtttgcggttcatcgccgtacatcgccccagaggaatatatcaaagaagagtttgatccaagacccgtagatatatgggcatgtggtgtcatttatatggcaatgagaactggtagacaattgtggagttctgctgaaaaagacgatccattttatatgaattatttaaaaggacgtaaggaaaagggaggctatgagccaatcgaaagtttaaaaagagccaggtgtaggaatgttatatattcgatgttagatcccgttccgtacagaagaattaacgggaaacaaattttgaacagtgaatggggaagagagataaaatgctgccataatgggcgcgcattgaaataa

SEQ ID NO: 79339 - DNA, 1404 bp, Saccharomyces pastorianus
  modified_base (1384)..(1385): a, c, g, t, unknown, or other
atgactggtatgaatgataataatgccgctattcctcagcaaactccaaggaaacatgcgctatcttctaaagttatgcaactttttagaagcggttcaagatcatctaggcagggaaaggcctcatcgaatatccagccaccttctaatataaacacaaacgttccatcggcgtctaaatcagccaaatttggtttacataccccaaccactgctactcctagggtagtttctaatccttctaatactgcaggtgtgagtaaaccgggcatgtatatgcccgaatattaccagtcggcatcaccatcgcactctagttcatccgcatcattaaacaaccatattgatattaacacctctaagtcatcatcagctgcttctttaacttcgtcagtatcagctttatccttatcacccacatcagccataaatattagctccaaaagtttgagcccaaagttctctcatcatagtaacagcaatactgctattacacccgcgcctactcccactgcttcaaatattaataatgtaaataagataaccaatacaagtacacctatttgtgggaggtttcttgtgcataaagatggtacccatgaacatcacttaaaaaatgctaagagacaagaaaagctaagcacaatgattaaaaacatggttggtgcgagcaaattacgtggtgaggcaaaatctgctgtccctgatataataatggatccaaagacgactttaaaatccaacaagaatcctcctactctttttgcaggcttcatgaagcaggtcgtggatatggatgataaatatccagaaggcgctcccacaagtggcgctttaaatggtcctgaaagggatatatacaggtcagatcaaaaagattccaaaaataatacgcataatatcactactactaaaaaagataggcaatgttttgccgaaaagtatggtcgctgtcaagaagtccttggtaaaggtgcttttggtgtagtaagaatatgtcaaaagaaaaatgtttcttctcaagatggtaataaaagtgaaaagctttatgcagtgaaagagttcaagcgtagaacatccgaatcagcagaaaagtattctaagaggttgacttctgaattttgcatttcttcttcattacaccatacaaatattgttactacactagatcttttccaagatgccaaaggcgagtactgtgaagtaatggaatattgtgcaggtggcgatctattcactttggtcgttgccgccggaaaactagaatatatggaagcagattgtttcttcaagcagcttattagaggtgttgtttatatgcatgaaatgggtgtttgtttcataagagattgtgagagccgtgagagacgttactgcgttacgnncacgagtgggttgtgctaa

SEQ ID NO: 79340 - DNA, 801 bp, Saccharomyces pastorianus
atgtccgaaaatcacgttcctgcctggaaaagaattgctttgaagagacagactataagcagtggtgacgaaagtaaagaaaaaggccaatccaatctaatagatgatgatccactaaatatcactacgcatttatccactggtaatttgacaaagaaagagaaaaaaagaatcattaatggtgagagcaaatcctctaccaaaaaagggaagcgtgtgtcgaaaccagggacgaagaagaaggaaaaattgtcaaaggatgaaaagaattcgaaaaaaaataaaattcttaaagatcaattacgttacctgatagaatttttcaggacaaagtctgagagcaagtttcccaccggaatcctagaattggaaagtgtaaaagaaaattacggcgactccctgatcaaagacgagccatcagagtctggtgttgttgaagtttggaaattttccaagcaaaagcaaaattggcttattaagcattttttcaacttggacgaaatcccctcagtatataatgatcttttgcttttatatttcagggacttacaaggtaaatcaaaagaagaactaatatcaaaatgcaaaggaaaactgaagcaatggaacgactatgtggaagatcaagaaacaaaaataaaagcgttaattgcagaggataaggctagcgaaccaattaatggtgaagaaaaagaagaaggtgaaaaagacggtaatgccgaacaagggaagcaaaagaggtacaagacgagcaagaggaagtacaaatgccgaataaagagcttgttcaaagaagtctga

SEQ ID NO: 79341 - DNA, 408 bp, Saccharomyces pastorianus
atggctaagctcatgggcaatacgactcgcccagctattttattaagttacttagttgttgatccaggtgaaggcaactacaatacgtacgttagtgaaacatccggaatgcacgacattgatccttctgacgatgatagatggtgtgagtatatcttgtataagggcttgagaagaacaggatatgctagagttgcaagaggaacgataaccgatacggagctacaagttggtaagttccaagttttgagtgagcaagtgttagtagagcactcggattctatgtatgaatacggtcatatgagtgaaccggaatatgaggacatgaaatttccagataagtttttaggcgaaggtgagaggggtcacttctaccatgtttttgatgagccacgttattacttataa

SEQ ID NO: 79342 - DNA, 2379 bp, Saccharomyces pastorianus
atgctgatcatcaatgggaagatcatccctatagctcatactatttgtgcattctccgccttctttgcagctttggtcactggttattcattacattttcataaaattgtaaccaatgcacattatacgtatccagatgagtggtttcctagtgtatcagccactatcggggaccgctatccggaacgttctattttccaaatcttaatagctctaactgcttttccaagatttttactgctactaggtcactactacttgaaccaatctaaggtatgcttccttgtcggtgtactccggacagtctcttgcggtggttgggtatacattacaagtacagatgaccacgatattcatgatatatttatgatcacatacattgttttaacgttaccatgggatataatgattacccgctattctagtcctttaacttcgaagaacaaagggttgactgctacaattttttttggaacattgttcccgatgatttactggtacattcagcactccgtccaacagagagctggggcatattctatatatgcttatttcgaatggtctctgattcttttagatattgcatttgatgcatttgcttacgctgatttcaaaaagatagatattgttctcgcttttaatgagaaacccggtaataccagttttttccaaattagagactctagtcccataaattatggagaagaaaaaagttcagaattgcagaaaagtggtgaaaagaaggttgaaaaggaaaaacccgttgctagaagcgcaactggttcatatttcaggtttgactcttttttttacttactaacaaatatttttaacggttttcttttctggtcgaacgttacgtccctgttatgtagtatttggcatttcccgctatggtatatgggaatctcaggttatgaagctgcaatattgggttatttgggacccattttcttatatctgccgttcgtttctgaagccttcacgcaatatggtgtacttttaggaggtattattgccattggtgcctatattgttcagatgccagaattaaggttgatttctgtagctgtgggaacttccattaccgttgcaacgtttgtacaaaatctaagatatatcacaaatgcggagactagtttctcttttgctctaacttggctgttaggtcttgttgcatctgtgatcttgaaaatggggttctataccaacaacccaacttgggtcattttagatgaacgtaatggtgggtataataagacagctctcgtgcttactgttttattcggcatgctgtcgccttatgttaattcaattaatttcgaagggaaaaggaatgctcaagcaaaatctgcttcgttgattggcaaattatttttggctgttggttttggctcgttgttattcggaattcatcagttattgacggattcttctactactatttattgggcatgggaaggttacaatgaatcacacggtcccttgccatggccttggggcgccttaacttgtacggtcatgttatttgcttctttgagttctgtgaagtttatgggcaagccattagttccatgtttgttgcttctcatatccactgctgtactttcagctagaagcattacacaatggcctaaatatattttcggtggtttattgtacgctatcgctatgctttggttagttccttcgtatttttctgcattaggccaagttcaaaacatatgggtttatgtcctatcattctccgtttatattatctttgtccttgcccatgtttgggtcgttgcatacgcatttgttccaatgggctgggtactgagggagaagattgagacggttcttgccttttcttccacatttatcattattggtgctttaacatgcaaaaaccttaacgttcaactggtgactatgggcaaaaaattcttcatttatgttttcttctttgccgtggccctactatcactaacagctaggttcgtgtatgatattagacctacaggaattcctcagccttatcatccagattctcagttgattacagctggtatttggactatccactttggtctcgataatgatatgtgggcatctgaagacagaatgatcaaccttattaaagatatggaactagatgtggtaggtctactagaaacagatacacaaagaattaccatggggaacagggatctaactagcaaactagctcatgatttgaatatgtatgcagatttcggaccaggtccaaataaacatacctggggctgtgttcttctttctcaattccctatcgtaaattctacgcatcatctaattgccctctccagttggcgaacttgcaccagccattcatgccacacttcaaacgtacaatga

SEQ ID NO: 79343 - DNA, 258 bp, Saccharomyces pastorianus
atggcaacgttggattttaccactaaaccacttgcgctagtaatcttgatacatgattcgagaaaagcaacaatattatgtatacggaatatactaggagttctcttcaaggatagaggaatcctcaaaatggaatccatatttctacatactaatattacgattatcccttcttctattttatatgtttcattatcctattacattatcaatccgtgcacttcagcttcctctaacttcgatgacagcttctcataa

SEQ ID NO: 79344 - DNA, 297 bp, Saccharomyces pastorianus
atgcctaataataaagtcgctatcgaaaatataatatctatgcttatctatattgagaaatggatgaaatttgagataattgttgggattccattgttgataaaggctataatattaggtatacagaatatactagaagttctcctcgaggatctaggaatcctcaaaatggaatctatatttctacatactaatattacgattattcctcattccgttttatatgtttcattatcctattacattatcaatccttgcacttcagcttcctctaacttcgatgacagcttctcataa

SEQ ID NO: 79345 - DNA, 303 bp, Saccharomyces pastorianus
atggaatctatatttctatataaaattaaactagttcaatttctcatagtcgatgattatgagaaatgggtgaatgttgagataattgttgggattccattgttgataaaggctataatattaggtatacagaatatactagaagttctcctcgagggtctaggaatccccataatggaatctatatttctatataccaatattacgattattcctcattccgttttatatgtttcattatcctattacattatcaatccttgctcttcagcttcctctaacttcgatgacagcttctcataa

SEQ ID NO: 79346 - DNA, 276 bp, Saccharomyces pastorianus
atgtcatcttctcacgtcgtatatgataatattgagaaatgggtgaatgttgagataattgttgggattccattgttgataaaggctataatattaggtatacagaatatactagaagttctcctcaaggatataggaatcctcaaaatggaatatatatttctacatactaatattacgattattcctcattccgttttatatgtttcattatcctattacattatcaatccttgcacttcagcttcctctaacttcgatgacagcttctcataa

SEQ ID NO: 79347 - DNA, 678 bp, Saccharomyces pastorianus
atgcatgcgtttcatttgctatgttctgggtctagatgcttagacataataaacgatctgctacgggtgaaaagttcaaagggcacaaaaccaatcgtgatttgggagccattcccagatctttgcgactttgatcatcaaaatgacattaaaagtgtaatgcagagaaacgatgttacggtaatattatctccaaatgccgaagaatcaagtcgcttatttggtttaagtagcaaggaaccgactagtttggaagaatgtctagcattagcgcatcgtttcgatgatttcatggatgaaaacaatatgtgtattctacgatgcggtgccctcggaagcatatcggtaagtgagaagtttaagaacggacgaacctatgaccatttccccgcctatcatttcaaaactcagtctaaagtactagatcctactggcgggggaaactcgttccttggcggctttgcagtttcttatgccctaacgaaaagcttagatattgctagtatatgtgggaacattgctgcaggcgcaataattgaacaattcggaataccgaggtacgatccaattgctaaaacctggaacggaatcacattcttggatagactgaaattttacctttcacagtccggtcttcaatatgatataaacgatctttacaaaagtctaacacgatga

SEQ ID NO: 79348 - DNA, 165 bp, Saccharomyces pastorianus
atgaatttgctattagatcatgttgaggaacgtatgggctccagtagtagaatgatgggcctagtcagcgtccctaggcgttccgttaagactataatgattgataagcctgttctgcaggagcttactgcgaataaagttgaattgatggctaatattgtttag

SEQ ID NO: 79349 - DNA, 420 bp, Saccharomyces pastorianus
atgttggttacccaaggtgtgatatgccaacgtcaattcttcaatttgaaaactagagggttcaatgcacttatgctgtgtacctgcatggtaatcgtttggttgtactttatctgttggggtctaagtgatggtggtaaccgtattcaaccagacggtgaggctatcttttatggtgttttggatttatgtgtatttgccatttatccatgttacttgctaattgcagtcagccgtgatggcaaattgccaaggctatctttgacaggaggattctctcatcaccatgctacggacgatgtggaagatgcggctcctgaaacaaaagaagctgttccagagagcccaagagcatctggagagactgcaatccacgaacccgaacctgaagcagagcaagctgtcgaagatactgcttag

SEQ ID NO: 79350 - DNA, 351 bp, Saccharomyces pastorianus
atgaacgatacgctatcaagctttttaaatcgtaacgaggctttagggcttaatccaccacatggcctggatatgcacattaccaagagaggttcggattggttatgggcagtgtttgcagtctttggctttatattgctatgctatattgtgatgttcttcattgcggagaacaagggctccagattgactagatatgccttagctcctgtatttgtgatcactttctttgaatttttcgctttcttcacttatgcttctgatgtaggttggactggtgttcaagctgaatttaaccacgtccaggttagcaagtctatcacaggtgaagttcccggtattagacaaatc

SEQ ID NO: 79351 - DNA, 156 bp, Saccharomyces pastorianus
atggctaaagtaagcaaagccatatcccgatcccgatcccgactcttattccgatcccttccgccacatcctgcatgtttattcgaataccaaattagctcatcttcgttatttcatcatccctttctgctatggcaaggacaagtttttttctag

SEQ ID NO: 79352 - DNA, 177 bp, Saccharomyces pastorianus
atggaaaaccgctgcagcaacccttgttacatacagtcggatccatctgacttactttccttgcgtctccctgcgcgatttgctggccattttccagatcctctagaatttttcaagggtcgagccgtaggaggattctctcagaaggcaaaaacgcatcgaaagcgtgctttgtaa

SEQ ID NO: 79353 - DNA, 879 bp, Saccharomyces pastorianus
atgatggctatatcgttgaaagattccggaaacatcaatgaggtttaccacaatttaaagacttctatagatgaagacaagtatacggtttacgttaatggaaatttccccaaagaatggaactttaatgatggaaaaaatcatcacatggcgtcaatctggattgtgcccgagcctgggtatgcagtgatgaagaaagaacaattgaagaaggtggcaaaaggtgatcataaggacaaaaacgaagacaatgtgttcacgattggatcacatggatacgacaataacgcgatcgatatgagatctgtatttattggtatggggccatattttccacagggatacattgagccgttccaaaataccgaaatttacaaccttttgtgtgatatttgcggtgtggcagaaaaggacagaaattccaatgatgggactgggatgcttatgaaccaactccgcgaaccccagagcagcgaagaagtagagattgaagatgactttgattatttggtcagtaagtttggtgaattcagcacttataatataatttggggcgggtaccccgaagagacagaacaagacaatgttgacaatgataatgatgacaacgacgatggaaacactgatgaaatagccgctatgccatcttcgtcattaacgataaaactagaaatgacaacttcaataccatcagcaactgagactctaccgggcgaaacatcaccatcatcaagaagaagcagcagcagcagcagcatacaagctagcgctactgctagcacagtgggggattggcttcaagacataatcaacgacgcaaaagatctcattgacgacataattgacagcatcgacgatttagtcgactctgatacctaa

SEQ ID NO: 79354 - DNA, 1275 bp, Saccharomyces pastorianus
atggaacttcagaatgatttagagtcgctcgataacgagctgaatgattttagtgaagatccatttcgtgatgatttcataacggatgaagatgctgtaagatcggggtggcgatctgcgtggaccaggatgaaatattggttttataagaatagactgaagtggacaaacaatcccatagtgattggcgacgcgaaagatagtagggatggttctaactttagaaggggtataccgctatatgaattagacgcgaatggtcaacccattgatactgaacttgttgatgagaatgaactttcttttggaacgggatttcattccaaagtgccttttaaaataatatttcgcacattgtttggctcgctggtgtttgccatttttttaattctgatgattaacatagcaaaaccccatcactccacgagagtgctatcgcactttggcagtcctgaatttgacccttacgtgaagtattttaacggtacgcatgaatttttccccttaacgatagtaatttcactagacggtttccatccttcactcatatctaagaggaacacaccgtttttacatgacttatatgaattgaaatatgatggaggtatgaatatcacgtccacaccttttatggtacccagcttccctacggagacctttcccaaccattggacgttggttactggacaatacccaatacaccacggtatagtctctaacgtattttgggatcctgatcttaatgaggaattccatccaggtgtattggaccctcgaatatggaacaataatgatacagaaccaatatggcaaactgttcagtctgcatttgacggtgatataccattcaaagctgctacccatatgtggccaggtagcgatgtgaattataccaagtataatgaagagaaactacaacctgaacataaaaatcctattgctagagagagaactccattttacttcgacgaattcaatgctaaagaaccactttcgcaaaaattatccaagattattgaatatgtggatatgagtacactgaacgaaagaccacagttaattctcggttatgtaccgaacgtagatgcctttggacataagcatggatatccgtcagagtcggaatactattatgaagacttcactgaaacactgggggaagtagatacatttctgaagcaactagtggaatcgctgcaagaaagaaatttaaccagctttactaatttggtcattgttagcgatcatggtatgagcgatatcgtagttccctga

SEQ ID NO: 79355 - DNA, 840 bp, Saccharomyces pastorianus
atgacgagatacatttttaatgaacaagagctacattatgctaggagaaggctccccgctagggacgaaagcacccggttagactggtcgactattcctagagtcttaaaaaggtggcactggtggatgttctctcttgtttgggttctgggaggtgagaacttgggtttcgcatctaattctacatttgcattatggttacaaaaccaaaaatatacgttggcgcaaagaaataattatccttcggggatatttgccgtaggtatagtttctacgctttgttctgctgtatatatgagtaagatcccaagagctaggcattggcatgtttctgttttcatatcattggtaatggttattgttgcggtactaatacgtgcagacccactaaatccaaaagtcgtcttttctgcacagtatcttggaggcgtagcatacgctggacaagcggtttttttttcgtgggcaaacattatttgtcatgcagatcttcaagaacgtgctatcgttcttgcttccatgaatatgttttcaggggccgttaacgcatggtggtctatattattctttgcttcagatatggtgcccaagtttgagagaggttgctacgccctcttggctacggcaatatcaagcggaattgtctcggtcgtcatacgctcactacagataaaagagaatttgtctaagaaacaggttccttatatagatgctaatgacatgcccggagaagatgacgatgacgacaaccaggataatgaaaatgatggcgacgacgagagtatggaagttgaacttcataatgaggaaatggccgaaatttcaaatcctttccgatag

SEQ ID NO: 79356 - DNA, 702 bp, Saccharomyces pastorianus
atgatgaaggaatcgaaatctatcactcaacatgaggttgagagagaatctgtttcttccaagcgtgccattaaaaagagattacttctgtttaaaatagacttgtttgtgctatcatttgtttgcttgcaatactggattaattatgtcgaccgtgtcggtttcaccaatgcatatatatccggtatgaaggaagatcttaagatggtcggaaacgatttgaccgtgtctaacacagttttcatgattggttacattgtaggtatggtccccaataatttaatgttattgtgtgttccacctaggatatggctaagtttttgtacgtttgcctggggtttattgaccttgggaatgtacaaagttacatcgttcaaacatatttgcgcaattagattctttcaagccttatttgagagttgcacattttcaggaacacattttgttttgggttcgtggtataaagaagacgaattgcccattagaagtgctatttttacaggtagcggtttggtgggatctatgttcagtggatttatgcaaacaagtatctttactcatttgaatgggcggaatggcttggcgggttggagatggttattcattattgatttttgtatcacattacccattgcaatttatgggtttattttcttccccggccttcctgatcaaacaagtgctgttagcaaatttctatga

SEQ ID NO: 79357 - DNA, 261 bp, Saccharomyces pastorianus
atgttagaaagggtatgttatttattcttcaattttacttactttacaattacgcgttataatttactaacatttcctttccataatttattcagcgctttggtatatgttgaagcagatgctgctaactatgtcttcgagagagacgacggttctaagggtactactttgagcttagttcaaaaggacattaatttattgaagaatgggaagaaattagaagatgctgagggccaagaaaatgctgcttcttcagaataa

SEQ ID NO: 79358 - DNA, 228 bp, Saccharomyces pastorianus
atgtttttacgtactcaagctcgtttcttccatgctactaccaagaagatggacttctcgaaaatgtccatcgtcggccgcattggctctgaattcactgaacatacttctgctaataacaatcgttatttgaaatatagtatcgcttcgcaaccaagaagagatggccaaaccactgggtataatatcaccgttttcaatgaacctcaaatcaattttttgacagaa

SEQ ID NO: 79359 - DNA, 279 bp, Saccharomyces pastorianus
atgaaggttaaggctgacagagatgaatcttctccatacgctgctatgttggctgcccaagatgttgccgctaagtgtaaggaagtcggtatcactgccgttcacgttaagatcagagctaccggtggtactagaaccaagactccaggtccaggtggtcaagctgctttgagagctttggccagatctggtttgagaattggccgtatcgaagatgttaccccagttccatctgactccaccagaaagaagggtggtagaagaggtagaagattatga

SEQ ID NO: 79360 - DNA, 4197 bp, Saccharomyces pastorianus
atgctttgtaaggtagggaaaagctatcgagaggagattatttctttgcttctcacatattctattggcaattataccacagctaacgaaatattttcaggtgctgaagacatgattggaggaatttcaaacgacaagataactgcaaaagaaattatttatttggctgtcaacttcattgagtggcatgtgattaattctaatgccagtgattcttcttctgtattggacctgaacaaccatatattaagattcgtcgaagatctgaaatcgctgagcgctgttccgattaatgaatctgtatttgatcctaaaaaaagttatgtgatggtttcattattagatctctcgatagctttgaatgaatcggaggacatctcaaagttcaagagctcttcaaaagtgatttcagagctcattaaaggtaatataatgtgtgctcttacgaaatatgccgcttatgatttcgaagtctatatgagcacatttttttgtcacagtacagaatacaaactggtttatccaaaaactgtaatgaacaattccagttacttagagctatcatttatagtgacactcctacccgaaatacttaatgacctggtagatagcaataacaatttgaacctgatgatgttgaagcatccatacacgatgtcaaatctcctttattttcttcgcaaatttcgacctgatatgtcacagatagttatgcctaaagatttttatttctcaagttatacatgtctcttgcattgtgttattcagattgataaatcatcattttaccatttcaaaaacgtttctaagtcgcaactgttacaggacttcaaaatctgcataatgaacttaatatattccaatactctaaagcagataatctgggagaaagaagaatacgagatgttttctgagtcactgatggcgcatcaggaagttttatttgcacatggagcatgtgataatgagaccgttggcttattgttaatattttttgccaacagattacgtgattgtggatacaacaaagcagtcttcaattgtatgaaagtgatcattaagaacaaggaaaggaaactaaaggaggtggcgtgtttttttgacccagcgaataaaagtgaagtactcgaaggtttaagtaatatcctctcatgcaataactctgaaacaatgaacctcataactgaacaatacccattttttttcaacaatacacaacaggtacggttcataaacattgtcaccaatatcttgtttaagaacaacaatttttctccaataagcgttagacagatcaaaaaccaagtttacgaatggaaaaatgcaagatcagaatacgtcacccaaaacaataaaaagtgccttattttatttagaaaagacaacacatccttagattttaaaatcaaaaagtccatatcaagatacacttacaacctcaaaacggatagagaagaaaatgcagttttctatcgaaataatttaaatcttttgatttttcatctgaaacatacactggagatacaatcaaatccaaattcgtcctgcaagtggtcatcggactttgcagaagattttgatgggatgaaacggaggcttttgcctgcttgggaaccaaaatatgaaccactcattaacgaggaagatgctaatcaagatactataacaggtggtaacagacaaaggagagaaagtggaagcattttatcctacgaatttatcgaacatatggagactcttgagtcggagctagttggagatttgaatgagaatagaaaaattcttagacttttgaaggataacgattccattgcaactatttggaattgcagtttgattattggattagaaattaaggaggggattttaattcatggcagtaattacctttactttgtaagtgattactattttagtttagaggataaaaagattctaaaattatcagaagtatcgcaagaatcacgggatatgacggttagcttaattaacggccctgatgttaaaagggtatcaactttcctaaagcacgaagtctttgtttggaaacttctcgatatcacttttgttaccaaacgaccctttctacttcgggatgtcgccatcgaattattgttcaaagagagagttagcgctttttttagtttttacaacaaaagagtgagagatgacgttttacgggtactgaataagatcccgaagcaccttccagcagatccaattttttcaagcgttttacaagaaataaacgaccgaggaaatagtatagtggcaagaaatggaataggaaaggcaagcattgcttctaaattcactagcgtcttctcagcgaacaacagcctaatagatggatttgagatcagcaaaaaatgggttaggggagagatttctaatttttattacctgttgagtatcaacatcctagcgggaaggtcattcaacgatttgacccaatatccagtgtttccgtgggttattgcagattacgaaagtaacgtactcgatttagagaatcctaaaacttaccgggacctatcgaaacctatgggcgctcaaagtgagaaaaggaaattacagtttatagagcgttatgaagctttggcttccctggaaaatgctgattccgcaccatttcattatggcacgcattattcctcagctatgatagtatcttcatatctgataaggctgaagccctttgtcgaatcctttttgttattgcaaggcggaagttttggccctgcagatcgtttatttagttcgcttgaaagggcctggagctctgcttcttctgaaaatacaacggatgtcagggaattgacacctgaatttttttttctacctgaatttttgatcaacgttaatagttatgactttggtacagaccaaagcggtaaaaaagttgacgacgtcgtacttccaccctgggcaaatggtgacccaaaggttttcattcaaaagaatagagaagctttagaaagtccttatgtatcagcacatttacatgaatggattgatttgatatttggttacaaacaaaagggggaaattgctgtgaaatctgttaacgtattcaacagattgagttacccaggcgctgtaaatctagataacattgacgatgaaaatgagcgcagagctatcacaggcattattcacaactttggtcaaacgcctttacaaatatttcaggaacctcatccggaaaaaatagcctgcaatgttcaacagctaacaacagaggtatggcgtaaggttccaatgaagccaatatttgagaagacaatcttcaatttgaatgaaaagaacaggtccgtcgattatgttatacacgatcctagttacttcgattcattatactggaggggcttcgctttcccaaacttgtttttcagaacggaagaatcgttagtgtcattgagaattgtgcataaaaattggttaaaaattggactagatatttttaaaaagacgcatatggctcagattacatcgtttgcgtactggaagttgggcgaattcataactggtgataaaaatgggctgataaaagtttggaaatatcgtaaagataagcattcggtttcaggtaaccttgagaacaaaaaaacaatgtttgggcacctatgcgagctaaaggagatgcgctgttatcacgactacaatacgcttttaaccttagacatcagcggcttagtatatgtctgggacatgattaatttcgaactagtaaggcaaataacaaatgatgcgcaaaaggtcgcaatatctcaacatgcagggagcattatggtattgactaagaataacgccatttcgatcttcaatctaaatggacaaatatatacatcaaagaaattcgaaccagctaaaattgtaagctcaattgatttttttgacttcactaagttagacgcaggttacagaaagcatatctattggaaagagatggaaatactactagtgggctttgaagatggaactatagaaatttacgagctctttttgaattttcataatgaatgggcgataaagctactgaagcagctctgtaccgaaaaagggaaagccataactagcattaagggacaggggaagacatacctgtcccagaaaagacgcaaggatacagcagagcctcatgagatagaagtgattgcgggaacattagatggcagattagctatttggtactag

SEQ ID NO: 79361 - DNA, 372 bp, Saccharomyces pastorianus
atgaaatcttctttccaaagcgcttcaagacacgaagcacagctcgaagacactcccagcatgaacaatattgtagtacaagaaataaaaccgaatattactacgccaagatcgagttctatttctgcattactaaatcctgtaaatgggaatgggcaatcaaacccagatggaaggccgttgctgccatttcagcatgctatttctcaaggcactcctactttccctttaccggcccctcgcactagtccaataagtcgtgcgcctccaaagttcaatttttcgaatgatccgttggcagctttggctgcggttgcctccgcgccagatgcaatgagcagttttttatctaaaaaggaaaataataattga

SEQ ID NO: 79362 - DNA, 1656 bp, Saccharomyces pastorianus
atggggtatccgccacctacacgaaggcttggagataagaaaaggtaccattattccaataatcctaaccgaaggcatccttccgctgtttattccaagaatagctttccaaaatcaagcaataatggatttgtatcttctcctactgccgataattcaacaaatccgtctgtaactcccagtactgcatctgtacctcttcctacagcggcacctggaagcacgtttggtattgaagcacccaggccatctcgatatgatccgagctcagtcagtaggccttcgtcatcatcttattcgtcaacaagaaaaattggaagccgttataacccagatgtggaaagatcctcttcaaccactagttcaactccggaaagtatgaatacgagcaccataacacacaccaatacggatatcggaaactcacgctattctcgaaaaaccatgagcagatataatcctcaatctactagttctacaaacgttacccactttccctcggcattatcaaacgctccaccgttttatgttgccaacgggagttctcggagacctcgatcaatggatgattatagtcctgatgtaacgaacaagctcgaaacaaataatgtttcatctgttaataataacagccctcattcttattactctaggagcaacaaatggagatccattggaacgccttccagaccaccatttgataatcatgtcggcaatatgacgaccaccagcaatactaactcgatccatcaaagggaacctttttggaaagcaaatagtactactattttaaaatcaactcattcacagtcatcgccttcccttcatactaaaaaatttcacgatgcgaataaattggacaaaccagaggcttcagttaaagttgaaacacccagtaaagatgagacaaaagccatatcgtaccatgataacaattttccaccaagaaaatcagtttctaaacctaatgcaccttcagaacccgataatatcaaggttggcgaagaagatgcattggggaaaaaagaagtacataaaagtgggcgtgagatagcaaaggaacatcctactcctgtaaaaatgaaagagcatgatgaactagaagctcgcgctaaaaaagtaagtacaatcaatattgatggaaagcaggacgaaatttggacgacagcaaaaacagtggccaatgcagtcgaagtttccaaaaaaagtcaaaaggaactaacacgctctgttgaaaggaaggaaagcccagaaattagagattatgaaagagcatacgatccgaaagccctgaaaacagacttaacaaagttgacagtagacaatgataataaaagttacgaagaacctcttgaaaaagtagaagggtgtattttcccattaccaaaagcagaaacgagattatgggaattgaaaaaccagaaaagaaacaaaataataagtaaacaaaagtacttactgaaacaggcaattaggaatttctcagaatatcctttttacgcacagaacaaacttatacatcagcaggctaccggacttatcttgacgaaaattatatcaaagataaaaaaggaagaacatttgaaaaaaataaatttaaaacatgattatttcgatctccagaagaagtatgaaaaagaatgcgaaattgactaa

SEQ ID NO: 79363 - DNA, 1575 bp, Saccharomyces pastorianus
atgattatttcgatctccagaagaagtatgaaaaagaatgcgaaattgactaaactgagtgaaaatttaaggaaggtagaaatcgaaaataaacgtaaagagcacgaactaatggagcagaaaagacgtgaagaaggtatcgaaacagaaaaggaaaaaagcttacggcatccatcctcgtcttcctcatctcgtcgcagaaatagggctgacttcgttgatgatgcggaaatggaaaatgtattgctacaaatcgacccaaattataaacattatcaggctgctgcaacaattcctccgctaattttagatccaatccgcaaatactcttacaaattctgtgatgtaaataacttggttacagacaaaaagctttgggcgtctagaatattgaaagacgcctctgacaactttactgaccatgagcactctttatttttggagggttatttaattcatcctaaaaaatttggtaaaatttctcactacatgggcggcttaagaagtcctgaagagtgtgtcctacattattatagaacaaagaaaactgtgaattataaacaacttcttatcgataagaacaagaaaagaaaaatgtcagccgctgccaagcgccgcaagaggaaggaaagaagtaatgacgaggaagtcgaagttggtgagagtaaagaagagtcaacgaacacgatagagaaggaagaaaaaagtgagaacaatgtcgaggaaaatgttcagccggttctagttcaaggttctgaagtgaaaggtgatccattaggtacaccggaaaaagttgaaaatatgattgaacagagaggcgaagagtttgcaggtgaattggaaaatgctgagagggtaaatgacttaaaaagggcgcatgatgaagttggagaagagagcaataagtccagtgtaatagaaaccaacaatgaggtacaaataatggatccaaaaggaggtgttcagaatggttattatccagaggagaccaaagaacttgacttcagtttagagaatgcgttacagagaaagaaacacaaatctgcaccagagcataaaacaagttattggagtgttcgtgaatctcaactctttccagaattgttgaaggagtttggctctcaatggtctctcatatcagaaaaactgggtaccaaatctactacaatggtaaggaattactaccaaagaaatgcagctcgcaatggatggaaattactggttgatgaaaccgacttaaagcgagatgggactagttcagaatctgtacaacaatctcaaattttgatacaaccagaacgaccaaacatcaatgcctatagtaatattcctcctcaacaaagaccggctttgggttattttgttggccaaccaactcatgggcataatacatctatttcatctatcgatggctctataagaccatttgggcctgattttcatcgtgataccttttctaaagttagtgctcctttaaccactttaccaccaccaagactaccatctattcagtttcctcgttccccacccgggaagaacagttatgccctaagcatgcatatgaaattgcatgcg

SEQ ID NO: 79364 - DNA, 360 bp, Saccharomyces pastorianus
atgcgcagcatagaaaacgatagaagtaattatcaacttacacagaaaaataaatcggcggatgggttggtatttaatgtggtaactcaagatatgataaacaaaagtactaaaccttacagaggacaccggtttacaaaagaaaatgtccgaatactagaaagttggtttgcaaagaacatcgagaacccatatctagataccaagggcctagagaatctaatgaagaataccagtttatctcgcattcaaatcaaaaactgggtttcgaatagaagaagaaaagaaaaaacaataacaatcgctccagaattagcggacctcttgagcggtgagcctctggcaaagaagaaagaatga

SEQ ID NO: 79365 - DNA, 1719 bp, Saccharomyces pastorianus
atggatttagggaaaattggtaacccaaatacgttgattttactcaatcaaggttctaattatgcactgacttatcaaatcgacaagtttaatcaaacggtaggtgattctgtttcattcatagagaaacgttgttcactcaattcaattgaatcctccctacaaaaaatcaataaggcatattacaaacttacttatacagtattgaacaactacaaaggaattctaggtagctttatgaagcaatgtccgggaaatgagttgttaaattcgatattcatgtttggaagggattttggaagaagtttccttaaatataacgcctttagctcaaagaggaagtacgttatcatctttctgatggttaaattaggaatgaactggttgaaattccttgttgaagagtgtgatcctaccgatcagcgaactttccgatggtgcgttcttgcaatggattttgcgatgcagatgactagtggttataatatcctggcgctgaatgtaaagcaatttcaagaactgaaggagagggtatcagtatgtatgtcattattaatttcacatttcgacgttatgggtgcacgagccactgaagctgaaaatggcatgcaacaggcaagattgaatattgatactgaagagaatattgatgaagaggccaccctagaaataaacagcaggttgagactggaagctataaagacgttggaaaagactatgaagaggaatcccaggcaaatgggtaaggtattggatgctacagatcagggaaacaaatacctactatcgctagcatcctcattatcgaatgtatcaatgaggtggcaaaaaagaagcttcattggcggtggaacatttggacaggtatactctgcaattaatctggaaaacggtgaaatcttagctgttaaggaaataaagatacacgataccacaacaatgaagaagatttttcccctgattaaagaagagatgaccgtattggaaatgttaaaccatcctaatattgtccagtactatggtgtcgaagtacatcgcgataaagttaacatcttcatggaatactgtgagggtggttctttagcctcgttattggatcatggaagaattgaagatgaaatggtaacacaagtgtacacattcgaactattagaaggtttggcatatttgcaccaatctggcgtggtgcatcgcgacattaaaccggagaatatcttgctggatttcaatggaatcataaaatatgtggattttggtacggcacgtaccgttgtaggatctaggactagaactgtgcggaacgcagccgttcaagattttggagtagaaacaaagtccctcaatgaaatgatggggacaccgatgtatatggctccagagactatttcaagctcggcagttaagggaaaacttggagcggacgatgtatgggcattaggatgtgttgtgctagaaatggccacaggtagacgaccttggtctaacttggataatgaatgggccatcatgtaccacgttgctgcaggtcgaataccgcaactacccaatagagacgaaatgactgcagcgggaagagccttcttggaaaggtgtttggttcaagaccccactatgagggctactgctgtggaactactgatagacccttggatgatacaaatccgtgaaatagcatttggcaactcagagaaagatcaagtacctatcctaagctcatag

SEQ ID NO: 79366 - DNA, 1899 bp, Saccharomyces pastorianus
atgatggatatactgaatacacagcaacaaaaagcggctgaaggcgggagagttctggctcctcataccatctcaagtaagctcgtgaagagattatcaagtcattccagccataaactatcaagatctgatttgaaagcattgggtggctcggaaacaataagcgacggccccagtcagctgacttttaaggaccgatacgttttcaatgaatcgctatacttgaaaaagctaaaaaagaccgctttagatgactactacacgaggggcataaaactcactaaccgctacgaggaagacgacggtgatgacgaaattattcggttgtctaatggcgacagaattgatgaagacctgcactcaggtgtcaagtttttctccactacaccttattgcaggaaaatgaggtcagacagtgatgaactagcttggaatgaaattgcgaccgaacggttcaaatggcagtcaatgctggccagagtgctgaagggagatattgttaaaggtgaaaagacgaggattgctaaccaagtcaagaaaccagggttaaataaggagctctcagatgagatatggctcgaattgaaggcatggctgaatgggaggaccatgcaagagatggaacagtcgcttacatatttaagagatagttcagattccgtttttgaagagataatgaagtttcaaattccacagggcaagatattgagcctggatgcactggaggccatcttacaagacctcatgaacagatatcacagcgttgtctcttattggcctaacttgaaaaaaatgtataaggataaaccaatcaccaatactgcagaatttaccgctagaatagacgtaatgaattcttggctgaactttaaaacgaacttaacgttgaggaggcaagagttggacgactggataaaccgtttctcaccgataagtagttcggataattgccaagaggattttgatggtgtgccccaatggaactgcaaaatgaagattcttgcagaacaattgatgaaggaaaagaacatcgagtctatattccaaaaaaaaattttctatccgctatcaccttggatgttcaaactgaaactacattttatagtctacagagaaactttgacaaagatgaacataaaatatccttatgaaaggttaagatcactactggcgttccccgtctatttaatcaaagaagttattttgactagattgtcatatgcacgaaagcttaaaaatccaacaatgatgatgatcgatcaaatgatcgatgattttaacgcttttattcgactttctgtgcaattgaagtacacactgacaaaatattgctccaatttgccgttcgatgtggattttgacccgacgttcgaaaatactgtaatagaagccattcgttatttattttttctgttgaatttaaagttgattgattccagtaaacaaaatttcaaagcacccgatctactcttgaaatactgggatcacctaaaaaacaccggtcactatattaacggtgcagaaaccgtgattccaaatgaatttctcaagttaactttgagactcgtacataaattgcaattctatcttttgaaacaacaaaacttcccaccaacatttgctaacgcttcagaagcagaaaaatggctaagttccattttcgaaaatttgggtgccatgaaaagaaagctgaacaggttcagcaatattctagtcaaggcgttccaaaattctgctgtttatcagattaatcataatgcacaacttgttaaaaagttaaaagatgctcactattttttggtatactccggtaacacttttgagtctagtggtgtatatatgtttgctgctcctgaattattaggttgtgacaatgataccatcttaagaattttgtga

SEQ ID NO: 79367 - DNA, 87 bp, Saccharomyces pastorianus
atgcttttcggtattcttcttgggcacagtatcattgcacacctcacagttgaacgtaaccatcctgtaataacaaatatttcttga

SEQ ID NO: 79368 - DNA, 282 bp, Saccharomyces pastorianus
atgtctatatatctacacataaaattccgattattcctttgcatacctgatttgcccctcagaatccacaaccagacttttcaagaaggtcttttttgcccctttatccttcatggttttcaaaattttgtacaacgacttgcccttgtgaagctcgattccgttcgaggtcttttccactttctctgccttcttgatcacaggcttctccactttctttgcaggagttgccactggctgctgctgctgcttctgcttctgcttcttgttgcccttgtataa

SEQ ID NO: 79369 - DNA, 264 bp, Saccharomyces pastorianus
atgtcactattgacaggacaagactgtattcaattagccggccatgaagtaccatttggtggcattactttccctgctgacccagaagccaggagagctgccaccgaattcgtcaagttcatcaatccaaagattagtgatgggcaaattcaccatattccagcaagggtctataagaacgggctttacgatgttcctcgtatcctggaagacattaaaatcggtaagaactctggtgaaaaactagttgccgtattaaactag

SEQ ID NO: 79370 - DNA, 753 bp, Saccharomyces pastorianus
atggatatgtcagtagaaggtattttcaggaaaaatggaaatatcagaagactgagagaactaactgctaacatcgacagtaatccaacagaagctccagacttctcgaaagaaaatgcaatccaattatctgctcttttgaagaaatttatcagagagcttccccaaccgattttatcgacagacttatatgaactatggattaaggccgcgaaaattgatttagaggatgagaaacagcatgttatattgctaatatattccttattacccacttacaatcgcaatttactggaggcacttttgtcatttttgcattggacgtcctcattctcttacattgagaatgaaatgggatcaaaaatggacattcacaatttatccacagtcataacacctaatattttatatttgcgacataaagaaatttccaatgataacgtccctgacgaaccagaatcaggtttagttgattcattcgctcaaaacaagggagaaaattactttttggctattgagatagttgattacctgattactcacaatgaagaaatggcaatggttccgaaatttttaatgaatcttttaaaagatgtgcagttacaaaaattagataactacgaatcaatcaaccattttatttccaccgttatgcaaagtaaaacaatcgattattccgaatgtgacataaaaactcctgtcacagtcaaagattcgaccacaacggtcatacaaggtgaaataaacaaataa

SEQ ID NO: 79371 - DNA, 1785 bp, Saccharomyces pastorianus
atgtacgaaaaccaattgtattgcaagtaccactttctcaaatatttttcgaaacgttgcaaagggtgcgaattcccaatatcggatcaatatatcgagtttcctaaaggtgaagaaatacattgttggcatccggaatgttatggaattcataaatattggcatgtaaatttagcagcagaaactgttggtttgcagtaccttcccaagctggaatataacccaaattccggagacaaagatataaacccaactgcctacgagttagataaacaaatgcaggcgtttaactttattctatctaaaacgtggtcggttttatatcgttttgaggaagaggcagcttcttgcatttctgatatgtttcaatatttgacaagcaatgatcagttaaagggcatagagtctacgggcctgttggtactaaaaatcgactgtcttttccggggactggatactttaaacctctcgacgaacaaaagtatgccagttaacagtgatcaagaatgcattgaaaacaacgcaatggcggccagtaaatacagcaagtttcccaaaaatctatccacaaaaattatgatatatttacaactcttaagaaagttagggacagaaagcaaaaacgaaactatcacaatttcatcttttatgtctgttattactggattagcccattttctaaaactgttaacaagatttgggctatatacggctctagaaaacaataagttgactcattctgttaatccattgttgaggtttttaagagaagtagagaaaaatgagctttttgaaaataacccgtttcagtatataaagactcctgttaacgccacagatagttgcgctggatgcaataaatacatacaggaggaatgcattcaattttatgagcaccggtggcatattgcttgttttacttgttcttcatgccataagaatataaatccgaggagtttgacggatcccacctttaataaagagaaaaaaaagatactatgttctcactgctcaattgatgatccggcctctgtgccgggtttcaaatttgttactaagctagcacaactaatttttcttctaaaaattgccctagtcaaatcaagaactgtaatgttgaaatcgaaagcatctaacaaggtaggcagaaactctttacagagtactatgctaaaggaacaaacttacattaggacactgaatgatattaaaagattgagatctagaagagaaagtgttcgggttactcataacaaacaacaagctagaaaatcagtgatactggaaactgcagagacagatttaaatgacccgacaaagcaaggagatagtaaaaatcttgtgattcaaacagatgacccatcatcgagccaacaagtgagcacacgtgaaaatgttttcagtaatactaagacgttgacactagatgatatttcacgtattgttgccgctgaacaagcaagggagctaagacctaacgcttttgcacactttaaaaaactaaaagaaaccgatgacgaaacttcgaatattgttcccaagaaaagcggagtttattactctgaattaagtacgatggaactctcgatgataagggctatcagtttgtcactgctagctggtaaacaactgatatcgaagactgatcctaactatactagcttagtctcaatggtcttctcgaatgaaaagcaagtcacaggtagcttttggaacagaatgaaaatcatgatgagcatggagcctaaaaagcccatcactaagactgtttttggtgctccttaa

SEQ ID NO: 79372 - DNA, 579 bp, Saccharomyces pastorianus
atgattcaaaattctgctggttatcgatcgctgaatactgcatctccgatggccgtgcaggtgaagaatcagaagaaaatatgcgcccgttgtaacaagttagttgtacccgatagccaacgaactaaaacaactttaaaggctctcggtaaatattatcatgaaagttgttttacctgccaagactgtcagaaacctttaaaaccgaagtacttcccatatcaagtagacaagacaagtgaacctatattgttatgccaatacgattattttagaagacataatttgttatgtcttgtatgtgataccccattgcgtgggttatattataccgcattcggttacagatacgacgaagagcatttttcttgtacaatatgtgctactccttgtggggttaaaaatgcttcatgtacgaaaaccaattgtattgcaagtaccactttctcaaatatttttcgaaacgttgcaaagggtgcgaattcccaatatcggatcaatatatcgagtttcctaaaggtgaagaaatacattgttggcatccggaatgttatggaattcataaatattggcatgtaa

SEQ ID NO: 79373 - DNA, 1461 bp, Saccharomyces pastorianus
atgaatcattggttagcatttttgaataagcctgaatccctaaaggaacaaaactcggattgcgaccagcagggggagatgagacatgttactgatggcactttaactaagtctccagaaagtaaaccttttcgagggcggcgttcacaaacttggatagactctgaagtacctacgtccactgaaaaatctaatgtgcaggaaagtatttcttctgatattatatcaaaactgtcgaataggcgttcccgaagaaaccgctcagagagttgggcaggttcagaagcttcttcaccttctggtaacattagtacattggaaaatgctacggaaaaaaatactttaaaatcgcctaataaatttctacaaaggggtggtttaccaactgtaggaataggctcgcaggctctgtcacctgcaggaaagcccagtacattaggaaatgtaagccctggtaaatttaccacatacaaagtacacaatagtattgaagtgaatagattttcttctacacctacaaagctcctcacgaatccccacaaagtcgcagcaatctcaaatgatgagcattatgttgtaagcaatgagagtctggaggagaatatagaggttgcgcatctagagaacgtatttcgctcatctaaaactccagatgaagaacagtccgaatatatgaaattaggagaaattaggctatcttcttcatcatatggaggaagtatttctaaagaaaatagtttacccaaggtattagatgagctccagtcccaaaatgaagagatcaaagcaccaagacaaaaactagaagagaaggatgacaggattcaagaactagaagaacttaatagcatgaatgatgctaaacttcaaagaatagaagacttgcagaaggaattacacaacgaaagaaaagctgcatcaaaaaggctcaacattgttcaggaccggtttcgcaaagaaattaaaaaaattagagaagaaaaaattacagactttcaaaacaaaaacgctagcaagaaggagaagaatgaagtgactagtgccaaaactaaatgtaaagctttttctcaaagaaatattttagtttcggaactatacaggaagcaaaaacaaatcctaaacttgcagcaagaaaatgataaatttctaaaagatattaacgaatcgaataactctatagtaaaattaagatctgaagttgaaatactgaaaagcaatttgcaactttctcaagatgaaaataaaaaattacatgataatggttcgttttacgagaaaaggttaaatgatgtttacagttatatgcaaaatctttctctttttgagaaagaccttggtaaattcatactagaagaaatgaaatgtggccattccccttcgatgtttcaaaacggttttgccaagctttatccggattttcaagatatcaaaaatcttgaaaatatggagcaatacaaacaa

SEQ ID NO: 79374 - DNA, 906 bp, Saccharomyces pastorianus
atggataccaatggtcccgagtattatattgaagatactaaaacttcctttgaaagcactgtgaaagttgttaagtacatacgggaaaccatttgtgatcccctcgtaaatcctatagtgacaccaaggttcgcgccctcttgttctagagaactaatgcaacagttgtccaagctagtcaaggatgaaaacatacacgttcaaacccacttgtcggaaaataaggaggagatacagtgggttcaagatttatttcccgaatgtgagagctatactgatgtatacgacaaatatgggctgctcacagaaaaaacagtattggcacattgtattcatctaacagatgccgaagcgcgtgtgattaaacagcgtcgctgtggtatatctcattgtcccatttccaactcctctctgacttctggagagtgtagggttcgatggttgctggaccagggcataaaggttggtctaggcaccgacgtttcagccggtcattcttgtagcatactcgccaccggaaggcaggcctttgcagtttcaaggcatttggcaatgagagaaactgatcatgcaaaactttcagtctccgagtgcctatttcttgctacaatgggcggagcacaagtcttgcgtatggatgagaccttggggacttttgacgtcggtaagcagtttgacgctcaaatgatcgataccaatgctcccggctcaaacgtggatatgtttcattggcagctaaaggagaaggatcaaatgcaagagcaagagcaagagcaagggcaagacccttataagaacccaccgctgcttactaatgaagacataatcgcaaaatggttctttaacggtgatgatcgcaacaccactaaagtttgggtagccggccagcaagtctaccagatttag

SEQ ID NO: 79375 - DNA, 243 bp, Saccharomyces pastorianus
atgaaacattgtggttctgatcattggaaagtatcgctaaggggtcgtatggattcgaatgagatcagttgtgctaaaagcataattgatggtgctcatgcattgaaacttaaaacaagaatctggggagccccaacctggccagctaacctggtggaaactatttctcgccaaattattcatgacttgggttccgatttacttaacctggacagtttattcatggcatcgtcattgatataa

SEQ ID NO: 79376 - DNA, 147 bp, Saccharomyces pastorianus
  modified_base (49)..(49): a, c, g, t, unknown, or other
  modified_base (95)..(95): a, c, g, t, unknown, or other
atggagcaatatttcaaatctctgattgattctggatattttttatatnacgatatgaagaaggatgaaattatccggagacccgtttttgtgantctaacgggcaactaccttttcttcattggatattttagacaatggaaatga

SEQ ID NO: 79377 - DNA, 612 bp, Saccharomyces pastorianus
atgttaggactgaaagggtgtctaactattcttattggatacgttattgctgtctgtgctttgttttccagtcggggaagaaatccttcattaactgattgggaaaagttaaaggaccagaaaatatcgaatattgataactttgggttgaccggtcaacatcttttagaatttttccaggaaaacttgccatttctaagtttttcagaggaaaagtatcgtcacaaacacgtttctttatattatgatgtattcaaagaatatatcttacgtcgtgccagttcaaaaaagtgtttaccagtagactctgctatcgcaaagttgaacaaagatgttaacccaatgccagttcactcccataatgactactggaggaaacttccgctttttgaaggtctggcctatggtgctagtagtactgaagccgacgtgtggaatatagatgaaaagatcctcgctgtgggtcataatgaagcgtatttggacccagttgaattgacattagacaagctatacactggccccctcttggagattttagacgaggtgaattgccaagattcagactccgatcgcaaaaatggtgtatttatcaagctctccagcaaactt

SEQ ID NO: 79378 - DNA, 645 bp, Saccharomyces pastorianus
atgaccgatcttttatcgcctatttatgtcatcatgaaggaagaatggaaaacgttttggtgttttacgcacttcatggacattatggaaagaaattttctaagagaccagagtggcatccatgaacaaatgttaactctcgtggaattggtacaattaatgctacccgaattgagcgaacatttaaacaagtgtgattcaggaaacttgttcttttgctttcgaatgcttctagtatggttcaagagagaatttgaaatggaagatattatgcacatttgggagaatttctggactttctactacagttcacaattccaattattcttcatgttggccattctacagaaaaactcacaagctattttacaacatctaaatcagttcgaccaaatattaaaattttttaatgaacttaacgggaagttggattggaatgacctaatggttagagcagagcttttgttcaagaagtttgagaaaatgatgcacgtcatggaaagagatttacaaaacgtatcctcctcttcatcctcatcctctaccggcgtattgccttgtcagagcgagaggttgaccctgcttctttctaaaaaacctatcataagacatgaagggcaaaggagcaaaaattccgttaaatag

SEQ ID NO: 79379 - DNA, 1320 bp, Saccharomyces pastorianus
atgtaccaaggcccaccgtacccaaatggtaatattaactttcctcccaccgcgcagcagaatataccgcccacggtttatccacaacaagtgccatttccaggtcaaccacaggggggtcaatttccacagccttcatcagaacagcaggtgtttaaccagcttccacaagtgactcaaacgtttcacaactctgcgcagaatacgaatgcaaccgggggccctggcagcgggtctatgccaatgtttacgccggtagcatcctttcctcatcccatggctacggcagcaacggcagctgctccgttaccacggtctgcatcccaggcatctttatctatgttacgggtgccgtatcatgtaagaaaatacttatctaatttggcgatgttgaaattgtacgaaataataaatgaggtgaatacggcaatgggtaagattggcctgctttcattctggacagaattaatatcagatatttttacacctgatgcagttataaggtatagtaaaaagtctatgacagattatagagaattcgaatttatcatcccagtgttcccagttatttgctctacattaggcagatttggcatcgttagaatggaagttaaggttttacaattgaaaacacaagttctaagtaattctacgatttttttcaactgtcctcgtgtcacatttgtctattattatcctgatggttcatatattacacatttttcccaaatgaaaggtgctttcgatttggacttgaaaattaattggctggacgtatctatgcatagttttgtccctgatattgaatggaatgcagtggaacggcttttgagtgatgacacaaagtctacagaaattgaacaaatattccgtaaattgaaacaagaagatgtcaaagagcaagggaattcttttgcagaaaataatgctacgaatgttcctccgaattttgaggccatcactcagctgagatcatattttgacgtattcagaaacgtctctgtgtttggcactcaagaagggttgatgagagtcatgcaaataagtaccgttatgtctactttgaaaaaccttcgaaagtttcaaattgaaaagaacattgatagtcccgtgaccgccctaagtgcgtacattgacgccgacaagaaggacagtggaagcgagcccttgcacgcaaagaggcgacgcaacagcggtatctctcctcgcaccacgacgttggggccaaacggcaactccaatacaagcaatgaagagcttccaacaagtgatgtgaatgatattaacaaagacatgacaaaaaagaagatgaagttttaa

SEQ ID NO: 79380 - DNA, 318 bp, Saccharomyces pastorianus
atgtcacgtaaaaaactttaccacttcatcaagaaatttagtgaaatgaaggaccaatcacattcgaatttaaattcaggaggcaattctatggagaagaacctattcaagaaaatataccaacagaaggcatcaagttcagggcagcaacaattacccttgcattcagtggcgaacagctctgaaatagacagtgaaaaaatgcattggacagaggttcacggcattgcatttgcgagagcttttacggatatttctgaagccttgttccaggtagagagttgtgcaaaagatatactgggcgaagaaaacttttaa

SEQ ID NO: 79381 - DNA, 2865 bp, Saccharomyces pastorianus
atgaaaagatatgagcgagatcgaagtcccactcctgatcctgatattgtgaaaggttcatactctcaaacatcactcaggtcactacatgaacttaactataagaatcctgccggtataagcgggcttagctttgcaggaagcccacaacaatccgtggcatccttatcgcaaatgcggctggaaaatttggttaaggacaaacactgggaggaagtagaggactttgggctggaagagctgagagatgggttttttgatgctgcttttaccaagccggacagcaaagctaggtctcctaacagcgacatcgatgacgacaatggcgctgcaaggaaaaaactgcaatctggttttaccaagctttccgaatatgtttggactgctatctacaggcccattattcatttccctagagatattagaaaaaatggggtatccatattcaagttttttattgcttatttcattgttatcgtgatttgcgttatcaggccttctggtaggtggattggccatgagttcaggtattttctacccatcgcagtacttatacatcatccggtcagaaatattggtgttcaactggaaatgactataagctccattatcggcgcaagttttggcctgggatggtcggctttggcatggtacatttccacagcgacaaagccgaccgcaaactaccagggaggaattttatttcagagtctgactatggccctcttatttgccatctggctaaggtctgtttaccgtcggttcttctatttcacaacttcgttttcgatatcgattatattcactcatacagttcggttggcctcatccaagtttgatttgaagtggcaaattttttgggattttggaatctcatatctcttcggccttttgctatctctcttggtttgtgtatgtgtatcaccacatagtggcaatgcagagttaatggaacattataacaagtgtctacagaccacaaagacctttttaatggcactagtagatactgaattaataaagtccaaagaacaaatttacctagcccaagtaaaaatggtgaaaacactaaacattgatttatctcaaggttttagagattttgtaaatcagttgacaatttccaggtttgaccttcaatcgttgaagagtttaagaaattctttaactgccatggaaacttctctgagagtattacccattgcacccaaaatttttaatgatgatgaattgaaaaagatgtatgaagaattggagaagtatagatcggattctgcgagcctgagcaaagaagcaagcgctagccctcaatcttcaggaattccaacaagagaaaacacgcccagtgcctttaagcctatcggtccggggcttttaaaaaatgaaatctacattaatgcattaaaggcgtccttctcgaaaagcatcttcaacttaatactggaaatgatcttcgttttggaaaatctatcaagagtactaaagaaatacgagtctccaaatcaaaaaaacaacttagatgagtgtgtcaaaatattaagtcactcgcattctaaattaaagaggaaaatttacaaactagatgtttgttacagggattttgtgaattctagttttttttcacaggaactgttgaatgacgaagagtctgtcgatattttcctttttctaagatatttgagaaactccgcaaggcagctagttactgttatccacgattgccaagttttgggtgagaatattcactggagaattgctctgccatcatatccactgtctcgtgcgttgacaagattgcccaaacagtgtgttctcgatgaaggtgcaggaaatgttcttcattattttgaggccaaacgtgatgtcgatgaaatttttgaaagagtttataacacctacacgtcaagacacaagtataacaaaggcgaagaagaagcgctgagacttgattcacaaggtggtgacgaaaagtcacagaatcgcaaaaaccacactatttccatcagagcaattgatcacaacgacttcaattttcatacaactcaaaatccttggagatttaaactatggaaattgagtagaattttatctggtgatgaatgtaagtggacactaaagattactttttgtatgatatttttgtgtctaccaacttggctacctgaatcctatcactggtaccaagaatttcattgttggtgggccccactcacgttttacttattagcacatagaagatactctggtaactgggcgttggtaatgaggagattaatctgtggtatagtaggtatcttttgggggtgggctgccaaccaatcgagacattttggtagtccatacgtggtttgcacgtttgctggtctgatcgtggtcccatttagcatcaactttcttgtctatagaaacaccaaatcgagcttcactgcattaatgtgctttaccataattgctcttgaaccatacagcaaacctaatagacattataacttaaccaccgctggaatatggaaatctacgtgggttacaggcttggcacttattatcggtattttggtttcgattcccatcaactggatagtgtggccctttagagctaggacagaactaagagatagtatgtcatcattactggcacacttgggccagtcctaccaaaccgtggcggaccggtatttatacagggatgccgacgacgcacctactgatttaactttcgcattttcccacattcgtgaagttagactgactcaaagtcttgaagcaatcagggaacttttgaagaaagcccgtcatgagccaatcattatttccaacttcaatcctgagaagtacgcaagtctaatcaattcatgccaattttag

SEQ ID NO: 79382 - DNA, 618 bp, Saccharomyces pastorianus
atgcaaggtgacatgttcggtatcgttgttccaagaaacactactgttccaaccatcaagagaagaacctttactacatgtgctgacaaccaaaacaccgttcaattcccagtctaccaaggtgaacgtgttaactgtaaagaaaacactttgttgggtgaattcgacttgaagaacatcccaatgatgccagctggtgaaccagtcttggaagctatcttcgaagttgatgctaacggtatcttgaaggttactgccgtcgaaaagtctaccggtaagtcttctaacatcactatctctaacgctgttggtagattgtcttctgaagaaattgaaaagatggttaaccaagctgaagagttcaaggctgccgatgaagcttttgccaagaagcacgaagctagacaaagattggaatcctacgttgcctccatcgaacaaactgtcactgacccagtcttgtcttctaaattgaagagaggttccaagtccaagattgaagctgctttgtccgacgctttggctgctttgcaaatcgaagacccatctgctgatgaattgagaaaggctgaagttggtttgaagagagttgtcaccaaggccatgtcttctcgttga

SEQ ID NO: 79383 - DNA, 561 bp, Saccharomyces pastorianus
atggctgaaggtgttttccaaggtgctatcggtatcgatttaggtacaacctactcttgtgttgctacttacgaatcctccgttgaaattattgccaacgaacaaggtaacagagtcaccccatctttcgttgctttcactccagaagaaagattgattggtgatgctgccaagaaccaagctgctttgaacccaagaaacactgtcttcgatgctaagcgtttgattggtagaagattcgacgacgaatctgttcaaaaggacatgaagacctggcctttcaaggttatcgacgtcgatggcaacccagtcatcgaagtccaatacttggaagaaaccaagactttctccccacaagaaatttccgctatggttttgaccaagatgaaggaaattgctgaagctaagattggtaagaaggttgaaaaggccgtcattactgtcccagcttactttaacgacgctcaaagacaagctaccaaggatgccggtgccatttctggtttgaacgttttgcgtatcatcaacgacctactgccgctgctattgcttacggtctag

SEQ ID NO: 79384 - DNA, 1581 bp, Saccharomyces pastorianus
atgttactatgtgggccagcaggtacaggaaagaccacctttgctaacaatctattggaaactaagatctttccgcataagtatcaatacggtaaatcaaatgctagtattagctctaacccagaagtaaaagttattgctcctacaaaagttgtttcatttaattcgaaaaatgggattccgtcttatgtttctgaattcgatccaatgagagccaatttggaaccaggtattaccatcacctccacttcattagaacttgggggcaacaaagatcaaggaaagccagaaatgaacgaggatgataccgtgtttttcaacttgattatgacgcatggtataggcgaaaacttggacgattcgttgtgttctgaggaaattatgtcgtatttagaacaacaatttgacattgttttagctgaggaaaccagaattaaaaggaatccgaggtttgaggacagcagggttcacgtagcattatattttattgagcccactggacacggtctgagagaagtcgatgtagagctcatgaaaagcatctccaaatacacaaacgtactgccaataataacaagagctgactcattcaccaaggaggagctaactcaattcaggaaaaatattatgtttgatgtggaaagatacaacgtcccaatttacaaatttgaggttgaccctgaagatgatgatttggaatccatggaagagaatcaagccttggcatccttgcaaccatttgctattataacttcagataccagagatagtgaaggtagatacgttagggagtatccgtgggggataatatcaatcgacgacgacaaaatttcggatttgaaagttttaaaaaacgtcctgtttggttctcacttacaagaattcaaagacaccacgcaaaatttgctttacgagaattaccgttccgaaaaactatcgtccgtggccaacactgaagaaattggtcctaattctacaaagagacagtcaaatgctccaagtttaagcaactttgcctctttgataagcactggtcaattcaattcttctcaaactcttgcaaacaatttgagagcggacacaccaagaaaccaagtaagtggaaactttaaggaaaacgaatacgaagacaatggcgaacatgattcagcagaaaatgaacaggaaatgtctcccgtgagacagttgggtagagaaataaaacaagaaaatgaaaatttgataagatctatcaaaacagaatcttcaccaaaattcttgaactctcaggacttaccagagcgtaccaagttaagaaatatttcagaaaccgttccatatgtcttgagacatgaaagaattttagcaagacaacaaaaactggaagagttggaggcccagtcagctaaagaattacaaaaaagaattcaagaattagaaagaaaagcacacgaattgaaattgagggaaaaactaataaatcagaataaactaaacggttcatcatcttcaatcaattctctacaacagagcacaaggagccaaattaaaaaaaatgacacgtatactgatttagcctctattgcatcgggtagagattga

SEQ ID NO: 79385 - DNA, 108 bp, Saccharomyces pastorianus
atgagcactgcttcaacaccgccaattaacttatttcgtagaaagaaagaacataaacgtgggatcacatacacaatgttactatgtgggccagcaggtacaggaaag

SEQ ID NO: 79386 - DNA, 249 bp, Saccharomyces pastorianus
atgaactctcacggtcatggcaacggtcatggccatggtccaatttgttttgtagaatttgaggatgttagctttgccactagagcattggcagaattatatggtagtcaactacctcacccccgcccttccctcaacaacaaaggaggtatcaggttgagcttctctaaaaatccattaggcgttagaggctcaaacagtaggagtaaatctggttacagctttaatggaagttacgggaaatcatga

SEQ ID NO: 79387 - DNA, 1497 bp, Saccharomyces pastorianus
atgtcattagtgcataatcagacgaatttaaacgaatccagatttcttatagaaagggcatttagttctagttcagaaaccgttccattatcaaaggaggcaacatatcccatgccaactgcatatagtttttccgcagttaggagcaacagcgagactaacattaaaagagagaacccgcaaggttttgcaaaagaacctattatgacttctatgcttcataatttgaccatgtccacggggaaagggaacgggaatgacgtcaattctttagccccacatgatgtggatgttggcccctactgtcttttgctgaggaatttgccaaaagacattacactaagagagtgttattgtatattttcactagcaactggggtgtcaagtatagaactaaaaagggatgatagagaaccctttaatgacaatgaaaaagtcgttgtggtcaaatttggatccctttctttagtaacccattatgctaatatattaaactcgaagtctgagatttttgggcctagtttcccctttaggtctcacattgacgtagtaaatgaacaaacgcagcttccagtgagttttcaagaacatgtttcatctggcactacaaatagttctccaaagaattaccaattgtcgtccagtgcgcaaaatgaaattcaaaatcaaagttttaatactatatcatatggaaaaactagttcctctccattagggccttcagcggccaagccaaggccttcattactttcagagagatccctccgtttctcattcaatgacccattcggattggaaacaatctctcaaagaaaagaatccgtaccctttctacgaaatagcatctcacaacatgatttatcaaacgtaaccaccacaccagttccagcaggaatgccacctcagaaggacgctggcaagtcacttttgctactagaaaaggatgaaataaatgaaagtatttggaatggtgatgaattagttaatgatgttggtaattcttcatttggtgcatctttacaagagcctccgatgtcatctacgcctgtgatggagtggaatgcttcctcaactgctaatattcctctttttcaattatctagccaagaaaatcatcagtctaatctgttgcctccatcccaccattcaattagccaggatgttccacatattcaatcacaacctaatctgaacaattcaggagtaatacattccgcgacttctctaccgcattatcacttattgaaccaaattaatgcttcaactaagacacaaagtattcagcagagcgtttcgaatgttccttccaatttggacctgaatctccaaacggaaaatggccacccacaatcttctgctcctaacgggtcttcaatattcaacaaccaaaaggtgaatcaaggctttttagtgagtgaacaagacaccagtacaatatcacgacagaaagaatgttcttctacagcttctgcctctgcattttcgaaaaataactaa

SEQ ID NO: 79388 - DNA, 2196 bp, Saccharomyces pastorianus
atgactggtactgatgtgaaccctgttgatcctagtgtttacacaagttcaggcccaaagagtaatgttagttccggtatgaacgctgtcgaccctagtgtctacacggacacaagttcgaagtctgcagatcgtagaaagtactctggcaacactgcgactggtcctcctcaagatacaattaaagaaattgcacagaacgtgaagatggatgagagcgaacaaactggattgaaaaatgaccaagtttctggttctgatgcaatccaacagcaaactatggaacctgaacccaaagcagcagtcgggacaagtggttttgtaagccagcaaccttatcatgatagcaataaaaacattcaacacccagaaaagaataaggttgataataaaaatatatcagaaagagcggctgaaaaatttaacattgaaagagatgacattctggaatccgccgatgattatcaacagaaaaacattaaatccaagacggattctaattggggtccaattgaatatagttccagcgctggtaaaaataagaatctgcaggatgttgttataccttctagtatgaaggagaaattcgacagcggtccatctggatctcagaatatgcctaaagcgggaaccgaattaggacatatgaagtataatgataatggtagggataacttgcaatatgttgccggttcacaagctggttctcaaaatacgaacaacaatattgacatgtcaccccgtcatgaagcagaatggtccgggctttctaatgatgccaccacccgaaacaatgttgtatcacctgctatgaaggacgaagatatgaatgaagattctactaaacctcatcaatatgggttggattatttggatgatgttgaagactaccacgagaatgatattgacgactactcaaatgcaaagaaaaacgacttgtattctaagaaagcgtaccagggaaaaccatcggattacaattatgagcagagagagaaaatcccaggtacttttgaacctgatacgttgtcaaaatcagtgcaaaaacaagatgaagacccgttgtctccaaggcaaaccactaaccgtgttggtatggagactgcaagagatgagagtcttggcaattacgaatactcgaatacctctggtaacaaaaaattatctgatttaagcgaaaataaatcaggcccaactccaacgcgttctaattttattgaccaaattgagccaagaagagcaaaaacaacacaggatattgcatccgatgccaaggatttcaccaataatccggaaacaggtactactggaaacgtagatacaaccggaaggatgggtgcaaaatccaagaccttcagctcgaacccttttgatgatagtaaaaatacagacactcatctcgaaaacgctaatgttgctgcctttgataattccagatctggagacactacatactccaaatcaggggatgctgaaacagctgcttacgataatattaaaaatgcggaccctacatacgccaaatcacaagatattactggaatgactcacgatcaggaaccatcatcagaacaaaaggccagttacggttctggcggcaattcccaaaatcaagaatattctagcgacgataatattgatgtcaataagaatgcgaaagttttagaggaagacgcaccgggctacaagcgtgaagtagatttgaagaacaaacgtagaaccaaccttggtggtgccgacgcctcaaacgcttatgctgccgaagttggtaatttccctagtttgattgacccacatgtcccaacatacggatttaaagacaccaacacctctagttctcaaaagccatctgagggcacctacccagaaaccacttcctattcaattcataatgaaacaacttctcagggaaggaaagtgtcggtgggttcaatgggttccggaaaatcaaaacatcatcacaatcatcaccgtcacagcagacagaattcttcaaaagggtctgactacgactataataattctactcattcagccgagcacactccaagacatcatcagtacggttccgatgagggtgagcaagattaccatgacgacgagcaaggtgaggaacaggctggtaaacaaagtttcatgggtagagtgagaaaaagtatttctgacggtacttttggatttaggagtgaaatttaa

SEQ ID NO: 79389 - DNA, 270 bp, Saccharomyces pastorianus
atgaatatgaacgagtccatttccaaagatggtcaaggcgaagaagaacaaaataattcttcgtttggtggtaagcccggttcctatgattccaattcagattctgctcaacgcaaaaagtctttcagtactacaaagccgaccgaatataacttaccaaaagaacagcccgaatcaacgtccaagaatttggaaaccaaggctaaaaacattctgttaccttggaggaagaagcataataaagactcggaaactccacagaagacctga

SEQ ID NO: 79390 - DNA, 441 bp, Saccharomyces pastorianus
atgcagggcatccaagtattgcataccactcataaccacagcacttccaaagctgccacttctcctgttactcacacgcatggtcattccagtgctaccacttcccctgtcactcacacacatggtcatgccagtgtgaaaaccacatctcctaccaatactcatgagcattctaaagcgaatactggtccatcagccactgcaactacacatggacatatcaacgtcaaaactacccaccctgttagccatggtcactctggttcaagcactggtcctaaatccaccgctgctgcacaggatcattccagtactaaaactaacccttcagttactcatggacatacaagtgttaaagatactcctcagctacgaagggttattcgaacactgattccaactcagatcgagatgtcatacctggtagtttccggggcatga

SEQ ID NO: 79391 - DNA, 2199 bp, Saccharomyces pastorianus
atgaatagagacgagaaaaacaggtttaaatttgtaaagttgattcactacgatatagaactaaaaaagttcgttcaagaccaacaaaaggtattatcgcagaaatcaaaagccgcagcaattaatcctttctttgtgccaaatagactagggataccttacattgaatcccaaaacgaattcaactcgcagcttatgacgcttaatgtagatgaaccgaccacagatataagtaacatgggagaggaaatgcatgacagcgcagatcccattgaggattcagattcctcaactacctcctcttccgggaaatatttcagctcaaaatcctacatccagtcacagacacctgaaaggaaaacaagcgtaccaaataattggcacgatgatgattccggaagcaagaggaagagaaagctttccttccacagtccgaacgcgtcctcaatccgcaaagccatcagttatgagcaactttccctagctagtgtaggctcagttgaaaggttagagggtaaaattgttggcatgaatccacctcatttcgccagtataaatgagttcaaatattgcacattgaaattatattttacgcagctcttagcaaatgtcccagacaaggtcctggtgccaggcgtcaattgcattgagatcgttatcccgacgagagagcgaatctgtgagctcttcggtgttttaaactgtcaaagcgacaagatatcggatattttactactggaaaagcctgatcgaatttccgtcgaagttgaaaggatcctgtgggacaataacaagaccgccagcccaggtatggcagtatggagtttgaagaacattagcaccgacacgcaggcgcaggcgcaggtgcaggtgcctgcgcaatcgtcggcgtcaatcaatctgtctcgcacaagaatgagcaaaatggcaaggaaagatcccaccatcgaattctgtcagttgggactcgacacttttgagaccaaatacataacaatgtttggcatgctagtctcctgctcgtttgataaacctgcctttatatcttttgtctttagcgattttaccaagaacgatatcgtccaaaactatctttacgacagatatctaatagattacgagaacaagttagagctgaacgaaggcttcaaagccatcatgtacaaaaaccaattcgaaacgtttgactctaagctcagaaaaatattcaacaacgggctaagagacctacagaacggccgcgatgaaaacctttcgcaatacggcatagtttgtaagatgaatataaaagtgaaaatgtacaacggcaaattgaatgccattgtgcgcgaatgtgagccggtcccgcattcccaaataagcagcatcgcctcgccttcacagtgcgaacatttaagattgttctaccaacgagcgttcaagagaattggcgaatccgcaatttcacgctatttcgaagagtaccggaggtttttccccatacatagaaacggttctcatctcgcgaaactgaggttcgatgaagtaaagcatgaaccaaaaaaatcacccactacaccagctctcgcagaacacatacccgacctgaatgcagacgtgtcctccttcgatgtaaagttcacagatatatcctctctcctggactcctcggctcgcctcccgcgcccacagcaaacacacaagagcaacacattatacagttgcgagggccgtatcgtcgccatcgagtaccacgcatctgatctctgcttccatatcacgaatgagctcccacttttacaaacccgcggcttggccccggagcgagtgttgcaactacacatcattacctccaagaactttgcttattttttcaaccgctcaagcgcctacttacagcgtcagcctcttgaggaaaaatatacgcaattggcacaatttctcggccattcatttaaattcaatataacctcctcgctcacgctgttccctgacactaccgtggcactccagatctggtgcccaattgaatgcacctttcgggaattgcaacaacagctggcccatccgaaggttgcagcggctcctgattcagggagtcttgattgcgcaattaatgctaccgtcaatcctctgagacttcttgccgcgcaaaatggcgtcaccgtgaaaaaggaggaggataataacgatgacgccggagccgttcccacctcgtaa

SEQ ID NO: 79392 - DNA, 519 bp, Saccharomyces pastorianus
  modified_base (480)..(480): a, c, g, t, unknown, or other
atggataccttagaagagcctgagtgtcctccatataaaaatcgtatttttgtgagctcgagtaaagactttgaaggctatcctagcaaagcaatagttcccgtgcaattcgtggcgcttttaacctcaatacacctgactgaaacaaaatgtttgctaggcttttctaattttgagaggcgaggaaatcaatcccaagaagatcaatatttaatcaaactgaagttcaaagataggggctcggagaggttagcccggatcactatttccttactttgccaatactttgatattgaactgccagatttagattctgactcaggcgcatccccaacagtaatactgagagatattcaccttgaaaggttatgtttttcaagttgtaaagctttatatgtatcaaaacacgggaactatactctattcttagaggacataaaaccgttggatttggtaagtgtgataagcaccatatctacnaaattgacaaatagcagcaagcattcgttatcagaactt

SEQ ID NO: 79393 - DNA, 372 bp, Saccharomyces pastorianus
atgctcttagtaggtatttccattgatgattctatggcggagatagataaattatcgaaaaaagttcttagtttgagaatcttcgaagatgaatccagaaatctatggaagaagaatattaaagaggccaatggtgaaattctatccgtgtctcaattcactttgatggcaaaaaccaagaagggaactaaacccgatttccatttggcccaaaagggtcatatagctaaagaactttatgaagaattcttaaaattactaagaagtgatttgggtgaggaaaaagtaaaggatggtgaattcggcgcaatgatgagttgctctttaactaatgaagggcccgttacaatcattcttgacagtgaccaataa

SEQ ID NO: 79394 - DNA, 1032 bp, Saccharomyces pastorianus
atgttctcagtacgaaagtttacggtttttttttttcaattgaggaacataaaccaaatagatacattatatcaacgttatgaaacgagttactggagttttcttaacacttttgagattttctcaatttgcatcatctgttttggtgatgtcactttggcgtatgccatccacgcctatggaaatagaggtaataagaaaaccaacttcacattggcaacaggtgtcattagtgtgttttatctgattgccttaggtattttgtgtctggccctacccacattgatctacataggaatgtacttctgtgccgaattgatcgtttgtatgctatggctagcagctttcgttgttcttgccaaagctcaaggtgaacgtagctgtagcaacactaatgcagacggattatactataatccgtacagtggccaatatactgctgacagtcatagaagagcatgtaattcttctcaggcggcaatcgccttttctggcctttgctttgtactgtttttgatcagtgtgatattactgggaattaacgtcttaacacctatcaggaagcgttatcaaacccaaggaatgtggagaagcggcgcttctatgggtacaaagctccataggtggagcggactagctttaagcgagccttttgaagaaacagctgcttacgataacaccaatgttaggaccggtgatgtcgaagcaggtgcaggtgataatgctgcttacacatctgaaccgaatggcgacgcacgctatgcaactaatgaccccaatgggcagtaccatactaccaccaccaacacacgttacaccacaacaacagcggaccctaaaacgcgttacaccaccaacgatcgtaatcctggttctgcgaatgtcgctaacagtgcagtggaccagcacgcttactctacggatgagtcaggtgatcggtcttatcaagaaaaggtcacagaaggagctcactctggcgctatgagtggtagcactgcagaaccaaacaggaacgtcaatcaaatgccataa

SEQ ID NO: 79395 - DNA, 168 bp, Saccharomyces pastorianus
atgaaacgagttactggagttttcttaacacttttgagattttctcaatttgcatcatctgttttggtgatgtcactttggcgtatgccatccacgcctatggaaatagaggtaataagaaaaccaacttcacattggcaacaggtgtcattagtgtgttttatctga

SEQ ID NO: 79396 - DNA, 294 bp, Saccharomyces pastorianus
atggaagatagaaaccttaccgagttcgacagtactgacactagtctgtgcataaacggcgaaccgagcattcatgtaaatcgcgtggaaagaagcagcaggtctaccgacaattttcacaattctaaaaaacgcatgaacagcaatcaggaaaaatgtcatgatgagggcaatgatatgttacagagaaatgtcttggagacagattatgcaagagcaaaaaatcgaatacttgcgtcaaagataaaacaatatgagcggttacgtttttacaaggacacctttacattatga

SEQ ID NO: 79397 - DNA, 1068 bp, Saccharomyces pastorianus
atgaataacaacgatcgaaaatcaataaaaactgcaggaggcagcatgtcactttcaaataagactgtaaaggaattacgacaactactaaaggaaaggtacaccgtggaggatgaactaactgaatctatagcgctgtcaagtatgcgattcaagccgtcgcaagaacctgaatttcatgcgctaagccaatcttccttgctcaaaactaaactaaaacaacaaagtagtacagatattccgagttacacccacgtacttatatcaaaattatcatgtgaaaagatcacccattatgcagttcgtggaggaaatattgaaatcatgggcatattaatgggattcacattaaaagataatattgttgtaatggactgtttcaatcttcccgtagtagggacagaaactcgcgtaaatgcacaattggagtcatacgaatatatggttcaatatatcgacgagatgtataatcataatgacggtggtgatgggcgagattacaagggcgctaaactgaatgttgttggctggttccattcacatcctggttacgactgttggttaagtaatatagatatccaaacccaggatttgaaccagagattccaagatccatatgtcgcaattgtggtcgatcccttgaaaagtctggaagataaaattttaagaatgggtgcatttaggacaattgaaagtaaaagtgatgataatagtgccacttcatactatgaactagaaacaataatatttgattcagaattgaaccgagcgctatttgaaacaaagttaaacttacattgcgtaatagaggatgatgagtcagaacaaatatcattaaatagattgatcgattcaatgaagcagtatagctatttgatggattccaaaaatgttagaacaaggattaagttggctactaccagtgaacgtgttagcaacgaaaataaaaaaaacattgactatcaaaaccgttcaacaaggtctcagttctgcctcaatacgcaaaggggggatagcactgaaacaagctcctttggaagcatgttttcaggtgataataataagtga

SEQ ID NO: 79398 - DNA, 744 bp, Saccharomyces pastorianus
atgagtgaaaagatgcattacgaggaaatatgctgtctttttaaacagctgatcaacggcgtaaaatatttgcacgacatcggtctctctcatcgtgatttgaagctagataactgcgttgtaacacgaaggggaatcttgaaattgattgattttggcgcttccagtgtcttccactatccattgtcttcacagatgattgaagcaaatggaattgttggtagcgacccctacttgtcacccgaagtcttttatttcaatgagtacgatccaagagcacttgacgtttggtccgtggggataatattcttttgtatgataacgagaagatttccttggaaatatcccaaagtgaaagatgttcaattcaaggcattttgttccggaagaggtgtgtcatcttttaaagatcttgtgacacggcctgctaccgatgacagcaataattatgatgatggttacgaagaaggagtcattaatatgggtcctaatttcattctgcacagactaccagaagaaactcacacaataatgaggcgtatactggaagtttcatctttcagaagaattaccataaacggaatattacaagatggctggatcaaagaaatagaaacgtgtcaagttgtgggcgcggcaagcccaaatgaggcatcgcttcgaataataaacaaaggtaatcacatacatacaaacatcgatcaacgatacgcccacattggcggcctgcatcagcgaacgtaa

SEQ ID NO: 79399 - DNA, 1203 bp, Saccharomyces pastorianus
atgtcgttgtctagaatcctgcgatataatcagagaaataacaaaactacagcttccttgactgcagaacacgcctattccgataattgggcatattccgtctcgttaggcgatcccactagtgttggtgtgaatatgactgctaagacgggtgaggcgctaaataaatcatatgattccgttttttcttctctccctgttgcagatagtgtacctcggacagactttactgcatcttcccgggatgatgaaaacacggacgtgcaaaagctgaccacttcctggatggagaatattgacacgaagatgcccgaaaacatatctaaaatcgactctaatattatttcctctcccatggtcagtaaggttgaagcaagatttattgttcctaaaggaagattgaggaaaaattctaccgattttacgtcatctttctcaaactcgttaagtttacccaaaagttatggcaaattaattttctttacatcaaagaaaaacagcagtagtaccaaaaaaaatccagcgaatgatatcagtgataacaagcataacaacaattcttctaatactatcggtcacaatattccagtcacgacagccacggcgacatgtgatgagattgcatgcacctccacagaacatgaatataatgtttatgaggaagagaggatgttcactactcgtgtatattctctagaagattcggtctcttcactgtccacgaatcctctcgatgacacgtattcagaagcagtgcaagtaaatacaagacatatcgaggacactgaaagcacggcccatataagaaaacactcctttactacgtcattgtcaagtatgaaaaggctcttcaaaataacgtcttttagcaataacaacagtaactcatgtgatcaccaggaaagcacagttgcagatgattgcgctatatcatcatcattgaaggaaacaacttcttcgccagtctcaactggatcattctctctcatgatcgagaatgaagacagcgatagagatcagattattcaggctttatatagtaatattgaagcatccactgacttggtttccaggaaatatagagatctcgacgttgttctcggcgaaggttctggtggtaaagtgaaactggtccaaagggtcctggataataaagtttttgcattaaaggaatacaggtcaaagaaaaaaaagggaatctga

SEQ ID NO: 79400 - DNA, 864 bp, Saccharomyces pastorianus
atgttttggcattataaagacaaaattgctcaaataaagcaagacatagttctgcctataaaaaaagctgatgtgaatgtaaggaatttgctctcacgtcataaaaggaaaattaacccgaaattcggacaattaactaatagcaaccagcaactttttaaaatacagaatgaactaactcaattgataaatgatactaaaggcgactctctagcatatcattggattttaaactttattgccaaagccgtagtacatcaggcggaaacagaagtcagggtaaaaccagagtctgctctgcccctagggaaattgactttatatttgttagtccaattcccagagttacaggaattgtttatggcaagacttgtcaagaaatgcccctttgtgataggattcacgtgtgagattgacacagaaaaaggccgtcaaaacatgggatggaaaagaaacaacgagaataaatgggaagataacacatcctacgatgagagaatgggcgggatcttatcattatttgccataataacgaggttacagttgcctcaagaatttatcaccaccacgagtcatcctttccccatcgcattatcgtggcatattttggctagaatatgtaatacgccactaaatttaataacaaatacccattttgtcatactcggttcgtggtgggatgccgctgccgtacagtttcttcaggcgtatgggaaccaagcctctaaattgctaatcttgattggtgaggaactgacctccagaatggctgaaaagaaatatgtgggtgctgcgagattaagaattttattagaagcctggcaaaataataatatggagtcctttccggaaatgtctccttag

SEQ ID NO: 79401 - DNA, 549 bp, Saccharomyces pastorianus
  modified_base (535)..(535): a, c, g, t, unknown, or other
atgagatttgtgttcgatgaggttttcaattcagatactgattctccagaattcgaggaaacatgttctacaacatcttctacgtcatcgcaatgccctacacctgagccgagcccagcaataaagttaccttcattcacgaaagttggcacgaagaaattggtaaatgagtcggtagttattttagatcctgttctagaaaacgccttgcgcgatttgaaccttcaatcgaaactgatccccattaatgagcccatcgtagccgcgtcatcgataatagtaccgcattcaaccaatatgccactaccgagagcatcgcattcgtcattgctagataatgctaagaactcaaatgcgacagcacccttactcgaggcaatagaagaatcttttcaaaggaaaatgcaaaacttggtgcttgccaatcagaaagaaattcaatctattagagaaaataaacgtcgtgttgaagagcaacgtaagcgaaaagaggaggaagagcgcaaacgtaaagaagctgacgtgaaaaggccanagccgggagcccag

SEQ ID NO: 79402 - DNA, 720 bp, Saccharomyces pastorianus
atgcccactttactaccagagggtttcgagctggggggtatcactaagcgggtcgatccaacagattgtcttgtcatgcccttttactctgcttataagtctctggatgaccttccagacggggggattgtgggaacctcatccgtgagaagatctgctcagctaaaaagaaaatacccacatttaaaatttgaaagtgtcagaggaaatatacaaactagattacaaaaactagacgacccaaaatctccgtaccaatgcatcatcttggcgtctgctgggttgatgcgtatggggttggaaaacagaattacgcagcgattccattcggatacaatgtaccatgcagttggacaaggcgccctgggtatagaaattagaaagggtgacaccaagatgatgaagattcttgacgaaatttgcgatctaaatgcaactatatgttgcctttcggagcgtgctttgatgagaactttagaggggggttgttccgttcctattggtgtggaatctaaatacaatgaagagactaaaaaattactattaaaggccattgtagttgacgttgaaggcacagaagcagtagaagacgaaattgaaatgctaatagaaaatgttaaagaagattccatggcgtgtggtaagatactagctgaaagaatgattgccgatggcgcaaagaaaattctggatgaaattaatttagacagaatcaaatga

SEQ ID NO: 79403 - DNA, 219 bp, Saccharomyces pastorianus
atgggccctgaaactctacatattggtgggagaaaatcgaaattggcggtaatacaatccaaccatgttttaaaactgatcgaagaaaagtatccggactacgactgcaaggttttcactttgcaaactcttggtgaccagattcaattcaaacctttgtactcatttggcggtaaagctttatgggacaaaggagttggaagaccatctttaccatga

SEQ ID NO: 79404 - DNA, 123 bp, Saccharomyces pastorianus
atgtattacgaaaaaggtgtcggttgtgaaattgatttggatctagccaaacgatattatcagagggctgcaagaatgggttttaggaaggcagttgatgctcttcgaagtttgacaaattaa

SEQ ID NO: 79405 - DNA, 1590 bp, Saccharomyces pastorianus
atggttaatcagggccaaccgcaaccgaacctctatgacaaacacattaacatgtttccaccagcaagggcgcgggagtcctcgcataaattgggaaatgccaattcggataggcatggtttgcccgctcaaaatatagtgcctgcaccctatccagtggatgactctatcgttgaactcacaccagctattccttttacatccccttcatcttcctcatcattatcgctgcctttgagtgcgctgaatttcacagacgggaatgctgatggtggtcaattaggcactccagtaaccataaatagtaataacggaatggacatttttaattccaagccaacaggtgaaataggatatgccaataatggcaccaacagtactggtagtaggtatgaacttcctttcaattttagttctacaaaagagagtttgtgttcaccagctgtacaagatgcatcaataagcagtggaaatcgaatatcagagtctgtaagggacaactcagcgccgccaccctatgaggaatctgaatctaggatactgcaggaaaaagtttacagaaccgaggaaaaagctccaatgcgacctttgaataataatcctgtttcaccacaaaaaatcaatcaatcacccactggcagcgcgaagacagacgataatgagtcctcaggtggtgaggacaaactgtctttctattcaccagaggcattggctttctatcaagtgtacaagaagacaattactgactcttcaaaattcacccccgagatacaaatgcaatggtgtgaaacattactaacatatgcctttaatgaggatttcatatcgcaatataacataaacgcggagaagctcaaaagaagcttaaagcctgaggaaatgctcaaaaaccagaaagtcattttggaacattcattcaaggtgctcacaaaattaataactttaaaatggccacctgccatgtatttaatggggacgctgtattcacaccaaccctatttacctataaagaacaaaaacatcgttattaaaaatgatgaaaaggcgctggaatattattgtaaagctgcgaaattgaacaattcagatgcatgctaccgtgcaggtgtatgctttgaataccaaaggggcacctcttctttggatccatcaccgaccaaagaacaatgcataaaaagggccttccaatactaccagcatggcgcagaagtttgttcaaattctgcgtgtatgtataaattagggatgagccatttatacggtctgaacatgcaaaagactgatgtattgttagctattaaatggtttgacaaagctgcccaaaagggtgactctccacaaacattatatgagttaggtaaaatatatgaattcagtgttttgccgccagaaatccagaacctattatttgcgaacggcatacgaaaagactctcaactggcaataaaatactaccaacaatgtgccaaagattttgagtactctttagcgcaatggaaattaggaaattgttatgagtttggagacctagggttgccagtgtggccaaaaaatccatatattggtattccaaagctgctgctgctcaac

SEQ ID NO: 79406 - DNA, 546 bp, Saccharomyces pastorianus
atgacctctcctcctcccgtttttaacaaacctcccactggcccccctccgattagcatgaagaagagaagcaacaagttagctagtatagaacaaaacccatctcaaggtgctacttatcctccaaccctttccagctcggcctctccattgcagccttctcaaccgccaactttggcttctcaggttaatacctccgctgagaatgtcagccatgaaattccagctgatcaacaacccattgtcgacttcttgaaagaagaactggctcgcgtaacaccattgaccccaaaggagtactccaaacaattaaaggattgtgataaacgattaaagattcttttctaccatttggaaaagcaggatttattaacccaaccaacaatcgattgtttacatgacctcgtcgcattaatgaaggaaaagaaatacaaagaagctatggtcatccatgctaatatcgctacaaaccatgctcaagagggtggtaactggctgacaggagtgaagaggttgattggcatagctgaagcgactttgaattaa

SEQ ID NO: 79407 - DNA, 2826 bp, Saccharomyces pastorianus
atggtcaaacttgctgagttttctcgaacagccacgtttgcgtggtcacatgataaaattccattattggtctctggtaccgtatctggtacggtggatgctaatttctccactgattcatctctagaattgtggtcattgttggctgctgattcggagaagcctattgcttccttgcaagtggattccaaattcaatgatttggattggtctcataataacaagattattgctggtgctctggataacggtagtttggaattgtactccaccaatgaagcaaacaacgctatcaactccatggccagatttagcaaccattcttcctctgtgaagacggtaaagtttaacgcaaagcaagacaacgttcttgcttcgggtggtaacaacggtgaaatttttatttgggacatgaataaatgcactgaatcgccctccaattatactccattgacaccgggtcaatcgatgtcgtccgttgacgaggtcatttccctagcatggaaccaatctttggcccatgtttttgcatctgccgggtcgtctaatttcgcatctatttgggatttgaaggctaagaaggaagtcattcatctaagttacacttcacctaattcaggtatcaagcaacagctgtccgttgttgaatggcacccaaaaaactccacaagagtggcaacggctactggtagcgataatgatccatctatcctgatctgggacttaagaaacgccaacacaccattgcagactttaaatcaaggccatcaaaagggtattttgtcactagattggtgtcatcaggacgaacatctattattgtccagtggtagagataataccgttctcctatggaaccctgagtcagccgaacaactgtcccaattcccagctcgtggaaactggtgttttaagaccaaatttgcaccagaggctccagacctatttgcttgtgcctcctttgataacaaaattgaggtacagactttgcaaaatctcacaaacactttggatgagcaagaaaccgaaactaagcagcaagaatctgaaacagatttttggaataatgtttctcgagaggaatcaaaagagaagccaactgttttccatttacaagccccaacttggtatggggaaccatctcccgcagctcgttgggctttcggtggtaaattggttcaaattactccagatggtaaaggtgtatctataacaaacccaaaaatttcaggcttagaatcaaacactactttgagtgaagcgttgaaaactaaggatttcaaaccattaataaatcaaagactggtcaaagttattgatgacgttaatgaagaagattggaatttattggaaaagttatcaatggacggtactgaggagttcttgaaagaggctcttgcatttgacaacgatgaatcagatgcacaagacgatgccaacaatgagaaagaagacgatggggaagaattctttcaacaaattgaaaccaatttccaacccgagggcgatttctccttgtctggtaatatcgaacaaactatttccaagaacttggtttctggcaacattaagagcgctgtgaaaaattctctagagaatgacttactaatggaggccatggtgatcgcattagattcaaataacgaaagattaaaggaaagtgtcaagaatgcctattttgcgaagtatggatctaaatcatcgctctcaaggatactatactccatttctaagagggaagtagatgatttggttgaaaatttggatgtctctcagtggaagtttatctctaaagcaattcaaaacttatatccaaatgatatcgcccagaggaatgaaatgttgattaaattgggagacaggttaaaggaaaatggtcatagacaagattctttgactttgtacttggctgccggatcattagataaggtggcttcaatttggttatcagaatttccagatttggaggataaattgaagaaagataataagacaatttatgaagctcattccgaatgtctaactgagttcattgaaagattcaccgtattttccaacttcattaatggaaactctaccattaataatgagcaattaattgccaaatttttggaatttatcaatttaactacttccacaggaaattttgaactagccactgaattcttaaatagtttaccaagtgacaatgaagaggttaaaacagaaaaggcacgtgtcttgattgcttccggcaaatcattaccggcacaaaatcctgtgacagcgacgaccagcaaagccaagtatacaaacgccaagacaaataagaacgttcctgtactaccaactcctggaatgccttctactacttctattcctagtatgcaggcaccattttatggtatgacaccaggcgcctctgcaaatgctctacctccaaagccgtacgttccagcaaccaccactagtgctcctgttcatacagaaggtaaatatgcgccaccaagccaaccttcgatggcgtcaccttttgttaacaaaacaaatagctcgaccagattgaattcttttgctcctccgcctaacccatatgccactgcaacagttcctgcaacgaacgtatctacaacgtcgattcagcaaaacgcttttgctcctatacaacctggtatgcctattatgggcgactataatgctcaatctagctctattccttcacaacctccaattaatgctgtatcgggtcaaacgccacatctcaaccgtaaagccaatgatggttggaatgatttgcctttgaaggtcaaagaaaaaccatctcggtgccaaggctgtatctgttga

SEQ ID NO: 79408 - DNA, 759 bp, Saccharomyces pastorianus
atgaaactaagaatattcagtatcatctacaaccatgcatatacaccacagttgattagacaggacgttattcctctgaaaaaaattcctaaaaggttggccgctatcttggaagtcaagccagttggcgacgttggcggcggtgtgacaggtttattaaatgacgcgagtgaaattgtttgctggactgtttcagctggtataaaacatttgatgttgtacgattacgatggaatattacaaagaaatgttccagagctgagaatggaaattcattccaacctggccaaatattttgggccagctcatgttccaaactacgctgttaaaatacctcattctaacaagatattctacaatctagacggaattgaaaccgagactgatgtaggcaatgagatagaagctaaccaagaaaaggacaaaattgctattgaaatttctttattgtctaacagagatggtagagaaacgattgtcgatctgaccaaaactatggctgagttatgtgcggttaacgaattgagtgtttctgacatcacaatggatttagttgattcagaattgaaacaactagttggacccgaaccagatttactgttatacttcgggccttcgttggatttacaagggttcccaccttggcatattagattaaccgaattttattgggaaaaagataacaacgaagtcatatattcggttttcatccgcggcctaagacagtacgcaggatgtaaagtgaatgttggtaaatga

SEQ ID NO: 79409 - DNA, 288 bp, Saccharomyces pastorianus
atgcccacgatgatcaaaaaggatgataaagcaatggagccccctaatgaaaaaccgcatagaaagatcgaaagagatgatgtcccagaatcttccaatcacatcccacctccagaatctggtgtcttaaagggcggtaaagttaattcaaaaaccagagctttaaaggccgttacaagtatcattgcagacgccgatgagaaccctcagaagaaagtgaacaatgagacgaatggagtccaaaagcaaaagacagaagatttgagtaaaagaataggtaaattttga

SEQ ID NO: 79410 - DNA, 495 bp, Saccharomyces pastorianus
atgcgtattcttatggttggtcttgatggtgctggtaagaccaccgttttgtacaagttgaaattgggtgaagttatcactaccattccaacaattggtttcaacgttgagactgtccaatataagaacatttcattcactgtctgggatgtcggtggacaagacagaattagatctctatggagacactactacagaaacactgaaggtgttatctttgttgtcgattctaacgatagatcgcgtattggtgaagctagagaagttatgcaaagaatgttgaacgaagatgaattgagaaacgccgcttggttggtgttcgctaacaagcaagatttgccagaagccatgtctgctgctgaaatcactgaaaaactaggtttacattctattagaaaccgtccatggtttatccaagccacgtgtgctacctccggtgaaggtttgtatgaaggtttggaatggttaagtaacagtttgaaaaactcaacttaa

SEQ ID NO: 79411 - DNA, 108 bp, Saccharomyces pastorianus
atgcctttaaaactagaggatgtaacacctaatgaagagttaaggcaaaagattctttgtttcaaaaaacaaaaaaaggaagaagcaaaacataaagcaagcgagtga

SEQ ID NO: 79412 - DNA, 2523 bp, Saccharomyces pastorianus
atgaccgccatagaagatattttacaaatcaccaccgatccttccgatacccgtggctactctctattgaagtccgaggaagtgcctcaaggctcaactcttggagttgattttattgatacgctactattatatcaactcaccgagaatgagaagttggataaaccgtttgaatatttgaacaattgctttcgccgtaatcagcaacaaaaaagaatcaccaaaaacaagccaaatgctgagtcattacattccactttccaagagattgatcgtcttgtcattggctatggtgtcgttgccttacaaatagaaaacttttgcatgaatggtgctttcatcaattatatcactggaattgtttctaacgttaactcatatactgatttcctttcccaaatcattcaaagagccatattagaaggtaccgctttggatttacttaacgctgttttcccgacattattagaatactgtaataaacatgtcagccactttgatttaaacgaatctgtaatttacaataacgttcttaccatttttgagttatttgttacatttaaacctattgcagaaatattcactaaaatagatggtttttttgcagactatagctgtaaaccacaggattttgaaaggaaaacgatattggggcctattttatctctttctcccatagaagctgctgtggcaatccggaactacggcgataaccttttgcgttccaaacaacagacagccatgatccatgaatctctacaagctgagcataaagttgtcatagatagactcttttttattgtcgataagcttgttcgtggctccttaaactcaaggactgatatgattagttattttgcccatatcgctaataaaaaccatttacgtagagccgatcatccaccattcaaagaactatcctctaacggatttatgtccaatatcactttgttattggttagattttctcaaccatttctagatatttcatataagaaaatcgacaagatcgacgcaaattacttcaacaacccaagtttatttattgatttatcaggggaaacacgattaaattctgattttaaagaggcagatgcattttatgacaagaacagaaaaacagcagattctaagccaaacttcatctctgattgctttttcttgacattaacctatttgcattatggtctgggaggtacattatcatttgaagagaagatgggatctgaaatcaaagcgttaaaggaagaaattgaaaaagtaaagaaaatagctgcgaaccacgatgtctttgccagattcattacagcacaattatccaagatggagaaggcgttgaaaacaacagaatctttgcgatttgctcttcaagggttcttcgctcatagatctcttcaactagaggttttcgactttatttgtggtgcatctacgttcttgattcgtgttgtggatcctgaacacgaatttccgtttaaacaaattaaattgccattaattccggaccaaataggtgttgaaaacgtggacaacgctgattttttgagagcgcatgctccagtgccttttaaatactatccagaatttgttgtagaaggtccagttaactattctctatacatttcgaagtaccagacctctccaatcttcagaaatccacgtctgggatcgtttgttgagtttacaacaatggtcctccgttgtcctgaattggtttccaacccacatttaaaaggtaaattagtgcagttattaagcgttggtgctatgcctctaacagacaattcccccggattcatgatggatatattcgaacacgacgaattagttaacaagaatctgttatatgctctactagacttttatgttattgttgaaaaaacaggctcttcttcacaattttacgataaattcaacagcagatatagcatatcaataattttggaggagctttattacaagataccatcttataaaaaccaattgatctggcagtctcaaaacaatgctgacttttttgtgaggttcgttgctcgtatgttgaatgacttgactttcctgttggatgaaggcctaagtaatttggctgaggtgcataatatccaaaatgagctggataatcgtgcaaggggcgcgccaccaacaagagaggaagaggacaaagaactacaaacaagattggcgtctgcttccaggcaagctaagtcctcgtgtggattggccgataaatcgatgaaactgttcgaaatctattcgaaggatataccggctgcatttgtcacaccagaaatcgtatatagactggcaagtatgctaaactataacttagagtcacttgtcggtcccaaatgcggggaactaaaagtgaaagacccacaaagttattcattcaacccaaaagatttgttgaaagccttaacaactgtttatatcaatctttccgagcaatcagagttcatcagtgctgtcgctaaagatgaaagatcatctactagaaatctcttcgttcgcgcagttgatatt

SEQ ID NO: 79413 - DNA, 984 bp, Saccharomyces pastorianus
atggcagaagtcttgatggaattcccagagttatatactgaaatgagcggtactaaagaaccaattatgaagcgtactactttggtcgctaatacatccaacatgccggttgcagccagagaagcttctatttacactggtatcactcttgcagaatacttcagagatcaaggtaaaaatgtttctatgattgcagactcttcttcaagatgggctgaagctttgagagaaatttctggtcgtttgggtgaaatgcctgctgatcaaggtttcccagcttatttgggtgctaagttggcctccttttacgaaagagccggtaaagctgttgctttaggttccccagatcgtactggttccgtttccatcgttgctgccgtttcgccagccggtggtgatttctcagatcctgttaccactgctacattgggtatcactcaagtcttttggggtttagacaagaaattggctcaaagaaagcatttcccatctatcaacacatctgtttcttactccaaatacactaatgtcttgaacaagttttatgattccaattaccctgaatttcctgttttaagagatcgtatgaaggaaattctatcaaacgctgaagaattagaacaagttgttcaattagttggtaaatcggccttgtctgatagtgataagattactttggatgttgccactttaatcaaggaagatttcttgcaacaaaatggttactccacttatgatgctttctgtccaatttggaagacatttgatatgatgagagccttcatctcgtatcatgacgaagctcaaaaagctgttgctaatggtgccaactggtcaaaactagctgactctactggtgacgttaagcatgccgtttcttcatctaaattttttgaaccaagcaggggtgaaaaggaagtccatggcgaattcgaaaaattgttgagcactatgcaagaaagatttgctgaatctaccgattaa

SEQ ID NO: 79414 - DNA, 702 bp, Saccharomyces pastorianus
atgcaaaaaagtaagtttcatctcaccattgaaggtccaaaagtacttgcttatttacttggtttatggattggtgatggattgtctgacagggcaactttttcggttgattccagggatacttctttgatggaacgtgttactgaatacgctgaaaagttgaatttgtgcgccgagtataaggacagaaaagaaccacaagttgctaaaactgttaatttgtactctaaagttgtcagaggcaatggtgttcgcaataatcttaatactgaaaatccattatgggacgctattattggcttaggattcttgaaggacggtgtcaagaatattccttctttcttgtctacggacaatattggtacccgtgaaacattccttgctggtctaattgattctgatggctacgttactgatgagcatggtattaaagcaacaataaagacaattcatacttctgtcagagacggattggtctctcttgctcgttctttaggcttagtggcctctgtcaacgcagaacctgctaaggttgacatgaatggcaccaaacataaaatcagctatgctatttatatgtctggtggagatgttttgcttaacgttctttctaagtgtgccggctctaaaaaattcaggcctgctcccgtcgctacttttgtacgtgagtgccaggattttatttcgagttacaagaattaa

SEQ ID NO: 79415 - DNA, 1488 bp, Saccharomyces pastorianus
atgttcaaaccaaattcacaggactatttcaggacctttcttttggggcttttttcaccatttctttattatttcctgaagacctttctattcaatataaatcaaaggtttttaatattgaacctgatagtggattttcctatcaacgacatctttatgcttttgatactgattggtttagcgtaccctcaggtgcaagatcacgaaggcggtacgatcaagcataaggaatgttcttggcacatcattccaagacaagcctatatctttggtatatcatgggccctgggtgaattcaccatatgcataatagggaatttgtttaactaccaagaaatcgccgatccaaacattaatagtggcttcacacaccaggaaagcgccaacacttactgtaacaataatgacatgagccataacgatgactgcggttgtagtacagaatatcgccccaacgtcgtagagagaagtgatattacgttgtccaaatgtattgaagtaagaaatgactcatcttccatatcgaataacgtatactcgtctgagtaccatccaatcaaacctctacgttcatcgtcatcaacttatggcagcatacgacagcaacctcatgaaaataagaagcagctgcatgtaccagataattcgcaggacgatacaattatcatgatgaaccccatcgacaattcattaaagttgacaactctagatacgggtgatttgagtttccccatagacgaagaacagcccattttgaagaaatcttttggttatacatgggcagttcctaatgaaaatacacaaaatactactaaaagcttcacaccgataaagagatttattgcatttagcacggcataccagttggtcaccggtttattgttaatggtattggtagttggtagtaatatcatgttgacaattggggaatcattaattctgtcgatgtatttcgtctatgttcgcggccatgaaggattatttactcccgtggtaaactacttcggctcaagaaccatttcaaatttcatcttatgcgtaataattcctttcatatctctaaacttcctcatcaacacttcgatatatttaagaagagagctagatgattggtttaataattcacagggggagtttgaggacgacgacgaaaatactatcagtaagagagtagctacaaatcaagagtaccaacatccactgagtgctaattacatttcgatggatagtcctgatgtaataaatagcagcccgggtcacttcgggatgaattcaggccagttgttaggtaatacgacgttatattatggtagtttaaatggggatgatgatgatatgaccaacgactccgctttactaagattctgcaagaagctagtcaaaaattggagggctttggcaagaaatgattcttttgtacttggtgtaatggtttcttggagtcttcttgtttttgtaacgggaatactttcaacagtttatatatag

SEQ ID NO: 79416 - DNA, 156 bp, Saccharomyces pastorianus
atggtccgattaaatcatgcagcatcatattttatgcctattttctgctccacaaggcctcacatagtgatactttctgcgctgttagtatttcactgttttcactattctatgcgtcgtccgaattactgctacaccagtatgatgatccattga

SEQ ID NO: 79417 - DNA, 66 bp, Saccharomyces pastorianus
atgatgaaggatttgaaggttcattatgatcctaatggaattttaaacccttacaaatacatttga

SEQ ID NO: 79418 - DNA, 117 bp, Saccharomyces pastorianus
tttgtcgacaaacttgctctaatcgattatgacggtttaaatgcacaaaaaagaaggttagattacgatgaaaaggacctttatacattcattgtgaaaaaggtaaaaagagactaa

SEQ ID NO: 79419 - DNA, 1953 bp, Saccharomyces pastorianus
atggctactggcaggattcaatttgctgtttctactccctgcaatactaagggtaaaccgtctggttataggttatttgaatttaaaaacgatcgattagcactggtcccatcagaaagaggttgtacaaaagtagatgtgaatgcaaatatacaagcgttttgttatttaaggcctaatggtagagacacgtcaatatctccagacgcaacgcatattttggactcatgtgattacatggtgctggctaaatccaacggattcattgaaatcataagcaactatcaatacaagataaaaaatggcctgcgattagcgccctcttatatccttagatgtactccggaagatttcgaatccaatttttttagtgactatatgatcgctggtcttgaatatagtcaaggtttattatattgttgtatgtgctccggtcgaatatatgtctttgtaatgaaccttcccactgattacattcagtataagaacatgtacaaccccatgttcccagattgctttttcaaagtacatcacgataataatacaacacattcttcagaggaagaaaaattatttgaaggtagtacgcggtacactggaaggtcacgctctaagcatatctgctacttccttttgcctatagaaccgtcccatttaaggtcgtcgcccgttgtatcttcgttttgcaatatgtatcaaggcctgcccatatataggccttcgatgtatctacatatagaacgaggtatttcaacattccatataaatccattagaccggtttcgtttcatgacagtatcgccacgatcaccactatttataaggaaaataattttaccattgacttatgttacatttttaagcacctttatcagcctaaagaacagtatacagggagatacatgcggtgagatactttcgtgggacaacgtagcgcaacaaaatggatttggttctttgttcagctggattagtaacaagtttacattcgatacggatattataaattcaaccatttgggatgatattgtaaaatattctggaacaggaatgctggattcaggaatcgtctggaaacagcgtcaaggtcacgctaaagatgacatatatgagttattccacactcaagatatgctgggaagtagtcgccgaaattcttcattcagtactgctagcagcgaaccgagaccgctgagtcgaagaaggagagaatcttttcaagccttaactagagacgcttttagagaaagaatggatgtaccctgttcaacgaagtgggaattagattcttttatccgaggattaagaaggaatacattcatggtagattttgaaattgttgaaaagatttctcatagaaatggaaatgatggggtgaatgaagatgataacactacagatgaaagtgatgaaacaatgacttcttttctaacagataattacaaaaagatggacattgtgtgcatcgatcatttcgtcacgttgagtgcattccgacctcggtactatgatgaaccaataattaaaatcgattcattatcgaacaaaaatggctccgaaaatggaactaatgaagaagagtgggcagaaagtcaaatgaaggtggatggccaagtgatagatgatgagacagctcaattcaagcaggcattgggaaatttatgttcattcaagaaattatttatgctggatgattctttatgctttatattggacacacatggagttttgttgataaatagatttgaaataaaaaataccaaaaatttgttaaggaattccaaggatactattcggataataccgcatgatttcggattgattaatgatacaattgttataattaatgatatagacgtaggcacagacaatgtttgcgcccttacgtttcacttggtggtaacatcaatggcggagagatactgtcttaaggcaattttcaaactgcggtaa

SEQ ID NO: 79420 - DNA, 408 bp, Saccharomyces pastorianus
atgaacagaaattcggacgaaaatgaagactatcaatttagtgagtccatatacgatgaggatccactaccgagaccttcccataaaagacattcacaaaacgatcactctcatagtggcagaaataaacgtagagcatcgaacttccatcctcctccttatcaaaagtctaatgtcattcaaccaactataaggggcgagacgctgtcactcaataataatattagtaaaaattcacggtatcaaaatacaaaagtaaacgtctcgtcgatatcggagaatatgtatggctccagatataacccttctacttatgttgataataacagcatttccaactcttccaattacagaaactacaattcttatcaaccatataggagtggtaccttggggaaaagaagataa

SEQ ID NO: 79421 - DNA, 351 bp, Saccharomyces pastorianus
atggttgatagtgtcctgcttgactttggagaaattatgtttccagcgccacctcttccaatagcaaatttttccggtgcgcttttgcccttgagcttatttttaggcttcttgaacgtggacttgatagccgccaaagcattgccattggaagtcaccacaaacaggttgtcctcgtttgcattgatagtatcctcatcctcgatattgccgcctcgtatctcatcctcttcatttccaccattgctggccaccttttttttgttgaagaaaatgtttcctgccccacctctaccaacgacaattggggcgttgttgttcggagacgaagtggtggcatgcaaagactga

SEQ ID NO: 79422 - DNA, 171 bp, Saccharomyces pastorianus
atggaatttatgtcaccaccgttatcgatggcaacaaagtcaatgaaggagggagatgggaatggtagctcgtttaacgagttcaaaagtgacaaagctaacgttaatttttccaatgttggtgataatagcgctttcggtaatggttttaatagttcggtacgttggtag

SEQ ID NO: 79423 - DNA, 1482 bp, Saccharomyces pastorianus
atgcactatgtggtactagagctgcaagttgcgcatttgccagatacccccaaggatcaatgtcgcattgcgaatatagcatttcaaattgtgaatgctgaaacattagtatgccattatgggaccaattctttaccgagcattgaagtaaacgggacgacaaagagtttggagagtgcaatggtgcaattggacaaggatattcatgacgttattggtaacgacgactttgttcttgtttccctgtattcaacatggcatatccgtgttaccttaccacgtcaagcgagagatgatgggtttattcttacttcttatttacaacatccgaaagtatttgacttatggaaggaattcgatagatggtgtgtcaaccatccggagattttgggacaaaagaaagcaatctccaacaacaattgtaatactaaaagtattagtattaatgcagccaaaaatacgaaggatttggacgaaatagttagaatattggaagtttcaatcccaactgaagaggcaggctctgttccagagatatactctcttttaaaaaggacaacggatatattaatacaattgcacaagaagtgtacttcccctgaagatatggaatctgtcttaacaaaaccatatgactcacacaccgatattagagcttttttgcaagagaaatctaagattttgtacatgaacaatttaccgcccgacacaactcaaagtgagttggaatcatggtttacccaatatggtgttagaccagttgggttttggactgtcaaaaacatcgtagaagatacgtctaacgttaataataactggagtctaaataacagtccctatgtggaagatcaagatagtatctcaggatttgttgtcttccaaacacatgaagaagcaactgaagtactagcgttgaatgggagatcaatcctatctaatctggcaaacactaagcaaccaagggtggtggaacatgtccttgagcttcaaccttcttccaccggagtactcgataaggcacaagaaattttatcgcctttccctcaaagtaaaaacaaaccaagaccaggtgactggaattgcccatcttgtggtttttcaaactttcaaagacgtactgcatgttttagatgttcttttccggcaccatcaaatagtcaaatacatactgcgaactcaaacaataatgttaacagtagtagaaataatttaaacaatcgcgtgaactcgggatcttcaagcaatattagtaacactgcagcgaatcacccctatggtgcccctgagttcaacatgattgctaacaacacgccagcagctttaacatacaatagagctcattttcctgcaattacgccattgtcgcgacaaaattcattgaacatggcaccatcgaacagtgggtcgccgataattatagcggatcatttctcgggaaataataatatagccccaattatcttatataataatattacataa

SEQ ID NO: 79424 - DNA, 258 bp, Saccharomyces pastorianus
atgctgcaggtcgtggtgatgtatctaaagaagcgttataaaatcctcagccaaaatgaaggtggtaatgatatgaaaattgccgatgaagtagtaccaatgatacagaaatatttggatatattcattgatgaggcggtgctgcggtccttgcaatctcacaaggacattaacggagaacgtggcgataaaagtcccttagagttatcgcatcaagatttagagcgtatcgtagggcttcttctgatggatatgtaa

SEQ ID NO: 79425 - DNA, 234 bp, Saccharomyces pastorianus
atgaatatagttttgagaaagggatgtgaaaaaaagtgcaatatgttcctaactaatgttatcgcatgcattcaatgggttgatctttccgattgtttcttttctaacttggcacggtccaaggcttctcttttaattctcttgtcttcctttattttagattttatttttctacaccaatgtctaaatttatcatctttagacggtgatacgtatttcattataagatcatga

SEQ ID NO: 79426 - DNA, 102 bp, Saccharomyces pastorianus
atgccatcaggtgtatcgttatgcccacctaggggaaactctccagttaccagctcgatgatcattaagcccaatgaccaaacgtcccctttgatagaataa

SEQ ID NO: 79427 - DNA, 132 bp, Saccharomyces pastorianus
atggatattggcaaaggtgccgaaaccacatttttacaagatgttatagcattaagtatcgctgatgatgcatcctcagcggaacttctaggccgtgtggacggtaaaatagtagtcacacctcaaatctaa

SEQ ID NO: 79428 - DNA, 861 bp, Saccharomyces pastorianus
atgagccagttcctggaacaaatcaagtttaattctttaaagaggatagcttttggcgctgtcttggtaaggattgtttcacaatatcaacgcatttccaaacggtacataccggaggtggtttacttctttcaaaaaatattactcacttttatagttgagaaagaaaatcaagaaaaaccattagattttgaaaatattagactagactcttacgagttggggcttccattggacgttaactttacaaaaaagagatcaactattattccattacataccttgtcaacaatggataccgaggcacatccggttgatcaatgtgtctccgttttactaaatgttatggaatctttagatgcaactatctctactgtgtggaagagcttacctgctttcaatgaaattattttaccgattcagcagttattaagtgcatacacctcaaagtattctgattttgaaaagccaagaaatattttgaacaaagttgaaaaattaacgaaattcacagaacatattccgttggctttacagaaccacaaacccgtatccatacctacgcatgctcctaaatacgaagaaaacttcaatcctgataaaaaatcgtacgatcctgatagaaaaagaagtgagataaataagatgaaggcccaactaaagaaggaacgtaaattcactatgaaagaaatccgtaaagacgccaaatttgaagctagacaaagaattgaagaaaagaacaaggagagcagcgactaccatgcaaagatggctcatattgttaacactattaataccgaagaaggtgcggaaaaaaacaagtatgaaagagaaagaaaactacgtggcggaaagaaataa

SEQ ID NO: 79429 - DNA, 1053 bp, Saccharomyces pastorianus
atgatacaaaaggttatggaatatttgaaaagctcgaaatctttggatttaaacaccagaattagtgtcattgaaactatcagggtggttacagagaacaaaatatttgtagaagtggaaagagctagggtcaccaaagatttggtagaaattaagaaagaagagggtaagattgatgaagctgcagacatcttgtgtgagttacaggttgagacctatggctccatggaaatgtctgagaaaattcagtttatattagagcaaatggaattgagtatattaaaaggtgattattcccaagccacggtgctttcaagaaaaattctgaaaaaaacttttaaaaatccaaaatacgagtcattgaagctagaatattataatcttctggtaaaaattagtttgcacaagagagaatacctagaagttgcgcagtatctgcaagaaatttatcaaacagacgccattaaatcagatgaggctaagtggaaacctgttttatcgcacattgtatatttcttagtcctttcaccttacggcaatttacaaaatgatttaattcacaaaatccagaatgataacaacctgaaaaaattagaaagccaagaatctttagtaaaattgtttactacgaatgagttgatgagatggccaattgttcaaaaaacctatgagcccgtcttaaatgaggatgatttggcatttggtggagaagctaataagcatcactgggaagatttacaaaaaagggtcatcgagcacaatttaagagtcatttccgaatactattccagaattactttactaagattgaatgaattgctggacctaacggagagccagacggaaacatacatcagtgatttggtaaaccagggcatcatatacgctaaagttaatcgcccagccaaaatcgtgaattttgaaaaaccaaaaaactcaagccaattattgaacgaatggtcacataatgttgacgaactattagaacatatagaaacaataggccatttaattacaaaagaggaaatcatgcacggtctgcaagctaaatga

SEQ ID NO: 79430 - DNA, 777 bp, Saccharomyces pastorianus
atggacgatatgttcaataacgcggagtttaaactgctgttggcgttgaacgaccaatatatgatgtttgccaaggagtacgacattgagaacaaggtctataagtatttgatcaatgggtctgtctcaagatgttttacggagctattattactgaaattcaatagggcatcggaccctccgttacaaattatgatgtgcaaaattatttatcttatcttgacaccaagaggagactactctccgatgaatttcttttatacaaacgacttacatgttcttatcgatgtattaatcagagaactacagaatatcagtgaggatgaagaggtattgagaaacacccttctaagggttctgattccgctattaaagaatacacaattatccaaaacacattatagaaaggatgatttgaataaactattaaactacttgtcgactttagataatatatgcgttgacagtccagcgttgcacgagcatcaagttacagtggccttatctcggaagtgtcttcaacaaattccttggttagagacaccttcaacgccttcagatggaggttcatcggtctctagtaataacactagtagaaactctagcattgttgcattggggacgcccgacaatcaaaatatcttggctcgtaaaggccatctttatagtaatcgtgaattagatgtttctgcagaatctttgactaaaagaaaggctaaagctccgcctccgcctcctcctcctcctccatcaagaaaatgtggaactccaaaataa

SEQ ID NO: 79431 - DNA, 468 bp, Saccharomyces pastorianus
atgatattagatccattatctccaaatattgaaaatcatactcaagatgaaataattgagttttgggaaaaaactgagtctattgctaacataccaaaggaaaacttggatgaatcccatgttaactcaagcctggttgcctacctgaagtttgctactgattcctataaggtttttattaatactgatcgtgacctctaccggatgtcgctaatactgttagaatcgtccttatttgaatttaaaaaagagttttgcctaagtaagttgcagtcgttactcaacatagacctactggaaatgaatatgaagttcattattgtttacattcttctctgtgaggcgaaaaaaaacgtgtactccttagaaatcatgctcaagttccaaggatttactgtgttttataataccttgtacacacaattcgcctatttgagcaaatacggaaaggaaaggacaagttgcctt

SEQ ID NO: 79432 - DNA, 537 bp, Saccharomyces pastorianus
atggtcgatgatgctgaagatgaaaaattagcacacaagatactggaaactgctagggagtatatattaggtttatccattgaattggaacgccgctcattaaaggagggaaatactgtacgcatgcttgagctagctgcatactttacaaaggcaaaactatccccaattcatcgtaccaatgctttacaagtggctatgtcccaacatttcaaacacaaaaatttcttacaggcctcatattttgccggtgaatttttaaagattatttcttctggtcctcgtgcagaacaagcacgtaaaatcaaaaacaaagccgactcaatggccagtgacgccattccaattgactttgatccttatgctaaattcgatatttgtgcagccacctacaaaccaatttatgaagatacaccttccgtttctgacccattaacaggtagtaaatacgttatcacggaaaaagataaaatagatagaattgctatgatttctaagatcggtgcacctgcatccggattaagaatacgtgtataa

SEQ ID NO: 79433 - DNA, 2934 bp, Saccharomyces pastorianus
atgaagatgttaactaaatttgaatcaaagtccactagggccaagggcattgccttccacccctccagaccttgggttttggtggctttgttttcctctactattcaattatgggattacaggatgggaacactacttcacagatttgaagaccacgagggccctgttcgtgggctagatttccatccaacccaaccgatttttgtttcggcaggtgacgactataccattaaagtttggtccttagatactaacaaatgtctatacaccttaactgggcatttggattatgtccgtaccgtgtttttccaccgtgagctgccttggatcatatctgcttctgatgaccagaccataagaatctggaactggcaaaaccgtaaggaaattgcatgtttgaccggccacaatcattttgtcatgtgtgctcaatttcatccaaccgatgacctgatcgtttccgcttctctggatgaaaccatcagaatttgggatatttccggtttaaggaaaagacactccgctcctggtactagttcatttgaggagcaaatgagtgcacaacaaaatctattggatggctctcttggtgactgtgttgtcaagtttattctagagggtcacacaagaggtgtcaactgggcctctttccatccaactttaccattgattgtctccggcagtgacgaccgtcaagttaaattatggagaatgagtgctacgaaagcttgggaagttgatacttgcagaggtcacactaacaatgttgatagtgttatctttcacccacatcaaaacttgatcatttctgtgggtgaagacaaaacgctaagggtttgggatcttgacaagagaactccagtaaagcaattcaaaagagaaaacgatagattttggttgattgcagcacatcctcatatcaatctatttggtgcagctcacgattctggtattatggttttcaagctcgatcgcgaaagaccatgcagctttatccatcaaaaccagttgttttttgtcaatgctgaaaagcaaatccaaagtttcaatttccagaaaagagtcgcttcattaccttatgcgtccttaaagggcattggtcaaccttgggatgcattcagaagtatatcgtacaatccctcccaacattcagttttggttaatgaagctaatggcaaatttgctctcgttattttaccaaaacaaccagttggagctgtggagccaacaagtgtcacccaagatacaggtaattttgctacttttgttggtcgtaatagatttgttgtttacaacaagaacactgaatctgttgaagttcgctccctcgaaaacaaagttacaagaaatatcaaagtagaggaaacagtaagaactattgtagctgcaggtcctggatctgttttggtcatacaccccagagaagttattctttatgatgtccaacagggcaaaaaagtatcccaattggctgttaaaaacgtcaagtacgtttcgtggtccttagatggtcaatatgttgcattgatgagtaagcacaccataactttggctaccaaaaagctagaattgattaattctatgcatgaaacgattagaatcaaaagtgccgcttgggatgaaactggtgtattaatttattcaactttaaatcatataaggtactcactattgaacggggatagaggtattatcaaaactttggagaaaactttatatatcacaaaagttcagggaaaattagtgtactgcttgaaccgtgaaggtgagattgaaattttaaccattgatcctacagaatatcgcttcaaaaaggccctggttaacaaaaatttcccagaagttttacgtctgataaaagattctaatttggttggccagaatatcatttcctatctgcagaagtcaggttacccagaaattgctttacaattcgttcaagacccacatatccgttttgatttagctttggaatacggtaatttggatgttgccttagatgaagccaaaaaactgaatgattctagtacttgggaaagattaatccaagaagccttggcacaaggtaatgccagcttagctgaaatgatttatcaaactcaacattcttttgacaaactttccttcctgtatttagttacaggtgacgttaacaaactatctaaaatgcaaaatatcgctcagactcgtgaagactttggaagtatgctattaaacaccttttacaacaattcaaccaaggaaagatctagcatttttgcagagggcggctctttaccattagcttatgccgtagcaaaggctaacggagatgaagcggctgcttctgctttcttggagcaagctgaagttgatgaacaagatgttactttaccagaccagatggatgcctccaacttcgttcaaagaccagtgatctcaaagccacttgaaaaatggccattaaaagaggctgaactatcttactttgaaaatgctgttttaggtcaaattgacgatttgactatagacgatgaaactccagcagtaaacaccactcaagagcaagaagaaccactaggcgaagaaaactttaacgatgaggatattggtgaagacgaaggtgcctgggatttgggtgacgaagatttggatgtgggagaagagttacctgaagaagttgagcaaggcgaaattacctctccagcacaggaagttgaaacagccatttggatcaagaattctaaactgcctgctgtcctagttgccgctggtgcctttgatgccgctgttcaagccttgagcaagcaagtgggtgtagtcaagctggaaccattgaagaaatattttaccaacatttatgagggttgtagaacatacattcctagtacgccctgtgaacttcctgctcaattaggttatgtcagagcgtatgatgataccgtaagtgaagat

SEQ ID NO: 79434 - DNA, 159 bp, Saccharomyces pastorianus
atgattactggtatcacggaagactacggtttactgattgcaaaagaattggtaagcggtagttccactcaatttacaggaaacgtttataatttacagccggacggtaacacttttgatatcttcaagagcttaattgctaaaaaggttcagagttaa

SEQ ID NO: 79435 - DNA, 1881 bp, Saccharomyces pastorianus
atgaatgtattagtctataatggcccagggactacgccaggatcagttaagcatgctgttgaaagtttacgtgactttttggaaccctattacgccgtcagtactgtcaatgttaaggtattacagacagaaccatggatgtcaaagacctccgctgtagtttttcctggtggtgccgatcttccttacgttcaagcttgtcaacccattatttctcgattgaaacattttgttagcaaacaaggtggtgtctttatcggattttgtgcaggaggttactttggcaccagccgtgtagaatttgctcaaggtgaccctacaatggaagtatcaggaagcagggatttgcgattctttccgggaacaagcagaggacctgcgtacaatggatttcagtataacagcgaggccggtgcacgtgcagttaaattgaatcttccagatggctcacagttctcaacttatttcaatggaggagccgtttttgttgatgcagataaatttgataatgtcgagatcttggccacgtacgcagaacacccggatgtgccttcttctgactcaggaaaaggtcaaagtgaaaacccagctgctgtagtgctatgtacggtcggaagaggaaaggttttactcactggaccacaccctgaattcaacgtccgttttatgaggaaatccacagataagcattttcttgaaaccgttgtggaaaacctgaaagcacaggaaatcatgaggttgaaatttatgagaacggttcttaccaaaactgggttgaattgtaataatgacttcaattatgtaagagctccaaatttgacaccactgtttatggctagtgcacctaataagcggaattacttgcaagaaatggaaaacaacttagctcatcatggaatgcatgcaaataatgttgaactctgctcagaattaaacgccgaaactgactctttccaattttatagaggctatagagcctcttacgatgcagcaagttcgtccttgcttcataaagagccagatgaggttcctaagaccgtaatatttcctggcgtagatgaagatattccaccatttcaatatacgcccaattttgacatgaaagaatacttcaagtatctgaatgttcaaaacaccataggttctttacttctatatggtgaagttgttacatcaacgagtaccatattgaataataataaatccttattaagttcgatccctgaaagcactttacttcacgtgggtactattcaggtttctgggcgtgggagaggtggtaacacttggattaatcctaaaggtgtttgcgcatcaacggccgtcgtaacaatgccgcttcaatcgcctgtgactaatcgaaatatatcagttgtttttgtccagtatctttctatgcttgcttactgtaaggcgatactttcgtacgctcctggattttcagatattcctgttaggatcaaatggcccaatgacctttatgctttgagccccacctactataagtgtaaaaacttgaaattggttaacaccggttttgagcatacaaagttgcccttaggtgatatcgagcccgcttatcttaagatctctggtttattagttaatacccacttcataaacaataaatattgtgtgctacttggctgtggtataaatttgactagtgatggtcctacaacttcattacaaacttggattgatatcctgaatgaagaacgccaacaattacaccttgatttattgccagcaataaaggcagaaaaactgcaggcactctatatgaataaccttgaggtcatattaaaacagtttattaactacggagctgcggaaatattgccaagtattatgagttgtggttacatagtaaccaaatag

SEQ ID NO: 79436 - DNA, 354 bp, Saccharomyces pastorianus
ccttcctactctcccacgtcgccaagcgacagccctacgtgtccttcttattctcctacatctccatcatactctcctacgtcaccaagttacagcccaacgtcaccaagttacagcccaacgtctccagcctattccccaacatcaccaagttatagtcctacatcgccttcatactctccaacatcaccatcctattccccaacatcaccttcttactctcccacctctccaaactatagccctacttcaccttcttactccccaacatctccaggctacagcccaggatctcctgcatattctccaaagcaagacgaacaaaagcataatgaaaatgaaaattccagatga

SEQ ID NO: 79437 - DNA, 4581 bp, Saccharomyces pastorianus
atgcactgtggtaagctattactggatgaacataatgaattaatgagacaagctctagcaatcaaagacagtaaaaaaaggtttgctgcaatttggactttatgtaaaacaaaaatggtctgcgaaacagatgtcccttctgaagatgatcctactcagctcgtatcaaggggaggttgtggtaatacacagcctacaattcgtaaggatgggttgaaattagttggtagttggaaaaaagatagagccacgggggatgcggatgaaccagaactaagagttttaagtacggaggaaatcttgaatatttttaagcatatctcagtaaaagacttcactagtttgggtttcaacgaagttttttctcgtccagaatggatgattttaacatgccttcctgtcccaccaccaccggtgcgtccatccatttccttcaatgaatctcaaagaggtgaggatgatttaacctttaaacttgctgatattttaaaagctaatattagtttggaaacactagagcataacggtgctccacatcatgctattgaagaagcagagagtttattacaatttcatgttgccacttatatggataatgatattgctggtcaaccacaagctcttcaaaagtccggccgtcccgttaaatctattcgtgctcgtttgaagggtaaagagggtcgtatcagaggtaatttaatgggtaagcgtgtggatttttcggcaagaactgttatttctggtgatcctaatttggaattagaccaagtcggtgttccaaaatctattgccaagactttaacatacccagaagtggtcacaccatataacatagatcgtctgacgcaacttgttaggaatggaccaaatgagcaccccggtgccaaatacgtcattcgtgatagcggagaccgtatagatttaagatacagtaaaagggcaggtgatattcaattacagtatgggtggaaagttgaacgtcatattatggacaatgatccagttttattcaaccgtcaaccttcgttgcacaaaatgtccatgatggcccacagagtaaaagttattccatattctacatttagattgaatttgtccgttacatctccatacaatgccgatttcgacggtgacgaaatgaatcttcacgttcctcagtctgaggaaacaagggcggaactttctcaattatgtgctgttcctctgcaaattgtttcaccacaatctaacaaaccttgtatgggtattgttcaagatactttgtgtggtattcgtaaactgacattaagagatacatttatagaacttgatcaagttttgaatatgctttattgggttccagattgggatggtgttattccgacacctgcaattatcaagcccaaacctttgtggtccggtaaacaaatcttgtctgtggctatcccaaacggtattcatttacaacgttttgatgagggcactactctgctttctccaaaggataatggtatgcttattattgacggtcaaatcatttttggtgtagtagagaaaaaaaccgttggttcctccaatggtggtttaattcatgttgttacgagagaaaagggacctcaagtttgtgctaagttgtttggtaacatacagaaagttgttaacttttggttactacataatgggttttcaacaggtattggtgataccattgcggacggcccaacaatgagggaaattacagagacaattgcagaggctaaaaagaaagttttggatgttacgaaagaagcccaggcaaacttattgactgctaaacatggtatgactctccgtgagtcttttgaggataacgttgttcggttcctaaatgaagcaagagataaggcaggtcgtttagctgaagtcaatttgaaagatttgaacaatgtgaaacaaatggttatggcaggttccaagggttcatttattaatatcgcgcaaatgtcagcttgtgtaggacagcaatctgttgaaggtaaacgtattgcttttgggttcgttgatcgtaccttacctcatttctctaaagatgattactccccagagtctaaaggttttgttgagaactcatatttgagaggtttgaccccacaagaattttttttccatgcaatgggtggtcgtgaaggtcttatcgataccgccgtcaaaacagccgaaacaggttatattcaacgtcgtttagtgaaagctctagaagatatcatggttcattacgataacaccacaagaaactcattgggtaacgttattcagtttatttatggtgaagatggtatggatgctgcgcatattgaaaagcaatcgctagatactattggtggctccgatgcagcttttgaaaagagatacagagttgatttattgaatacagaccatacccttgatccctcactattggaatccggatctgagatacttggcgatttgaaacttcaagttctcctggatgaagaatacaaacaattagtgaaagatcgtaaatttttgagggaagtttttgttgatggtgaagcaaactggccattaccagtcaacataagacgtattattcaaaatgctcaacaaactttccacatagatcatacgaaaccatctgatttaacaatcaaagacatcgttcttggtgtaaaggatttgcaagaaaacttattagtgttgcgtggtaagaatgaaattatacaaaatgcccagcgagatgcagttacattgttctgctgtttattacgttcccgtttggccacacgtagagttctacaagagtacagactaacaaaacaggcattcgattgggtattaagtaatatcgaggcacaattcctccgttctgttgttcaccctggtgaaatggttggtgttctagcagcccaatccattggtgaaccagccacacaaatgacccttaacaccttccattttgctggtgttgcttccaaaaaagttacttctggtgtcccccgtttaaaggaaattttgaatgtggccaaaaacatgaaaaccccttccttgactgtatacttagagcctggtcatgctgccgatcaagaacaagcgaagttgatcagatctgctatcgagcataccactttaaagagtgtcactattgcttcagaaatttactatgatcctgatccacgttccacagttattccagaagatgaagaaattatccaacttcatttctcattattggatgaagaggctgaacaatcttttgaccaacaatcaccttggttattacgtctggaactggatcgtgcagcaatgaatgataaagacttaacaatgggtcaggttggtgaaagaatcaagcaaacattcaaaaatgatttgtttgttatctggtctgaagacaacgatgagaagttgatcatccgttgtcgtgttgttcgtccaaagtcactagatgctgagactgaagcagaagaagatcatatgttgaagaaaattgagaacacaatgttagagaatattacattacgtggtgtagagaacatcgagcgtgttgtcatgatgaaatatgaccgtaaagtaccaagtccaactggtgaatacgttaaggaacctgaatgggtgttggaaacagatggtgttaacttatctgaagttatgactgttcctggtatcgacccaaccagaatctataccaactccttcattgatataatggaagttctaggtattgaagctggtcgtgcagccttgtataaagaagtttacaatgttattgcttctgatggttcgtatgttaactaccgtcatatggctttgttagtcgatgttatgacaacccaaggtggcttaacttctgttactcgtcatggtttcaacagatcaaatacaggtgccttaatgagatgttcatttgaagaaactgtcgaaattttgtttgaagctggtgcttcagccgaattagatgattgtcgtggcgtttcggaaaatgtcattcttggtcaaatggctccaatcggtaccggtgcatttgatgtgatgatcgatgaggagtcactggtaaaatacatgccagaacaaaaaataactgagattgaagacggacaagatggtggcgtcacaccatacagtaacgaaagtggtttggtcaatgcagatcttgacgttaaagatgagctaatgttttcacctctggttgattcgggttcaaatgacgctatggctggaggatttacagcgtacggtggtgctgattatggtgaagccacgtctccatttggtgcttatggtgaagcacctacatctcccggatttggagtctcctcaccaggcttttctccaacttccccaacatactctcctacctctccagcgtactcaccaacatcaccatcgtactcaccaacatcaccatcgtactcacctacatcaccatcgtattcaccaacgtcaccatcatattcgccaacgtcaccatcatattcgccaacgtcgccatcgtattctccaacgtcaccatcgtattcgccaacgtcgccttcctactctcccacgtcgccaagtctacagccctacgtctccttcttattctctacatctccatcatactct

SEQ ID NO: 79438 - DNA, 378 bp, Saccharomyces pastorianus
atggccatctgcgttaacgccgtggcgattgcgtatattatttacattgcacacgatgaatttgctggtaaacctgttggtttgaggaatccgttaagcaaactgaaactaattttgttggacttactttttataattttttcaagcgctaatctagcgctggcatttaatactcgtttcgacaaagagtgggtttgcacttctattcgcaggtcaaatggaagcacgtatggatacccaaaaataccgcgtatctgcagaaaacaggaagctttatccgcttttctgttcgttgccttgtttatgtgggtaatcactttctcgatcagtattgttagagtagtcgaaaaagtcagttcaattaccaacagaaactga

SEQ ID NO: 79439 - DNA, 294 bp, Saccharomyces pastorianus
ggttcaccactagactatccaaaattaaatacttacacgtttgtgcctaccacagtgccgccttatgttttagaggcgcagtttgataaattaagacttcaggataagggcaccgttgatggaaatgttacagatgataaaaatcttccaaaagagtttaaatggggccagtttgcatctaccatcggctgtcattctgcatacactagagaccaaaactacaatcctagtcacaaatcctacgatggttactctctagtcatcatctaccgcatcaaaaaatgcggctcttag

SEQ ID NO: 79440 - DNA, 861 bp, Saccharomyces pastorianus
atgctaggtagtcttctttctaatttgctgttagtgcttggattctgcttcatattcggtggatacaatagagtccaacagacattcaaccaaaccgccgctcaaacgatgtcctcattacttgccattgcgtgtgcatccctactaattcccgctgcctttagagccaccttacctcatggcaaggaagaccacttcatcgatggaaaaatattggagttatccagaggcacctctattgttattctcatcgtttacgttttgttcttatatttccagctagggagccatcacgccttgtttgagcaacaagaagaagagaccgatgaagttatgagcaccatttccaggaatccacatcactctttgagtgtcaagtcatcattggtgatacttctaggtacaactgtgatcatctctttttgtgcggattttctagtcggtacgatagacaacgttgttgaatctaccgggctatctaaaacatttataggtttgattgtcattcctattgtgggtaatgcagcagagcatgtcacttcagtcttggtggccatgaaggataagatggatctggcgctaggtgttgccatcggttcctctttacaaattgccttatttgttacaccattcatggttcttgtgggctggatgatcgatgttccaatgacgctaaatttctccacttttgaaaccgctactctttttattgctgttttcttatccaattacttaattctcgatggtgagtcaaactggttggagggtgtcatgtctctagctatgtatattttgattgcaatggcatttttctattatccagacgaaaaaaccattgactctattggaaatagtttatga

SEQ ID NO: 79441 - DNA, 291 bp, Saccharomyces pastorianus
atggatgcaactaccccactattaactgttgcgaacagtcatcccgcccgcaatccaaagcacactgcatggagagcagctgtgtatgatttacagtatattttgaaagcgtcacccctgaattttctattagtatttgttcctttaggtctgatttggggacacttccaactatctcacacactgacatttctttttaatttcttggcaattataccgttggcagctatcttggctaatgccacggaagagttggctgataaggctgtaacaccattggggggctgctaa

SEQ ID NO: 79442 - DNA, 90 bp, Saccharomyces pastorianus
atgtctctagctatgtatattttgattgcaatggcatttttctattatccagacgaaaaaacccttgactctattggaaatagtttatga

SEQ ID NO: 79443 - DNA, 2082 bp, Saccharomyces pastorianus
atgtttttgaagccttattttgtggaagcctacagaccagtgaggaaaggtgaccattttgttgtcagaggcggtatgagacaagtcgaattcaaggttgtggatgtcgaacctgaagaatatgccgtcgttgctcaggatactattattcactgggaaggtgagccaatcaacagggaagatgaagaaaataatatgaatgaggtgggttacgatgatattggtggttgtcgtaagcaaatggctcaaattagggaaatggttgaactaccattgagacatcctcagttgttcaaggctattggtatcaagccaccaagaggtgttttgatgtatggtcctcctggtactggtaaaaccttgatggcaagagctgttgctaatgagaccggtgccttttttttcttaattaatggtccagaagtcatgtcaaaaatggctggtgaatcagagtctaacttaagaaaggcctttgaagaagccgaaaagaacgctccagccatcatttttatcgatgaaatcgattctatagctccaaagagagacaagactaatggtgaagttgagagaagagttgtctctcaattgttaactttaatggatggtatgaaggcaagatctaatgttgttgtcattgctgctaccaatagaccaaattcgattgatcctgctttaagaagatttggtagattcgatcgtgaagtcgacattggtattccagatgctacaggtagacttgaagttctacgtattcacaccaagaacatgaagttggctgatgatgttgatttggaagccttggctgctgaaacacacggttacgtgggtgctgatattgcctctttgtgttctgaagctgccatgcaacagatccgtgaaaaaatggacttgatagatttagatgaagatgaaattgatgcagaggtactcgattctttaggagtcaccatggacaacttcagattcgcattgggcaattcaaacccatctgcattgcgtgaaaccgttgttgaaagtgttaatgttacttgggatgacgttggtggcctagatgaaatcaaggaggaattgaaggaaactgtagaatacccagtcttacatccagaccaatacacaaagtttgggttatcaccatcaaagggtgtgttgttctacggtccaccaggtacaggtaaaactttgttagcaaaagctgtagctactgaggtttctgccaactttatctcagtcaaaggtccagaattattgagtatgtggtatggtgaatcggaatctaacatccgtgatatttttgataaggcaagagcagccgcaccaaccgtcgtttttctagatgaattagactccattgccaaggcaagaggtggttccttgggtgatgctggtggtgcttcggatagagtcgtcaaccaactattaacagaaatggatggtatgaatgctaagaaaaatgtgttcgtgattggtgccaccaataggccagatcaaattgatcctgctattttaagacctggcagattggatcaattaatttatgttccattgccagatgaaaacgctagattatctattctaaatgctcaattaaggaaaacaccattagaaccagggttagagttgactgcgatcgccaaagccactcaaggtttctctggtgctgatttactctatattgtgcagagggctgctaaatacgctatcaaggattctatcgaagctcacagacaacacgaagctgaaaaggaagtgaaagtagaaggtgaagacgtggaaatgacagatgagggagcaaaggctgaacaagaaccagaagtagatcctgttccatatattacaaaggagcatttcgcagaagctatgaagaccgctaaacgttctgtttcagatgctgaattgcgtcgttatgaagcatactcacagcaaatgaaagcatctagaggtcaattcagcaatttcaactttaatgacgctccattaggtactacggctacggacaatgctaacagtaataatagtgctccaagtggagcaggtgctgcatttggttctaatgcggaggaagatgatgatttgtatagttag

SEQ ID NO: 79444 - DNA, 477 bp, Saccharomyces pastorianus
atgggtgaagaacataaaccacttttggacgcctcgggtgtcgaccctcgtgaggaggataaaaccgccaccgccattttaagaagaaagaagaaggacaacatgcttttggtggacgatgctatcaatgatgacaattctgtcattgctattaattctaacaccatggacaaattggaattgttccgtggtgacaccgttctcgttaagggcaagaagagaaaagatactgtcttaattgtgttgatcgatgacgaattagaagacggagcatgcaggataaaccgtgtagttcgtaacaatttacgtattaggctgggtgatttagttacaattcatccttgccccgatatcaaatacgctactagaatttctgtgttaccaattgctgattcgatcgaaggtataactggtaatcttttcgatgtttttgaagccttattttgtggaagcctacagaccagtgaggaaaggtga

SEQ ID NO: 79445 - DNA, 228 bp, Saccharomyces pastorianus
atgccgattgccaagagactggccaaggcaatgaagttggacacttataatgtgttgcagaataatggtaaaattgcgcatcaagaagtcgaccacgtccacttccatttgattcctaagagagatgagaaaagtggtttgattgtagggtggccagcccaagaaacggacttcgataagttgggcagctacacagaattgcttgccaaactagaaggctccgattag

SEQ ID NO: 79446 - DNA, 114 bp, Saccharomyces pastorianus
atggagccattgatatcggcaccgtacctaacaacaacaaaaatgtctgctcctgctaggcttgatgttgcctgtattttttgcaagattattaaaagtatgtcacattactaa

SEQ ID NO: 79447 - DNA, 1461 bp, Saccharomyces pastorianus
atgactcctttagatggtatcacggcagaaagaattggttgtttacagtgtggtgagaacggtggcataagatattccgtattttcgggattaagcttaaatttaccgaacgagaatattggttccactttaaaattatctcagttattaagcgactggagtaaacctgaaatcatcgaaggcgtagaatgtaaccgttgtgccctcacagcagcgcactctcatttatttggtcagttgaaagaatttgaaaaaaaacctgagggttcgatcccagaaaagttaattaacgctgtaaaagatagggtccatcaaatcgaagaagttcttgccaaaccagttattgacgatgaagattataagaagttgcatacagcaaatatggtacgtaaatgctctaaatctaagcagattttaatatcaagacctccaccattattatccattcatatcaacagatccgtatttgatccaagaacgtacatgattagaaaaaataactcgaaagtattgtttaagtcaaggttgaatcttgccccatggtgttgtgatattaatgaaatcaatttggatgctcgtttgccaatgtcaaaaaaggaaaaagctgcgcaacaagagtcaagtgaagacgaaaacattggcggtgaatactatactaaattacatgaacgcttcgagcaggaatttgaagacagcgaggaagaaaaagaatacgatgacgcagaggggaactatgcgtctcattacaatcataccaaggatatcagtaactatgatcccctaaacggtgaagtcgatggcgtgacatccgatgatgaagatgagtacattgaagaaaccgatgctttagggaatacaatcaaaaaaaggatcataaaacattctgatgttgaaaacgagaatgtaaaagataatgaagaactgcaagaaatcgacaatgtgagccttgacgaaccaaagatcaatgttgaagatcaactagaaacatcatctgatgaggaagatgttataccagctccacctatcaattatgctaggtcattttccacagttccagccactccattgacatattcattgcgctctgtcattgttcactacggtacccataattatggtcattacattgcatttagaaaatacaggggttgttggtggagaatatctgatgagactgtgtacgttgtggacgaagctgaagtcctttcaacacccggtgtatttatgttattttacgaatatgactttgatgaagaaactgggaagatgaaggatgatttggaagctattcagagtaataatgaagaagatgatgaaaaagagcaggagcaaaaaggagtccaagagccaaaggaaagccaagagcaaggagaaggtgaagagcaagaggaaggtcaagagcagatgaagttcgagagaacagaagaccatagagatatttctggtaaagatgtaaactaa

SEQ ID NO: 79448 - DNA, 267 bp, Saccharomyces pastorianus
atgtccaaatctccaagaaaaaatattcttcttggctacgaccaagaggacgcgcaagaattcttccagaacatactagccgagttggaaagtaacgttaaatcattgaatactgaaaaactagataccactccagttgcgaaatcagaattacccgatgatgctttagtaggtcaacttaaccttggtgaagttggcactgtttacattccaactgaacagattgatcctaactctatactacatgacaagtccattcaaaattga

SEQ ID NO: 79449 - DNA, 1143 bp, Saccharomyces pastorianus
atggcatctgtcatactagattctttgccatcagttattcattcatccgtggaaatgttgcttgatgtcgtcaagggaaccgaagctagtaacgatattatagataagccttatcttctgaggatagttacacatttagccattttccttgatataattaatccaggttctgttgaagaggttgataagtccaagctcattactacgtatatcagtcttctgaaattgcaaggcctttatgaaaatattccaatatatgctactttcctgaatgagtcagactgcttagaggcatgctctttcatattgtcttctttagagaacccccaagtaaggaaaaagcaaattgagacaataaactttctaagattacctgcctcaaatattttgagaagaaccacacagcgtgttttcgatgaaaccgaacaagaatattcaccatctaacgaaatttccatatctttcgatgtaaacaacattgatatgcacttaatatatggcgtggaatggcttattgaagggaagctttatgtggacgctgtccactctatcattgccttatcgaggagatttttgttaaatggccgcgtaaaggctctcgaacaatttatggagagaaataatattggagaaatatgcaagaattatgaattagagaaaatagccgataacatatcaaaggatgaaaatgaagatcagtttttggaagaaataactcaatatgagcatttgataaagggcataagagaatatgaagaatggcaaaaatccgttagcttgttaaaccctgaatcgaacattcctactttaatagagaaattgcaaggtttttcaaaggatacatttgaattgatcaagacatttttagtagatttaacttcctctaatttcgcggattcggcagattatgaaatcctgtatgagattagagccctatatactccatttctactgatggaattgcataaaaagttagtggaagccgcaaagttgttaaaaatcccaaaatttatttcggaagccctggcatttacctcattggtcgctaatgagaacgacaagatttatttattattccaatctaatggaaagttaaaagagtatctggatctcgttgctcgcacagcaaccctttcgaactga

SEQ ID NO: 79450 - DNA, 363 bp, Saccharomyces pastorianus
atgattggttttcacaagtgtatgagcaggcatttcagaagtttgcccacggaatgtaataaaactggaataaaaacactactggtgtgcccgggaaaaatcaaaactaatatgtttattgatgtccctacaccatctaagttattggctcctgacatcataccttcccaactggcactagcgataatctctgcgatggagcataatcatctgcaaacactaaatgccccatattatgtgaacctggttccctttttcaaaactttgagttggccatataggcatctcttaaaacatttcagtggaatggaccatgtaacgtcaaccagcccgcgagcaataaatccgaagagaagtgcataa

SEQ ID NO: 79451 - DNA, 807 bp, Saccharomyces pastorianus
atggtacgcaagaataaaataaatagcgcgagtggaactacaaaacacctcaaggattttccatcagtcatcctaagtctgcccagctacaacccttccatcctttctaaaaatgcaattgcactaataaccggtggttctagtggactcggatttgaacttgcaaaggaactttccagaagaattaataaagttattgtggcagatattcaatcatttcctacttttgctcaggtagaatataataacattttctactatcaatgtgacataacaagtctagatgaaattaaaaatttgaaaaaagctattgaaagagatcatggcaatattaatataattataaataatgctggtgttgctcacatcaaaaagttagaacatatgacaaacaaggaggtagaacaattgatcgacataaacttaataggtgcttaccgaatcatcagtacatttgcagaagatatgatagacaatagggaaggctttataattaacattgcttcagtcctcggagaactgactcctgcaaggctgacatcgtatggtgcatcaaaaggagcaatgattggttttcacaagtgtatgagcaggcatttcagaagtttgcccacggaatgtaataaaactggaataaaaacactactggtgtgcccgggaaaaatcaaaactaatatgtttattgatgtccctacaccatctaagttattggctcctgacatcataccttcccaaatggcactagcgataatctctgcgatggagcataatcatctgcaaacactaaatgccccatatgatgtgaac

SEQ ID NO: 79452 - DNA, 621 bp, Saccharomyces pastorianus
atgaaaggtcctgatggcttgattaaagagacaccgatacggaatctgttaacagcgcagtacatctcctgtgacacttctccactgctaacaaaaagtggagcttgggaaaccgttctggatctggacaataaaaaatcgaatgatgtcgttacacgttctgaattgattgtggtatcttcattagtcgataagccgccaaacctgggaggtatttgtaggttatgtgatgttttaggtgtgggactgcttactgtacaagacatcaaagtcaaaaaccatcctcaatttaaaaatgttgctgtgactgctgatagatggatgcccatggaggaagttgccctagatgagattgcaagtttcatgaaagggaaaaagaaggaagggtacacattaattgggctagagcaaacggataaatcagtgaagctagacaacaatttccaattccctaaaaaatcattgatcttgctaggaaccgaagcattcggtattccggggactttgttaagcgaattggatttatgtttagagattcaacaatttggtgtgatcagatcaatgaatattcaaacggcaaccgcagttatcgttcattcctatacagttcaacacatgtaa

SEQ ID NO: 79453 - DNA, 3705 bp, Saccharomyces pastorianus
atggttggaggtgctctcatctgcaaatatttaccacgcgaagagcaactaaagcttatatcagacttgattcagaatgacagcttagaagaggtgctggagttgattgaaactttgccactggatataacgacagacagcaacattgaaacaccaatctttgaaaaaattactgagcaggtcattgcgtatgctagtatagacggtgaagccagggaaatgtttcgctcttcgagggctgaaatgaacaaggcgctaagaacttctgcacaattactatgttgtttacccagtgtatggcataaatttcaggtgtggatgagctaccggttaaatgacatcattagcgaaaactataaacatctcttcaatgacaactttggaaaaaagattgtacaaccatttttcgattcttttgctgaggaacaaaacgctaatatcaagaatgaaaatctgcacttagatatccttagcctgcttcactacttagaagttgtatatttatttgacgaatgtaagaatggtatatcgtccaaatgcctagattttatcattgttccattgttaggctgtaattcggaagagattgctgattcctgctccaagttaatgagatggcatatcaaatatttatcgaaatgctgtaataccgatagtaactttgataagctcatttggacatttatcaaacaattgtacgctgaaggctcccaacaagcttggaagcaaaagaacagtttatcttttctcctaagattcctcttagcagcagagttgtctcctgaacttattacttatataaagaccgatgcttattggaggcacattcaaacagagctggataatgatgtgcacgaacacagaaaattggcactctcaattcttaaattaaccattcaaaaactgtcatctcatggtataacattgcaaacaacattttataaatgcaatgatctagcaaatatcgagatgcttggtagctggaagaaattcaccaccttatatgaaatgattgctctggacacatcattgaatcaaatacaagcggccaaacaagatataataaaaatttttgataacgtgcatttgcaccatagttggggccttatcttgctttctacaggattgaaatcatcaatggagagtgtcagaaaatacatgatgacgttaatgttctcgattacaaatatgtcagcattctcttcaaacttgccattattgacaaaaactcttcttccagctgcaatgtccgctcattattttgacgtaaaaggtgtcagttgtccccatggtgaaaaactttcattatttgtcaataacttactttcccaaacaacagaaggcatatcagatatattatttgaaattttgaaattattggtggaaaaagggacctcttttgacccttctaggatatacttgtcctgcggtatcttagttttcttccagaataacaaacagaaaacaatcaactctgaccatttgagtctgatcaggaaattgtacgattttgcagccgaagaagaggttctcgaaactacaatccaaacaatttacttgaagttcttactgtacattgatccatctgtctccgcatctgaattattgtttacattagtttcacacattaagttaaagggagggacatacaaatatgttgagcctctttttgaagattatagggatcttgccgtttctcactttgacgatttgcaagcgaaagaaaacttgacgacaaacatcggaaaggatactatttttgacctcttagcatctatcatcttcgatttcaaggatattgatattactcccgattttttaattgaagttgcgaagtcgaagcaagatatacccgtttacactccaaaggcagttacttttctaactcagctactttcaggcgaaccttcgaacggttatacctatgaaaatgcaaccgctttgttgtcttaccccaattttacaatatctacatggaaatccatcaatgtgaataatttatttaagtcggtaatggaaaaattttcgcttgataaattcaagttctttgctgaaatttaccagaagacttatgaatgtaggttcgacacaatcgagctaaattttaatgaccttctgagcctatatgaaatggttaaaaagtctgccaatcagtgttcaagagagagctttaaagtgaaggactgcgcttattcttcttactttgaacttttaaataccttcctcaaaacatacgccttaaatcgtgactcctctgaaggaaatgatgatgagcttcacatgctactacgcttagttgacgagaatattaacaaagataatgggaattatctggggaatctggcagtctgtaaattattgtactttatcatagattcctacatccattgctccacatctgtttctgatgatgatattttcatagtgaaattcatttttgagaaattttcgtttatatgggaatgtattaatagtgaaagattagttttgaaggaaagggatctgcatttgatgctaattaagggattatttcatcctgtgattctgtactttggatcaaatcagtatatcgatactttgacctcgaagttggaggaacatgcacaaacgattatatcattgagttattccagaagaagcctactccctcttctcggatcacaactcagagtatttatgaagttttatgggaaattgttaagagaggatgtcaactattggtggttgattaacattatagtaggtgttttcaaacagccgcaaatggatgtcaacctttacaagctcaaacctgttatttccagcctatttgaccacaaactgaacaattattacataaaaggcgatgaactttatgaaaaggtgtacggacccgacgaaatattggctagagtatctattattgattctattctatatgcaaatgatcagttgaaaattcgattaatcgaaaaagttactgaaaaaacaaacgcactttatgctataaagagaaccgacggtgccgaagcgttacagaggttgttgcagtggcaattgttattattatcactactaaccaccaataaaaaaaaattaagcgaaactagcatgatcagaattctaaagagtatcgaggatgaaagttcaccattagtaagagtatataaagaatggttcatttcctcaaaggttgttgattattataaaactggcaatccaaaatttgctgaggattatctcttctcattgctggaggatcatagcaaaccggtgtttgtagttagcgcagaaaaaatatgctttatggtgttgaaagatttaagaaacgacgaaaagaaatatggatttacacagttactagacagattcatttgcacgttagttcctaacgcagcttcaaacaaacctctggtaaggcatttttctaattctctaataatttcattatggcctacattcaaagcctacctatcggatcacacattgagaaacatcattgagaacttatattccaatgccaaaaagactcaaatattcggtcaatatcgtgccggggatgccaacatatgggatctgaagggtgattggaaattaacgaacatgtttggtggtgtgctcaaaaaagttaacgaacatgattgcccgtacatttctgagtctgttgtcgaaaaatatttgcaggagaaagatattgttcctataggtaccgatgaaaggtcctga

SEQ ID NO: 79454 - DNA, 777 bp, Saccharomyces pastorianus
atgtcagctatccgtgaagttaagtacctccaagaaatgcagcatccgaacgtcatagaactaatagacatatttatggcttatgataatttaaatctcgttctggagttcctaccaactgatctagaggtggtaataaaagacaaatcaatactgtttacaccagcagatattaaggcatggatgcttatgactttgaggggcgtgtaccattgccacagaaatttcattttgcacagggatctgaaaccaaacaatttattattttcacctgatggccagataaaagtagcagatttcggtctagcaagggcgataccggccccacatgagatactgacaagtaacgtcgtaacaagatggtatagagcgccagaattgttgtttggagctaaacattacacatcggctattgatatctggtcagtaggcgttatattcgcggaattaatgctaaggataccttatttaccaggacagaatgatgtcgatcaaatggaagtaacattcagggccttagggacacctacagatagagattggcccgaagtttcttcctttatgacgtataacaagttacaaatatatccgcccccttcaagagatgaattgaggaaaaggttcattgctgctagcgaatacgccttagattttatgtgtggaatgctaacgatgaacccacaaaagaggtggaccgctgttcagtgtttagaaagtgattatttcaaagaattaccaccaccaagtgacccgtcttcaataaaaatacgtaactga

SEQ ID NO: 79455 - DNA, 339 bp, Saccharomyces pastorianus
atgagttcagagcccatgaaagccaaagccttgctagaaaattgtgcatcaattggatttaaagaatgctttaaaacattaggatttcttgaattaaactatttcaataattatgaaagggcgaaagaatggttcaaaacgggtatggaaataatggacttggaatgtttctctggatttttcgattgctgtgtgaaagaagagaattttaaaggtgcacgagattgcctagaaagcgtaaaaaagctagggaatgataaagacaagaaaacaatgataaatgtctttcttgaaagtagaaaagattccataaagttgctggacaaagcacggctttaa

SEQ ID NO: 79456 - DNA, 342 bp, Saccharomyces pastorianus
atgcagaggtttgtcagtaagtttgtttccacaccaccagtacccaaaaagtttcaagagattttcccgaagaaacgtacggttaacaaaattttattccagttagatacaaggcttacataccatgaaatgtacccgatatttctgcaggtatcacaaaatactaatgaagagaatatcccatggaggaagaaatacccctatataaggagttcagacattatgcagatgcgaaacgtcttgataactctaaggacgcagaacaaattcgtccacaaagacttattagctatggaggataaattattgaatattgctgccgaacttggcaacaacggatgc

SEQ ID NO: 79457 - DNA, 747 bp, Saccharomyces pastorianus
atgaataaagttttaaagaaaattttaattgaaagaaatgtagatggtgctttagcttttgtcagagaaactatcaatgatattctgcataatagagtagatatttcaaagttgattatatcaaagacgttagccccaaattacacaaatccacagccgcacgccgttttggctgaacgtatgaagaggagagagggcgttggtccaaatgttggtgatcgtgtggactatgtcattatcggtggtaatgataaactttacaatagagcagaagatccattatttgtactagaaaacaatattcaagtggattcgcgctattatttaactaatcaattacaaaatccaatcattagtattgttgcacctattattggtgacaaacaggcgaacggtatgttcgttgtgaaatccattaaaattaacacaggctctcaaaaaggaggcttgatgagctttattaaaaaagttgaggcttgtaaaagttgtaaaggtccgttgaggaaaggtgaaggccctctttgttcaaactgtctagcaaggtctggagaattatacataaaggcattatacgatgtcagagatttagaggaaaaatactcaagattatggacacaatgccaaaggtgcgctggtaacttacatagtgaagttttgtgttcaaataagaactgtgacattttttatatgcgggttaaggttaaaaaagagctgcaggagaaagtagaacaattaagcaaatggtaa

SEQ ID NO: 79458 - DNA, 303 bp, Saccharomyces pastorianus
atgagtgaaaaaagatcccttcccatggttgatgtgaagatcgatgacgaggatactccccaattggaaaagaaaatcaaacggcaatcaatagatcatggtgttggaagtgaacctgtttcaacaatagagattattccgagtgattcttttcgaaaatataatagtcaaggcttcaaagcaaaggatacagatttaatgggtacgcaattagagtctacttatgaacaagagctatcgcaaatggaacatgatatgccgaccaagaagagcatgacctgtcatcattcgagcgtaagaact

SEQ ID NO: 79459 - DNA, 1884 bp, Saccharomyces pastorianus
atggtcaacaaactgcgtactgcgtttgaaagaggtcatctttcattcaactcgtggttttctaatggcacgactacttatgataacattgcctacactttaagattaatggtagattgtggaattgtcggtatgtcctggataacattaccaaaaggaaagtattcgatgattgagcctaataacagagtttcctcttgtcagttggaagtttcaattaattatcgtaacctaatagcacatcctgctgagggtgattggtctcatacagctccattgcgtatcatgtcctttgatatcgagtgtgctggtaggattggcgtctttccggaacctgaatacgatcccgtcatccaaattgccaacgttgtgagtattgctggcgctaagaaaccattcattcgtaatgtgtttactctgaatacatgctcacacataacaggttcaatgattttttcccacgccactgaagaggaaatgttgagcaattggcgtaactttatcatcaaagttgatcctgatgttatcattggttataatactacaaattttgatatcccttatcttttaaaccgtgcaaaggcgctaaaggtgaatgatttcccatattttggaaggttaaaaaccgttaagcaagaaattaaagagtctgtgttctcttcgaaggcttatggtacaagagaaaccaaaaatgtcaatattgacggccgattacagttggatcttttgcaatttattcagcgtgagtataaactaagatcctacacgttgaatgcagtctctgcgcactttttaggtgaacagaaggaggatgtacattatagcatcatttctgatctacaaaatggagatagtgaaacaagaagaaggttggctgtttactgtttgaaagacgcctacctgcctttaaggcttatggaaaaactaatggcgttagttaactatacagaaatggctcgtgttacaggtgtgccattttcatatttactagctcgtggtcaacaaattaaagttgtttctcaactatttcgaaagtgcctggagattgatactgtgatacctaacatgcaatctcaggcctctgatgaccaatatgagggtgccactgttattgagcctattcgtggttattatgatgtacccattgcaactttagatttcaattctttatatccaagtattatgatggcgcacaacctatgttatacaacactttgtaacaaagctactgtagagagattgaatcttaaaattgacgaagactacgtcataacacctaatggagattattttgttaccacaaaaagaaggcgtggtatattaccaattattctggatgaattaataagtgctagaaaacgcgctaaaaaagatctgagagatgagaaggatccattcaaaagagatgttttaaatggtagacaattggctttaaagatttcagctaactctgtctatggttttacaggagcgacggtgggtaaattgccatgcttagccatttcttcatctgttactgcttatggtcgtaccatgattttaaaaactaaaaccgcagtccaagaaaaatattgtataaagaatggttataagcacgatgccgttgtggtttacggtgacactgattccgttatggtaaagtttggtacaacagatttaaaggaagctatggatcttggtacggaagctgccaaatatgtctccactctattcaaacatccgattaacttagaatttgaaaaagcatacttcccttaccttttgataaataaaaagcgttatgcaggtttattctggactaatcctgacaagtttgacaagttggaccaaaaaggccttgcttctgtccgtcgtgattcctgttcctggtttctattgttatga

SEQ ID NO: 79460 - DNA, 1311 bp, Saccharomyces pastorianus
atgctgagtttcatactgcaaatggatgtggataatttccaaagaaatttgattaatgttatcgataagagcagaaacggaacttttattaatggtaatcgtttggtgaagaaagactacatccttaagaatggtgacagaatcgtctttggcaaaagttgctcctttttgttcaagtacgcatcttcatcttctactgacatcgaaaatgacgatgaaaaggtaggttcagaaagtcgttcatataagaacgacgacgaagttttcaagaaaccgcaaataagtgctacgagtagccaaaatgctacaactagtgccgcaattagaaaactgaataagacaaggcctgtgtcgttctttgataaatatttattaggtaaagaattaggtgcagggcactacgctctggtaaaagaagccaaaaacaaaaaaactggtcagcaagtagctgtgaaaatattccacgctcagcaaaatgacgaccaaaaaaagaataaacaatttagggaggaaaccaacatcctaatgagagtgcaacatccaaacattgtcaacttactagatagttttgtagagccaatcagcaaatctcagattcaaaaatatttggtactggaaaagatcgacgatggcgaactatttgaaagaatcgtcagaaaaacatgtttgagacaggatgaatctaaggctctattcaaacagttacttaccggattgaagtatctgcatgagcaaaacatcattcacagagacatcaagccagaaaatattttattaaatataacaaggcgcgaaaatccaagtcaagtccaactaggcccatgggatgaagatgaaattgatattcaagttaaaatagcggattttggcctagcaaaatttacaggagaaatgcaattcacaaacacactttgtggtacaccttcttatgtagcgcccgaagtcctcacaaagaaaggatacacatcaaaagtagatctttggagtgctggtgtcatattatatgtctgtttatgtggttttcctccattcagtgatcaattggggccaccttcattgaaggaacagatcttacaagctaagtatgcgttttactctccgtactgggataaaatcgatgactcagtactacatttaatatccaatcttttggtcctaaatcctgatgaaaggtacaatatagatgaagctttgaaccacccttggttcaatgacatacagcaacaaagctcggtctcattagaattgcagcatttacaaattactgacaataaaatacccaaaacatactcagaattatcttgcctctaa

SEQ ID NO: 79461 - DNA, 264 bp, Saccharomyces pastorianus
atgagtttgtccacgaaaagagagcactctggtgatgtaactgactcttcattcaaaagacagcaacgaagtaataagcccagctcagaatacacttgtctgggccatctggtgaacttaatacccggaaaggagcaaaaagtggaaataacaaatagaaacgttactacaatcggtagaagtaggtcgtgcgacgttatactgagtgagcctgacatctcgactttccatgctgagtttcatactgcaaatggatgtggataa

SEQ ID NO: 79462 - DNA, 1086 bp, Saccharomyces pastorianus
atgcgcgagtttattcctcattctacggagtatatgatgcaatttgccaaatccaaaacggtaaaggtattgaaaacgttgattgaaaaattcgagcaagtgccggactccttggacgatcagatctttgtgtgcgagaaaagcatcgaatttgccaagagagaaaaaagggtgtttttgaagcattcactctcgatcaaattggccaccttacattaccaaaagaaacagtacaaggactcattagcattgattaacgatcttttgagggagttcaaaaagctggacgacaagccctctttggttgatgtacatctattggaaagtaaagtttaccataaactgaggaatctagccaagtccaaggcctcgttgactgcagcaaggacggccgctaactccatatactgtcctacacaaacagttgcggagctggacttgatgagtggtatcctgcactgtgaagataaagactacaaaactgcattttcgtatttcttcgaaagttttgaaagctaccacaatttgactacgcataattcctacgaaaaggcatgtcaagtgttgaaatacatgctattgtctaagatcatgctgaaccttattgatgacgtaaaaaacatcctaaacgcaaaatacacaaaggaaacgtaccagtcccgaggcattgatgccatgaaagctgtcgctgaggcttataacaacagatcgcttttagacttcaacacggcgctaaagcaatacgagaaggaactaatgggcgatgaactaacaagatcccatttcaatgcattatacgacacgttattagagtccaatttgtgtaagattattgagccatttgaatgtgtggaaatatcccacatttccaaaataatcggtctggatactcaacaagttgaaggaaagctctctcaaatgatactagataagatattctacggtgttctggatcaaggtaatggttggctctacgtttacgaaactccgaatcaggatgccacatacgactctgcattagaattagtcgggcaactaaataaagtcgtcgatcaactatttgaaaaggcaagtgtcttgtattag

SEQ ID NO: 79463 - DNA, 165 bp, Saccharomyces pastorianus
atggttgtatgtttctatttcttcagcgaacattctccactgatttatgctactggatggtcgagtaacctgtgtaagaggtccaagtggttaggaagctgggacttttattgcaattcactattactatccgatagccagaatgaattaaacgctgaatcataa

SEQ ID NO: 79464 - DNA, 474 bp, Saccharomyces pastorianus
atggaccaaataaatgttgaaaagcttttagaatggtctagtgctcgtcaattgcaagaagaacgaggattttgcggaaggagcaacaaacttgttgacggttgctatagtttttgggttggaggttcggctgccattcttgaagcttttggatatggccaatgcttcaacaaacatgctcttcgggactacatattgtactgttgccaagaaaaagagcaacctggtttgagagataaaccaggggcccactcagacttttaccatacaaattattgcctattaggactggctgttgcggaaagttcatacagttgcactcctaatgattctccacataatattaagtgtactccagaccgcctaattggatcatcgaaacttactgatgtcaaccctgtctatggtttaccaatagaaaatgtaagaaaaattatccactactttaaatccaatttatcttctccaagttaa

SEQ ID NO: 79465 - DNA, 1305 bp, Saccharomyces pastorianus
atgatcaactgggatgcttatgctaaaagtctagctaagccattagggaattttttaacaatacttttttttatcataagactcttgcaggacaatttgatcaagcccaactattacaaactaaacgtcaagtctggcgctttcgatctttctaaatccaataaattaaaagagtttgattatctatgggagatatcatccagctttcaaaacagtaatcaattttatgcatttcaatcttggtattttgttaccttaaggtttttgaataatcttttcaggtttactattttcatactgctgtccctgaacctgtacgtaagctgtaaattcatgtttggatactttaagacttacaatctcttccatttgaaaaaagagttcaactccccaaacctcactaaacacaacttgaaggatctaagcaaagaatactatgaagatatttataagcagtccttgtggtctatgttgaagcattttttcagaggatctcgtgatgacggtcctcatgttaatcaaaatgaagatgagatattttttcagttaagaaaatggatccccactaacttcatgattaatctttttgtgtctttttcaccaacggcaattgtttttttaagcttttctgatgtttcgtttacttcagcaattgctatagtattccatcaatatattctggattatatcataactaagagatttcaaagaagcgtggacgacgacttgattttatcaagtgcagctttgcaagaatatgaggacaagcatataatggcacgaattaaccaatgcagcaatatagatactctatcatctgcaatgggtactagatctaaaacaccgagaatattcaccactcactccctatgtggcgaagaaatcagagaggtttataattatgaaaaaagggaatttgaggcattaccgaaaatgacagaaagtgtgccaggatcccgtgaaaccagaataaaggattatggaggcatttctcaattatccgacaatcaacgtcatcccattggttttcattattctcctagaatgtccccatattatagggataaagttttggataacaatttggctcaatcatcgtcaaatgaaaatttagaaaagggcggagctttcctgccgaatcaagaccaaaatagaccatcgaaatccctgagcccattaagaaaaacgcctttaagcgcacgacagaaaaggtttgaaggctcagagttcaatgtattgaataagaatgatattaattccattcttcgctctccaaagaaaaagaagaactatcacaaaagataa

SEQ ID NO: 79466 - DNA, 114 bp, Saccharomyces pastorianus
atgggttcaaatgatttgataaatgaagcatatgacgactcggaagtagttggtgaggaaagagcatcacaatctgcatggatgaagaggtggtatcagctacttacttctcct

SEQ ID NO: 79467 - DNA, 1164 bp, Saccharomyces pastorianus
atgaacgctactatgagaaatttcagtaagcaaaatcaagattccaagcataatgaaagaaataagtctgcggcaaatagtgacatcaattctctgttgtcaaattttaacgatattccaccctccgttactttacaggattggcaacgcgaggatgaattcggttctattccatcattaacaactcagtttgtttccgacaaatacacggcgaagaaaacaaataggtcagcttatgattccaaaaatactccaaatgtttttgataaagactcttatgttagaatagcaaacattgaacagaaccatttagataataattacaacaccgccgaaacaaacaataaagtccatgaaacatcttccaagtcttctagtttaagcgcaattatcgtatttggctatcctgaatcaatttccaatgaattgattgaacacttctcccatttcggtcatattatggaagactttcaagtattgcgattgggtcgcgggattaaccccaacaccttcagaatattccataatcatgatacaggctgtgatgaaaacgattctactgttaataaatctattactttaaaaggcagaaataatgagtcgaataacaaaaaatatccaatatttactggtgaaagttgggtcaaactcacttataattctccatcttctgctttgagagcactgcaggaaaatggaaccatatttcacggttctttgattggttgcatcccatattcaaaaaatgcggtggagcaattagctggctgcaaaattgataatgtcgacgacattggagaattcaacgtttctatgtatcaaaattcctccacatcgtcgacatctaatacaccatccccaccaaacgtaataataactgatggcactcttctgagggaagacgataatactcctgccggtcatgctggtaatccaacaaatatttcaagtccaatagtagcaaattctccgaataagcggctggatgtaatagatggcaagttgccattcatgcaaaatgcaggaccgaattcgaatattcctaatctgttgcgaaacctagaatcgaaaatgcgtcagcaagaagcgaaatacagaaataatgaacctgctggttttacgcacaaactgagtaattggttatttggttggaatgacctataa

SEQ ID NO: 79468 - DNA, 165 bp, Saccharomyces pastorianus
atgtttggaatacgttcaggcaataataacggtggatttactaacctcacgtcgcaagcaccacagacaacccagatgtttcaatcgcaatcacagttgcagccacaaccgcaaccgcaaccacaacaacagacctgcaggcatgcaagcgttgcactgccgtcg

SEQ ID NO: 79469 - DNA, 102 bp, Saccharomyces pastorianus
gagtcagacgccgaactcttgagacaaaagcaggccgccgcagatgctagaagagaggctgaaaagcttgcgaagttaaaagccgaaaagacgagaagataa

SEQ ID NO: 79470 - DNA, 1041 bp, Saccharomyces pastorianus
atggaggaactatcgatatcagttatcctacgacagaagtggttggccatggttcatttggtgtttgtagtcacgactgtaataattgagaccaatcaaaaagttgccataaagaaagtactacaagatagaaggtataaaaatagggagctcgaaactatgaagatgttgtgccatccaaatactgtgggtctacagtactacttttacgaaaaggacgaagaagatgaagtatacctcaatctggttttggactacatgcctcagtcgttataccaaaggcttcgtcattttgttaatttgaaaatgcagatgccgcgtgttgaaattaaattctatgcataccaactattcaaagctttaaactatttgcataacgttcctcgaatctgtcacagagatataaaaccgcaaaacctactggtggatccgacaactttttctttcaagatttgcgattttggcagtgccaaatgcttgaaaccggatcagcctaatgtgtcttacatctgttcaaggtactatagggctcccgaactcatgtttggtgccactaattactcaaaccaggtcgacgtgtggtcaagcgcttgtgtcattgctgagttgcttttgggcaagcccttgttctctggtgaaagcggtatagatcagttggtggaaattattaagataatgggcatacccacaaaggatgaaatttcaggaatgaacccaaattatgaagaccatgttttccccaatatcaagcccattactttggctgaagtattcaaagccgaagatcccgatactcttgacttgttaacaaaaactctgaagtatcacccttgcgaaagattggtacctctacaatgtctattatcaagctattttgacgaaatcaaacgttgtgataccgacacttacgtaaaagcacaaaacctgcgtatatttgacttcgacgtggaaactgagttgggccatgttccacttgtggaacggcccgccattgaagaacggttgaaacattttgtttctgcaccttcatcgtctttgtga

SEQ ID NO: 79471 - DNA, 1737 bp, Saccharomyces pastorianus
atgattcgttctaaatgtgaagaaatgatcatcaagagtatttttgacctatttataaaattttgggctccacctcaattagttattttgaaagtttttccctcagccatttcaagcttggtattggaaattacgggccaagagcatcactgcttgttgaaggaagccgaggaggttaaggaaacttatgacatcccgccacacttattgaacagatggtgtttaccttatttgactgacacaaggcgacatttgcaaaacttattaagcaaggaaaacgatgacgaaagccgcataacttggtgctatcgcgaccgtgaaatcaagcaaagttttgatttctttctgatcagcaaccacgatgatgttgaccttaacacaatgttaactctgatagatacagttttattcaaatgttatctttactataacccccccatggtgggtccattcattcgtgtagaaaaccactgcgattcccatgttatagtgaccgaattaaaaatacgccatatgttcaaagatttaattgatttttactataaacgtggtaatcatgaagaagctttgaaatttctcacggatttggtcgatgagttggaaaatgataatactgaccagaaacaacgccaaaaaatcgatcacggtgtcaaaatattagttatttattatttgaaaaaattatcaaacccgcagttagacgttatattcacttatactgattggctactaaatcgacacaacgactcaattaaagaaaacctttcctcgatttttttttatgattctcaagcatgtagcagtagggaccatttgaaagtgtatgggtacatcaaaaagttcgacaagttacttgccatacaatacttagaatttgcaattagtacgtttagattagagggaaataaattgcatactgtcctgatcaagttatatcttgaaaacttagatattccctccacaagaatcaaattaaagtctttattagaaacaacatctgtctatgagcctagaacaattttaaagttattgaacgatgctattgagagtggctccgaccagttgccaaccaatcaactaaatttcgtaaagtacctaaagattttccccttatcaaaattagaaaaccataaggaagctgtgcatatattacttgatgagatagatgattacaaagcggcgacaagttactgtaacgacgtgtaccaaagtgatccgacaaagggagaagagcttctattgtacttgtacagcaagttagtctccatatacgattccaataggaactccaagctgattctgaattttttgcaagaccatggttcaaaattgaattcagcggaaatatacaaaaatttacctcaagatatttccttgtacgatattggtagggtggtgtcgcaattattaaagaagcacacatcaaagatggatgagaccagattagaaaaggcactcctccaggttgagcttgtggccaccacatacaaactcaatgaacgcatgtcatcgtatggagtcttatcagatagccataaatgtcctatttgcaagaaagtaatttcaaattttggaacagattcgatttcctggttcaccagggaaggcagaaatatcatcacccattataactgtgggaaagtactacaggagcggtttaacgctaaaaatgaaaagtcctcgagaattaaacagaagactttgggagaagttataaatgagctaaataataagtaa

SEQ ID NO: 79472 - DNA, 1353 bp, Saccharomyces pastorianus
atgttaagagctcaaaagctacactcgctgaaatcatcggatatcactgcgattttgcccactgaacagtcacaaaaattagttttagcaaagaaaaatggtgacgttgaagtttactctcgagatggcaatacactcaaattatttcaagtatatcctgatctcttacgaaacgccaaaaatgatcctttgcctccagtgattgaaaacttttattttgccaacgagctttcaactatctttgcacaatgtaaagaaaccttaattttattgagcactacaaatttacacgaatatgatcgaataattgacagaagaggtataaaccattgctggctctttgaaaggtcacacaaaaataaagaagaaaagaatacttacctaatatattcaaccatcaatactgccaagatgagagtattaatatgggagggtaggacttacaaaaatatgatggaagcatcgttatcgtatagaaaggaaaccattcggtccatatatcctggtgaaacaggaatcaccttagcgacagatttaggtatctatcattggccatataataaaccctctctaatcagaatagaaaaaacagtgaaaaacaaattcccaaaagatatgatatcagcattaaccgaactcaaagagcaggcggagaaagtcattgaaaagaagcccaaaaagaatagccattttgatgctcaatccttttcttctatggatagaatgtccaggaagtcgagcatgtcaagcttatggtataggaccataagaaacgagcgtggcaacaaaatacgatatacttttgaattggacggcaatgacgctaccccaatgataattgatggtgctacaaaaaaaattttcaaggtagagttaatgcataacaatgaggaaccatttttgatcgccactgaccatgctacattttccgaatcaaattccgaattcgatcacatgcaatatttgtcgtccaacctcctgatgttatataattcaagtaccatcaagtttgttgattatgaaaatggatttacttttttgcaacaaaaaataccagaaggtataaaatgggtcaaaaatctctcgggaacctactttttagtatggacttcaaacgacgaagtacagttattctcttatcatgtagatgatggctctgaagatgatgatcaagagtctatttgtggtgacattaatgatcctgatttttatcaactatggagaaaagtgcttttctataagttcttcattgattctcctcattctaaggagttatgtgtttcggacaatccagaagaatccttggatatatgtgctatgaaactaagggatttaacaagtgatagtggtgtc

SEQ ID NO: 79473 - DNA, 213 bp, Saccharomyces pastorianus
atgggtactgatgatgtccgtctagctccagaattgaaccaagctatctggaagagaggtgtcaagggtgttgaatacagattaagattgagaatttccagaaagagaaacgaagaagaagacgccaagaacccattgttctcctacgttgaacctgtcttagttgcttctgccaagggtctacaaactgttgttgtcgaagaagatgcttaa

SEQ ID NO: 79474 - DNA, 1134 bp, Saccharomyces pastorianus
atggattccccacttgtcattagacgttcagttagtaccaccaatgacaatattggggaaagcgggaatagagaaggcatcagtggtggtagacccaaaagaactattcatccacccaaatcaaaagatttgtttgatatatatgaaaactccaaaccaaaatcaaagactttacaaaaaaaattcaggacttgcctgaaaatactaaaggttttgatgagtaaaaaaaattcggatataaattttccctttttacaacctgttgatccgattgctttgaatctaccaaattactttgatgtcgtgaagaatcctatggatttgggtacaatatcaaataatttaatgaactggaagtacaaaacaattgatcaatttgtcgacgacctcaaccttgtcttttataattgtttccaattcaatccagaaggcaatgaagtccattcaatgggcaaaaaactaaaagagcttttcaattttcattggttagagaaccaggatattttgaatgaaattgaaacggattcagatcttgaagaggataactattcttcttcatattcatctgatgatgaatatgatgatgaagacataaatgaaaacgatataactaatccggctattcaatatttggaacaaaaactgaagaaaatggaggttgaattgcaacaattgaaaagacaagagttaagtaaattatcgaaggaaaggaagaggaagcatctaggtaaaacgcttttgcgtaggaaggcaatgaagcatacagttgacgatttaaagaaatctattactgataaaatcagtgaattaagtgatttagaaatgaatgggatgattcgtatcattaaaaattcattacccgcagatgaaatactaacttccaatgaagatgaaattgaaattgatttggatattttagatgaagcgactattgcaataatttatgaaagatattttgagaaaaaaaataacaataatagcaaaagaaaactaagtggcaactactcgactgcgccaactaacaagaaaaagaaaaccttgaaatttttggaaaaggatgaaatcataaataataataattattccgattctgaagaagacagtagtgatagtagcgacagtgacagtgattaa

SEQ ID NO: 79475 - DNA, 84 bp, Saccharomyces pastorianus
atgaagatgttggaaattgatggtaatgatccgaacttggggaaccttgataaggaattaaccgacggttgcaaacaacaataa

SEQ ID NO: 79476 - DNA, 1038 bp, Saccharomyces pastorianus
atgaaaataacttatgatcaatgtaacaaaatgatccactctgtatgtcattccattaataacattgatccagtacagttagttaatgacattaataaccctgtagaaattggacctgctactagtaaagatgaaagcagtaaggttataactaagatcaaggattacaatgcgaaacgtaacgaatccatgatgaaattgcaaagcattgaaatagcaattgatcttatcaccgcaatcattgagatagttgcatccaaatatgaatcaccagaatcacaggaagtagcaattccagaggagctaatcaataccttaacaaatttcttgcctcacgttttcatgattttgaaagataccttcacctcgcgaatattgatcggatggaacaatctgatctggctctttgtgtctctatctctaacagagctctctggagagttgttaaccaccttatggagttatgttacacagttggacagccaagatgatttgagtattaaaataggaagaatgggctgtatttgggcgcttctgaaactcatctttcctgatggagcgtttgaaagtgagaatcgagcattgatcaatatccaaatgctgaacaattcaggattcgctaggggaattattgaagagttccaaaataataatgaccttgagttacaacaaaaatgtattaatgtactaagcacatatgctatgattcagggacaaattgatgcaaataaggaaattgggcagttcttcatacaaactttaacacagttgaatgttcgccctgaaattttgatagaaatgacaaattcgcttttccaaatttacggggatgcctcttacgactataatgaaccaatatttgtaaggggtggatttttatccattctaaaagaccaagttgtaccaaatttgaggcagcaattcaaaatggttgataaaaataaaaatcccgaactaaaagaaagatgtcatgattgctttactacgttggatagtttcattcactacaaaatgaatgaaaattctactaaccaatag

SEQ ID NO: 79477 - DNA, 564 bp, Saccharomyces pastorianus
atgggcagatcaaagaaaagatcaagagcatcttcgtctcgattaaatccactacgcaaagctgggtcaaatgacaataataaagataccaacgtcgttaataaaaaactccagccgctattgcagaatttgtcaagtgtggtgccaaatgatagaagtattgctttgagttccatcagtgttctttgtgaggatgcacatatgagacaacttttactgaaagagaaattagttcctatcattttgaataaattgctgaacgattctaattcggacatagttgtggagtcgttcggcttattaaggaacttgtctttggaagaaggttatgatgtgtcaatctacctttggagatctgatatatggacaagtataacaagtaattttggcaagattgttgaatcgttatccgctttgcaagcagcagaacagcaaccgcagctaaaacctgcaggaaaatccaaaatagaatctaaaaggttgttattcgattttgccgataacttactgtcgttagtggtggctctgtctaatggatccgacgatattctaatgagatataac

SEQ ID NO: 79478 - DNA, 228 bp, Saccharomyces pastorianus
atgttgcaattacaaaggaaaaacaaattgagttccttggtgaagaaatttgaagacaatgccaagattcataaatatagacggattatcagggaaggtacggaaatgaatattgaagaagtagatagttcgctggatgtaatactacagacattgatagccaacaataataaaaataagggcgcagaacagatcatcacaatctcaaacgcgaatagtcatgcataa

SEQ ID NO: 79479 - DNA, 1332 bp, Saccharomyces pastorianus
atgtctaaccaaatatactcagcgaaatattcgggggttgatgtttatgaattcattcattctacaggatctatcatgaaaaggaaaaaggatgattgggtcaatgctacacatattttaaaggccgccaattttgccaaggctaaaagaacaaggattctagagaaggaagtacttaaggaaactcatgaaaaagttcagggtggatttggtaaatatcagggtacatgggtcccactgaacatagcaaaacaactggcagaaaaatttagtgtctacgatcagctgaaaccgttgttcgactttacgcaaacagatgggtctgcttctccacctcctgctccaaaacatcaccatgcctcgaaggtggataggaaaaaggctattagaagtgcaagtacttccgcaattatggaaacaaaaagaaacaacaagaaagccgaggaaaatcaatttcaaagcagcaaaatattgggaaatcccacggctgcaccaaggaaaagaggtagaccggtaggatctacgaggggaagcaggcggaagttaggtgtcaatttacaacgttctcaaagtgatatgggatttcctagaccggcgataccgaattcttcaatatcgacaacgcaacttccctctattagatccaccatgggaccacaatcccctacattgggtattctggaagaagaaaggcacgattctcgacagcagcagccgcaacaaaataattctgcacagttcaaagaaattgatcttgaggacggcttatcaagcgatgtggaaccttcacaacaattacaacaaggttttaatcaaaatactggatttgtaccccaacaacaatcttccttgatacagacacagcaaacagaatcaatggccacgtccgtatcttcctctccttcattacctacgtcaccgggcgattttgccgatagtaatccatttgaagagcgatttaccggtggtggaacatctcctattatttccatgatcccgcgttatcctgtaacttcaaggcctcaaacatcggatattaatgataaagttaacaaatacctttcaaaattggttgattattttatttccaatgaaatgaagtcaaataagtccctaccacaagtgttattgcacccacctccacacagcgctccctatatagatgctccaatcgatccagaattacatactgccttccattgggcttgttctatgggtaatttaccaattgctgaggcgttgtacgaagccgggacaagtatcagatcgacaaatttctcaaggccaaactccattgatgagaagttccttattccacaattcatacactag

SEQ ID NO: 79480 - DNA, 477 bp, Saccharomyces pastorianus
atgctccaatcgatccagaattacatactgccttccattgggcttgttctatgggtaatttaccaattgctgaggcgttgtacgaagccgggacaagtatcagatcgacaaatttctcaaggccaaactccattgatgagaagttccttattccacaattcatacactagaagaactttccctaggattttccagctactgcacgagaccgtatttgatatcgattcgcaatcacaaacagtaattcatcatattgtgatacgaaaatcaacaacaccttctgcagtttattatcttgatgttgtgctatctaagatcaaggatttttccccacagtatagaattgaattacttttaaacacacaagacaaaaatggcgataccgcacttcatattgcttctaaaaatggagatgttgtttttttaatacactggtcaaaatgggtgcatggggatcctctagagtcgacctgcagc

SEQ ID NO: 79481 - DNA, 537 bp, Saccharomyces pastorianus
atgaatcaacaatatgagcaaatgatgatacaaaatggtacgaatcaacatgtcaattcttcaaacacggacttgaatatccacgttaatacaaacaacattgaaacgaaaaatgatgttaattcaatggtaatcatgtcgcctgtttctccttcggattacataacctatccatctcaaattgccaccaatatatcaagaaatattccaaatgtagtgaattctatgaagcaaatggctagcatatacaacgatcttcatgaacagcatgacaacgaaataaaaagtttgcaaaaaactttaaaaagcatttctaagacgaaaatacaggtaagcctaaaaactttagaggtattaaaagagagcagtaaagatgaaaacggcgaagctcagactaatgatgacttcgaaattttatctcgtctacaagaacaaaatactgagaaattgagaaaaaggctcatacgatacaaacggttgataaaacaaagctggaatacaggcaacggttttattgaacaaattaatagaagatga

SEQ ID NO: 79482 - DNA, 420 bp, Saccharomyces pastorianus
atgtcggaaaggcctccatatatccttaactcatatggcgttctcaaaccagatatcacattctttggcgaagcactgccaaataaatttcataagagcattcgcgaagatatcttagaatgtgatttgttgatttgcattgggacaagtttaaaagtagcgccagtgtctgaaatcgtaaacatggttccttcccacgttccccaagtcctgattaatcgtgatcccgtcaagcacgcagaatttgatttatctcttttggggtactgtgatgacattgcagctatggtagcccaaaaatgtggctggacgattccgcataagaaatggaacgatttgaagaacaagaactttaaatgccaagagaaggataagggcgagtatgtcgttacatcagatgaacatcccaaaaccctctaa

SEQ ID NO: 79483 - DNA, 831 bp, Saccharomyces pastorianus
atggagctcaaaccaactaatgacatggatcccttggcagtgtcagcagcttcagtagtgtcaatgtccaatgacgttttgaaaccagagacgcccaaggggccaatcataatcagtaaaaacccatcaaatggtattttctatggtccctccttcactaaacgagagtctctcaatgctcgaatgtttctgaaatactatggtgcacacaaatttttagacacttacctccccgaggatttgaactcgttatacatttactatcttatcaagttgctaggctttgaagttaaagatcaagcgcttatcggcaccatcaacagtattgtccatatcaactcgcaagagcgtgttcaagatttgggaagtgcaatatctgtcacaaatgttgaagacccattggcaaaaaagcaaacagttcgtctaatcaaagatttgcaaagagcaattaacaaagttctatgtacaagattaagattatccaattttttcactattgatcattttattcaaaaattacataccgctagaaaaattttggtcctgactggtgcaggtgtttcaacttcattagggatcccggacttcagatcttctgaggggttctattcaaagatcaaacatttggggctcgatgatccccaagacgttttcaattacaatatatttatacacgacccctctgttttctataatattgccaatatggttttacctccagaaaacatttattctccattgcatagtttcattaagatgctacaaatgaaagggaaattattgagaaattatactcaaacattgataatttggaatcttatgcgggaataa

SEQ ID NO: 79484 - DNA, 570 bp, Saccharomyces pastorianus
atgcttcgtcaacaattcccagcatgggaagtcaagaattttttaaagcactacctaaccagttcaccgggtgatatcattaccgttgacccacaatccggtgccaaaacgacatggggcagacacgatggattgtggtcttacacaattggacagaaagtgggcatatccatgccacaagctgaccctaattaccaagggacctggtttgtcagtgaaaaactaagggataccaacgaaatcttgatagtcagaggaagagataatccggcgctatacagtgacactatgcgaatcgaaaacttttcgtctttgggccccagggaggacactataaacgctttccaaaatactggtgccttgacattacaattccggtccctgcaggtcccagtccaaattaaatcgtgcaaactgaatcgctctgccgacaacctcgacataacaatacacttagcctcaaaacaacgtgccataactcctgggcaatcgtgctgtctatatatcgacgatagagtccttgggagtgggcccatttcccatgttaataataatgacacccatgcatag

SEQ ID NO: 79485 - DNA, 672 bp, Saccharomyces pastorianus
atgctggcaagatatttaaatttaataggacggaggagtgcttcaccgtacagaccacagcggctaccggcaaagtttgacaacgtgatagtggcaatgtcatctggggtagattcctctgtggcggcagcactatttgccggagaatttccaaatacccgaggagtatatatgcagaactggtctgaatcacaatctttggacgaccctggcaaggagccatgctacgagagggattggagagatgtgaaccgtgtcgctaagcatttgaacatccgagttgacaaagttaattttgagcaagattattggatagatgtatttgaaccaatgttgagaggctacagtgaagggtcgacacccaatccagatatcggttgcaacaagttcgtcaagttcggcaagctgagagagtggctggatgagaagtatgggacgggtaactattggcttgttactggtcattacgcccgagttatgcaggaaatgaatggaaaaggattattccatttactgagaagcatttataggcccaaggatcaaagctattacctttcacaaatcaactccactgttttgtcatctttggttgctacccattgggcatctaacgaaaccagaagtacgaaatttagcgaagtatgcaggcctcccgactgcagaaaagcctga

SEQ ID NO: 79486 - DNA, 1722 bp, Saccharomyces pastorianus
atgcctgcagctaatgaacttcgttctgataaagcaactagtctgttcgttccaacaagacatcatgtggaatacatttctcaactcgtaagagactgcggatacttgatttcgtacatctacggtactttggaccaacatgctcgtaaacgtcaattatataattttagggcgggcttaacttccattttggttgttacagatgttgctgcaagaggtgtcgatattccaatgttagccaatgttattaattacacattacctggttcatcaaaaatttttgttcatcgtgtaggtagaactgcaagagccggtaacaaaggttgggcatattccattgtcgctgaaaatgaattaccttacctattagatttggagctatttttgggggaaaaaattcttctaacaccaatgtacgatagtctagtcgacgtgatgaagaaaaggtggagagatgaaggaaaaccggaatatcaatttcaacccccaaagctttcttacacaaaaagactcgttctaggttcatgtccaagactggatgttgaaggcttaggtgatctttataagaatctgatgtcctctaattttgaccttcagttggcgaagaaaacagccatgaaggcagaaaaactttactacagaacacgcacttccgcctcccctgaatctttaaagagaagtaaagagatcatttcttctggctgggatgctcaaaatgcattttttggtaaaaatgaagagaaggaaaaattggattttttggctaaattgcaaaacagaagaaacaaggaaacggtatttgagttcaccagaaacccagacgatgaaatggcagtgtttatgaaaaggagaagaaagcaattagcgccaattcaacgaaaggcgactgaaagaagggaactattagaaaaggaaagaatggctggtctttcacattctatcgaagatgaaattttgaaaggtgacgatggtgagacaggttacaccgtgtcagaggatgccttaaaagaatttgaagatgcggaccaattattagaagcacaggaaaacgaaaacaaaaagaaaaagaaaccgaagtcttttaaggatccaactttctttttaagtcactatgcgccagctggtgaaatacaagataaacaattacagataaccaatgggttcgctaatgatgctgctcaagcggcttacgatttaaatagcgatgataaagtgcaagttcataagcaaacagcgaccgtaaaatgggataaaaaaagaaaaaaatatgttaatactcaaggtattgataacaagaaatatattattggtgaaagtggccaaaaaatcgcggcaagcttcaggtctggtagatttgatgattggtcgaaggcaagaaatttgaaaccattgaaggtaggttcgagagaaacaagcataccatctaacttgctcgaagacccttcacaaggtcctgctgcaaatggtagaaccgtccgtgggaaattcaagcataaacaaatgaaagcgcctaaaatgccagataaacacagagacaattattattcgcaaaagaagaaggtggaaaaggctctacaaagtggaatttccgtcaagggatataataacgctccgggtctgcgaagcgaattgaagtccactgagcaaattagaaaggacaggattatagcagagaaaaaacgtgcgaagaatgctcgtccttccaaaaagcgtaaattttag

SEQ ID NO: 79487 - DNA, 1302 bp, Saccharomyces pastorianus
atggcaggcgtgcagaaaagaaaaagggatctcgaagatcaagacgacaatggaagcgaggaggacgacatcgcctttgatattgcaaatgaaattgccttaaatgatagtgagagtgatgctaacgactccgatagtgaagttgaagctgattatggtcccaacgatgtccaggatgtgatcgagtacagctcagatgaagaagaaggagtgaacaataagaagaaggctgaaaacaagaacatcaagaaaaaaaagaatagtaagaaggaaatagcagcatttccaatgttagaaatgtcagatgatgaaaacaatgcatctggtaaaactcaaaccggtgatgatgaggatgatgtcaatgaatatttctccacaaataacttggagaaaacaaagcataaaaaaggtagttttcccagctttggcctatccaaaattgtattgaacaatattaaaaggaagggatttcgccaacccactcctattcaaaggaagactatcccattaattttgcaaagtagggatattgttggtatggcacgtaccggttctggtaagactgcagcattcatcttgccaatggtggaaaaattgaaaagtcactcaggtaaaattggcgcccgtgcagtcatcttatcgccttccagagaattagccatgcagactttcaacgttttcaaggattttgccagaggaacagaactaagaagcgtcctcttgactggtggtgattccttggaagaacaatttggcatgatgatgaccaacccagacgttattattgcaacacctggtagatttttacatctgaaagttgaaatgaacctcgatttgaagagtgttgagtacgttgttttcgatgaagctgataggttgttcgaaatgggttttcaagaacagttgaatgaattacttgcatctttgcctacaacaagacagactttgttgttttctgctactctacctaattcattggttgattttgttaaggctggtttggttaatccagttttggttcgtttggacgcggaaacgaaagtttcagagaacttagaaatgctttttctatccagtaaaaacgcagatagagaggcgaacctattatatattttgcaagaaatcataaagattccgttagccactagtgaacaacttcaaaagctgcaaaatagtaacaatgaggcagatagtgactcagatgatgaaaatgatcgccaaaagaagaggaggaatctcaagaaggaaaagttccgtacacaaaaaatggctgcaggtaatggaattccttctgaaaaagca

SEQ ID NO: 79488 - DNA, 1014 bp, Saccharomyces pastorianus
atgattggtgatgaggcaagtgaagttcgctcttatctgcaaatatcttatcctatggaaaacggtattattaagaattggacagatatggaacttctttgggattacgcctttttcgagcaaatgaaactaccatccacctccaacggtaagattttactaacggaacctccaatgaatccgctgaaaaatagggaaaaaatgtgtgaggtaatgttcgaaaaatacgattttggcggagtttatgttgccatccaagctgttctagcattgtatgcacaaggtttgtcttcaggagtcgtcgtcgattccggtgacggtgttactcatatagtcccagtttacgaatctgtcgttttgagccacttaacaagaagattagatgttgcgggtagagacgttactaggcatttgattgatctgctttctcgtcgtggttatgcatttaacagaactgcagatttcgaaactgtgcgtcagataaaggaaaaattatgttatgtttcatatgatttagacctagatacaaaattggctagagaaacaaccgcccttgtggaatcgtatgagttaccagatggcaggacaatcaaagtgggacaagagagatttgaagctccagaatgtttgttccaacctggtttggttgacgttgaacaacctggcgtgggcgagctgttatttaatactgtgcaatcggctgatgttgatatcagaagttccctgtataaggccattgttctttcaggtggttcaagtatgtacccaggactgccttccagattagagaaagaattgaaacaattatggtttagtagagttttacacaatgacccttcaagacttgataaattcaaagttagaatcgaagatcctccaaggagaaagcatatggttttcattggtggtgccgttttagctagtatcatggctgataaagaccacatgtggttgtctaagcaagaatggcaagaaagcgggccatctgcaatgactaaatttggtccaagatag

SEQ ID NO: 79489 - DNA, 666 bp, Saccharomyces pastorianus
atgagatcattacaattacaacctatggttcagagttggaaagagatatcttccaggatgggaattccaaacgagtttgccaaaggtttgaatgttgatttagtaaagcaagaagaaaccagaaagcagtttctaagtttcctgcagaaaagagtgttggagtccctcaccaagaacgaactgggaataagatcctactttttaggagacagcgtcgagaaatggatcaaagaatcctatgacttggaactcgatattgataattgccgaagtgaactcagaaaattccaaactttcatattttccagtgttcgatacaagttgtatttagactcaatgaaaaatttaccgctaaacccttcaaaaaaactcgagggcaagaagcatattgcagacgtatatgtcattgttttagacgaatcctttcctgcaataatgttcaatggcggagcttattcgaaggctgattttttcaggatattacaagaaagtgaaacctctaacagcagcaaaacccttaacacaattattgccatcaaaagtgtaaatacgctactatcaaaacactttgttatcacaacaaatggtgattctggagaattcttttcaaaatataacatttcaaaaataaacgacaaaaacactgaatacaccctaaaagagtaa

SEQ ID NO: 79490 - DNA, 555 bp, Saccharomyces pastorianus
atgttcaaagttccagtgggattagccagtaggacaagggagcttatgaacagcgttacgcccaatagtctcaataatggaaagggtttcaatatgtacttgccaggaatattaagggcttttcctaaaccagtgccttcggcgattacatctcccgcaattccaaaatatcgaggagaaagtttccagtttcgtaagctttcatgcatttcttctaattattgttctaccactcaccaatttctatccagtctgaaaagctcgacatccaggttggttggtaaaagagccttccattcgtcacgacgtgcagaaataaagtttatattttcttcgaagtcaccaaagaacggtaacaagccgtttgtgaaagtatataaagtctccccattttttatcatatttgcaactgcaagtatcttcacattcattctaacatcaacgatagtcgttattcccttaatttttcactttttttttccccttcttattatgttcatttttttaaacaattcaaaaaatggcagaaaaatatcttttacaaagatgtcttga

SEQ ID NO: 79491 - DNA, 1293 bp, Saccharomyces pastorianus
atgcatcccgtagagatactacagaaacagattgaagacaaacacttcatggactctcaagcctccacccctgggtccgtggaactacagcataattcttcaagcggtagtgatgatacctcatcaagaaagaaaaaatccttgagattaacaagatttttcaaaaaaattcataatgattatcacgataaccatcatcatcaccaccatcacaaccgtggatccacccctacaaaaccgaagctcaatttgaacaccaatgaaaatatagtagaaagtaacggaaaagcgttatacgaaacagataacccagtggagctattagaaaaatatggtattcctggtagaaaattaggcgaaggagcttccggttcggtgtccgtagtagaaagaacagacggcaagttatttgcttgcaaaatgttcagaaaaccacacttaaacaatgaaggaactaatcagtctcaattagctaattattctaagaaggttaccactgaattttgtattggttccacgctgcaccacgaaaatatcattgaaaccctagatatgttgactgaaggtgacacctatttattagtaatggagtatgcgccatatgatttttttaatctcgtcatgagtaacctaatgacacaagatgaagtcaactgttacttcaagcagctgtgccacggcgttaattacctgcactctatgggcttagctcatagggatttaaaattggacaattgtgtcgtcactaaagatggcatcttgaaactgattgactttgggagcgctgtagtgttccaatacccttacgaagataccattgtaaaatcacatggaatcgtgggctctgacccttatttggctcctgagttattgaaacaaacatcctacgatccaagagtagcagatgtgtggtctatcgctattatattttactgtatggtccttaaaagatttccttggaaggctccaaaaaagagcttcaactcatttaggttatttactgaggaacctgaggacgaagatgatatagttcgggggccaaataaaatattaaggctactgccaagacattcacggacaataataggcagaatgttggctttagaaccaaagcaaagagttttaatgaatgacgtggtaaaggatgattggcttgtatccgtcccctcctgtgaagttgaccctacatctggcgatttggttgaaaaaccaaagaatcataagcatcacttggtcactgaggaggagttgaatgagctgaccaagcaacacgggaataaagattcaaattaa

SEQ ID NO: 79492 - DNA, 150 bp, Saccharomyces pastorianus
atggttaaggaaactccattacactcatcttcatcaacttcgctgtcttcattatttaggccaactaagttgaagaatttatcggctaaaatattcaatggagctgctcaccactcatcattccagaccgaatattgttcggaatcttga

SEQ ID NO: 79493 - DNA, 969 bp, Saccharomyces pastorianus
atgtgggtgttcgaagaagagatcaatggtgaaaaattgactgaaatcataaatactagacatcaaaacgtgaaatacttgcctggcatcactctacccgacaatttggttgctaatccagacttgattgattcagtcaaggatgtcgacatcatcgttttcaacattccacatcaatttttgccccgtatctgtagccaattgaaaggtcatgttgattcacacgtcagagctatctcctgtctaaagggttttgaagttggtgctaaaggtgtccaattgctatcctcttacatcactgaggaactaggtattcaatgtggtgctctatctggtgctaacattgccaccgaagtcgctcaagaacactggtctgaaacaacagttgcttaccacattccaaaggatttcagaggcgagggcaaggacgtcgaccataaggttctaaaggccttgttccacagaccttacttccacgttagtgtcatcgaagatgttgctggtatctccatctctggtgctttgaagaacgttgttgccttaggttgtggtttcgtcgaaggtctaggctggggtaacaacgcttctgctgccatccaaagagtcggtttgggtgagatcatcagattcggtcaaatgtttttcccagaatctagagatgaaacatactaccaagagtctgctggtgttgctgatttgatcaccacctgcgcaggtggtagaaacgtcaaggttgctaggctaatggctacttctggtaaggacgcctgggaatgtgaaaaggagttgttgaatggccaatccgctcaaggtttaattacctgcaaagaagttcacgaatggttggaaacatgtggctctgtcgaagacttcccattatttgaagccgtataccaaatcgtttacaacaactacccaatgaagaacctgccggacatgattgaagaattagatctacatgaagattag

SEQ ID NO: 79494 - DNA, 273 bp, Saccharomyces pastorianus
atgaatctcattacaaatgaaccgtgtggtgcccaattttcaaggtcctatgatttaacgagacaccaaaataccattcacgctaaaaggaagattgtcttccgttgctcggagtgtataaaaattcttggatctgagggctatcagaagacgttttcgagactggatgctttaacaaggcatataaaatcgaagcatgaagatttgtcgttagaacaacgtcaagaagttacaaaatttgcaaaggctaatattggttatgtcatgggttaa

SEQ ID NO: 79495 - DNA, 1134 bp, Saccharomyces pastorianus
atggcttctacggaacttagcctaaaaagaaccctaacggatattttagaagacgagttgtaccatactaatccaggtcatagtcagtttacgagtcattatcaaaactatcatccaaatgctagtattactccgtataagttggtgaataagaacaaggaaaataacacttttacgtggaatcattcattacaacaccagaatgaatcgagtgcagcttcgatacccccacaacaaacctaccatttcccgatattcaacaaatacgcggatcctactttaactaccaccacctcttttacgactagtgaagcaacggccaacgatagacagattaataatgtccatctcataccaaacgagattaagggtgctagcgaaaccccattgcagaagaccgtcaacctgaagaatataatgaaagtatcagacccgtatgtaccgacacggaatacgttcaattatgatgttaaaatttccaacgattttttcgataacggtgacaatctatatggtaatgatgaagaagtgcttttctatgaggataattataatccgaaaatgcagtggtcacttcaagataatagcgccgcaataaacaatgaggatgcgagagctatttttaacaatgaatttgactctgatgacgacgatatcagtgatgatgaagaggatgaaatagaagaaaattgtttgcaacaagagcaacaccaagaggagcctttactgtcattggatgttacaccaatctcaatgtttggctcagatcaaaaaacgggtcgtgccaagagttctagtcatttatttaatgagtacagttacgttgactctaacatggacagcatttccagtgttgtatctgaagatctgttagatgaacggggacatgagaagatagaggatgaggatgaggataatgatcttgatgaagacgatatctacgatatctctctcttgaagaacagaagaaagcaaagttttgtcctcaataaaaacactattgattttgaaagatttccatctccctcaacctcggcaaacgtaccgtctactgctactaccggtaaaaggaaaccagcaaaatcatccagtaaccgtagttgcgttagtaacagtaatgaaaacggcacatta

SEQ ID NO: 79496 - DNA, 270 bp, Saccharomyces pastorianus
atggttacccccacagatacacgtttgagaccagatcaaagagcaatggaagatgggcgttatgacgaagctggtgatgagaaattcagagttgaagaaaagcaaagagcagcacgcagaaaaagggaggaaaataaccttgaatatcacccacaatggttcgtcagggatactcatcccatcacaaaagctaaatattggagatatacgggcaaatattgggttaaaagaagagatcatgatttgaaagattgtggtgacattttttaa

SEQ ID NO: 79497 - DNA, 2640 bp, Saccharomyces pastorianus
atgtctagggaagacttgtccattgctgaagatctcaaccaagtgagcaaacctttactcaaagtgaagctgctggaagttttgggtcagggggatttcaaacatttaaaggcgcttgtggacaatgaatttcaacctaaagacgacccatctgtacagcaagttcttaatttaattttacattatgctgtccaggtggcccctattcttcttatcaaggaaattgttgctcattgggtggaccaagtaggtgatgagaagagttcgagtaaaagcgatgatggtatccatctagatttgaattatcaggatgaaaatggcaatactccattgcacttggctgctgctcaatctcggtcggatgtgatcagtttccttcttagccagaagtctatcaatgattgtatcaagaataaagctcatcagcagcctttggacatgtgcaaagatttgaatgtagcacaaatgattcaattgaaaagagatgactattttttggaaacagttcattctttgagagcagccatgaataaaagagacttttcgaaattggactctatttggaaaaacccaagaaacctaaatttactagatattaatggcatagatcctgaaaccggaacgacacttctgtatgaatattcgcaaaaaaaagacattgaaatgtgtcaatggctgctgaaacatggtgcagaagcaacagttaaagatgggaagggacggtcgccattggatttagtcaaaaatataaaactacccactaaaccgtcgaacaacgttacaccggaaattaagttaaagaatctacttgaaaagaatctgagagaacaagctattgttcacgaagatgtcgcatcaagtaagcctcctacgtataaggggtttttaaagaaatggacaaattttgcccatggctacaaattacgttggttcattttaagtgccgacggaaatctgtcatattacaaagaccaatcgcatgttgataggcctcgtggtactttaaaagtttcgacgtgccgtttacacatcgattcttcagaaaaactgaatttcgagttactaggtggcatcacaggcacaacaaggtggcgcttgaagggcaatcatcccattgaaacgactaggtgggtcaatgctatacaaagcgctattagattcgccaaagacaaggagatattaaacaaaaaaaaggcagtaccaccatcattggccttgaagaacaaatctccagccctgatatcgcattccaaaacacaaggatctcttcctgaagcttcgcaatactatcagcacacattacacaaggaagttattcagccctcctctgtgagtctttatcggagaccaagcaacaacctgtccgtcgtatccagcgaaatccaactaaacgataatttgactgaatctggcaagcgctttgttagtaaaatgattgaaaaccggctggatggtagcaaaacccccgttggagtacacacaggttcagctctgcaaagggtccgcagtagtaataccttgaaaagtaaccggagtatgcaaagtggctcaggtgtagctagtcctatagataaagtccctaacggtgcgaatttgagccagtctaacaccacaacaggatctactgcttccttgagtgataataactatattgataatttcgagggtgatgaggcaaattcagatgatgaagaggaagaccttggaataaattttgatcgtgatgaagaatacatcaaagcacagtatgggccatataaggagaaacttgatatgtatgaacaagcaatcagtatagagttgagttctttgattgaactaattgaacaagaggagccaagtcctgaggtttggctcacaataaagaagagcctcatcaacacatcaaccatttttggtaagttgaaggacttgacttataaaagagacaaaagattagtggatatggtttcaaagcaaggtgatgtcaataacgtttgggtgcaatctgtgaaagaattagaaatggagttgtccaacaaaacagaacgtctagcatctattgataaagaaagaagaggtttgaaaaagatactacacaagaaattgctggaatcacatgccactgccggcaacaaggaatccttagaaaatgacaaagaacaggaatcagatactacggcaagtactctcggtcaaattgcgaaatttatcagcgctacaaaggaagaagatgaagcatctgatgctgatgagttttatgatgccgcggaattggtggatgaagtaactgaattaacagaggctcatcctgaaatttcgaccgctgcagctcccaagcatgctcctcccccagttccaaatgaaacagataacgacagccagtatgtccaggacgaaaaaagcaaaatagagtcaaatgttgagaaaacaagccaaaaatttgaaaaacaaaataatctagttacagaagatgaaccaaaaactgatcaatcactgaaaaacttcaaagcggaggacaaagagagccaagtaaaggagaaaactaaagagatagcatcttcagttatcggtgaaaagaccatagttgctgtcactacagtgcaaaaaagaaaagaagaatatttactcaaagaaaggggtcctagtcttgggttatga

SEQ ID NO: 79498 - DNA, 471 bp, Saccharomyces pastorianus
atgaaagatggtattagaaaaagactatctatggataaggacgatagaccaaagattagtctttgggccgttctgaaatcgatggtgggcaaagatatgacaagaatgacgttaccagttactttcaatgagcctacatctcttttacaaagagtggcagaggatttggagtattccgaactattagaccaggctgcaacgtttgaagattcaacactgagaactctatatgttgcggcatttaccgcatcttcatacgcatctactacaaaaagagttgcgaaacccttcaacccattgttgggtgaaacatttgagtattctcgaccagataaacagtacagatttttcaccgagcaggtttcacatcaccctcccatatctgcaacatggactgagtcaccaagatgggacttttggggtgaatcatttgttgatactaaaagtcaatggcagatctttcaatgttaa

SEQ ID NO: 79499 - DNA, 750 bp, Saccharomyces pastorianus
atgttgcggcatttaccgcatcttcatacgcatctactacaaaaagagttgcgaaacccttcaacccattgttgggtgaaacatttgagtattctcgaccagataaacagtacagatttttcaccgagcaggtttcacatcaccctcccatatctgcaacatggactgagtcaccaagatgggacttttggggtgaatcatttgttgatactaaaagtcaatggcagatctttcaatgttaagcacttaggattatggcacattaagttgcgtccaaatgacaatgaaaaagaggaactgtatacttggaagaagcccaacaatactgttataggtattctcattggtaatccacaagttgataaccacggtgaagtgaacgttgtcaatcacacaaccggtgatcattgcaagttgtatttcaaagcaaggggatggaggtcatcaggagcatatgaaatcacaggcgaagtctacaacaagaaaaaacagaaggtgtggatcctaggtggacactggaatgaagctatttttgccaagaaagtagtaaaagatggcgatctctcgttggagaaaactagaaccgctgcatcagcagggaatgggcctacggatgacggaacgaagtttttaatatggaaggcaaacgaccgtcctgaggagccattcaatttaacgccttttgctatcacgctgaatgctccacaaccacatctattgccatggttacccccacagatacacgtttga

SEQ ID NO: 79500 - DNA, 657 bp, Saccharomyces pastorianus
atgaagtgtggggctcaaaccacaaagattgatatatggctccgtaggtgttattcttctaagtgcttttgggcagaagatttccaatgttccaaagtttacgatgatgcggattctttgctagagttatgtactatttttggttggaaagaattcagtaaatgcgcagcgttgcatggattgggtttcgaagctagtgggctcatttgggataaaccaaacggatattctaatggattgaaggaatttgtttatgatttgcttaataaagaatgtaccataggtacgttccctgagtacagtgttgcttttgaaacattcggatttctacaacaagaattacatgacaggatgtccattgaacctcaattacctgaccccaagacaaatatggatgctgttgatgcctatgagttgaaaaagtatcaagaagaaatttggtccgatcattattggtgcttccaggttttggaacaatgcttcgaaatggatcctcaaaagcgtagttcagcagaagatttactgaaaaccccgtttttcaatgaattgaatgaaaacacatatttactggatggcgagagtactgacgaagatgacgttgtcagctcaagcgaggcagatttgctcgataaggatgttctcctaatatctgaatag

SEQ ID NO: 79501 - DNA, 774 bp, Saccharomyces pastorianus
atgacaagcaaaacgaaaaatatcgatgatatacctccagaaatcaaagaagagatgatacagctctatcatgatctaccgggtatagaaaatgaatataaactcatagacaagatcggtgagggaacattttcgtcagtgtataaagccaaagatatcactgggaaaataacaaaaaaatttgcatcacatttttggaattatggttcgaactatgttgctttgaagaaaatatacgttacctcgtcaccgcaaagaatttataatgagctcaacctgctgtacataatgacgggatcttcgagagtagcccctctatgtgatgcaaaaagggtgcgagatcaagtcattgctgttttaccgtactatccccacgaggagttccgaactttctacagggatctaccaatcaagggaatcaagaagtacatttgggagctactaagagcattgaagtttgttcattcgaagggaattattcatagagacatcaaaccgacaaattttttatttaatttggaattggggcgtggagtgcttgttgattttggtctagccgaggctcaaatggattataaaagcatgatatctagtcaaaacgattacgacaattatgcaaatacaaaccatgatggtggatattcaatgaggaatcacgaacaattttgtccatgcattatgcgtaatcaatattgtgttaactcacataaccaaacacctcctatggtcgccatacaaaatggcaaggtcgtccacttaaacaatgtaaatggg

SEQ ID NO: 79502 - DNA, 723 bp, Saccharomyces pastorianus
atggaattcttcatcaaagatttgggtccccaaatttcatggagattagtcttcttttgtgagtatttgggtccagtcttggttcactcccttttttattatctatctaccattcccacagttgttgatagatggcacagtgctagctccgactataatccatttttaaacagggttgcgtattttttaattttaggacattatggaaagagattatttgaaaccttatttgttcaccaattctctttagctactatgccaattttcaacctgttcaaaaattgtttccattactgggttctaagcggtctcatttcattcggttactttggctacggcttcccctttgggaatgctaagttgttcaaatactattcatatttgaaattggatgacttaagtacattaattggtcttttcgtgctttcagaactatggaacttttattgccacattaaattgcgcctatggggtgactatcaaaagaagcatggtaacgctaagatccgtgtcccattgaatcaaggtattttcaatctttttgttgctcccaactatacttttgaagtttggtcttggatttggtttacttttgtgttcaagttcaatttatttgccgttttatttttgactgtttcaacagctcaaatgtacgcatgggctcaaaagaaaaacaaaaagtatcataccagaagagcattcttgattccatttgtattttga

SEQ ID NO: 79503 - DNA, 237 bp, Saccharomyces pastorianus
atgcttgatagagatttatcaaaacgaacgtttattgcatcgtgtggtcatgcattttgtggtaggtgtttcgccaggattgacaatgcaaaaaaaaaatctaagatgcccaaaaagaaactagctcaactaaagggttcggctcatccggataattatggccccaaattatgtcccgcagattcttgtaagaagcttattcgttcaagaggcaggttgaaggaggtttacttctag

SEQ ID NO: 79504 - DNA, 1596 bp, Saccharomyces pastorianus
atgcatagcgatactaacggtcgaacaaagagcaataatagcccatcagacaataatccaaatgagacagttatattaatagatagtgataaggaagaagacgcttctattcgcgaggctaaccttcctgtgaggttgtacccagacagacgggtagggagacgacgtgatgctttaaataggtttgtgaggtcagattcaaggagcaggaattctcaacggactcacataacagcaagctctgagcgccctgattttcaagctaataacaacgatatcactataatacgagaagttggacggttttttggagacgatggacctattgatccttctgcacattacgtcgatcttgatcaggagccaggttctgaaacgttagaaactccaagaacaatacaagtagataacacaaacgggtacttgaatgataatggtaataacaatgaaagtgatgatggcctgacaatagttgaagagagaacaacacgacccagagtgacactgaacctgccaggcggggagaggcttgaggtaactgcgacgacaacagacataccgataagaaggtcatttgaattccaagaagatctaggcgcatcacgcaggcagttactgagaaggagtgctacaagagcccgtaatttatttgtggaccggtctgatgaaaacgatgaagattggacagatgatacccataatttaccagaagctattcaaagggctcgtagggagagccgtatgcgaatgagcagacggattgcagaaagacaacgtagggtacaacagcaaagggtgtccagtgacgaaaatataagtacatctattaggttacaatcaatcagggaacgaatacaatcatatacgcctgatattcgtagtgcttttcatcgtgcagagtcactgcatgaattcaggtctattttacaaaatgttgctccaattactttgcaagaatgtgaagaagaactaatggcactcttcactgagttcagaaatcaactgctgcagaattgggccattgatagggtcagaaatactcaggaagaggccttgagacttcaccgagaagcattggaaagacaagaaagaacggcaggaagagttttccatcgtggcacattacgtgaatcaatcacaaactatcttaatttcaatggagaggatgggttcttaagtcgtttgtggagtggcccagcgttgagcgatgctgatgaggaacgacacactcaaaatatcattaatatgatccaagagagagaagaacgagagcgggatgtggtcatgaagaatctaatgaacaaaaccagagcccaacaggaagaattcgaagctagggcagccagcctacccgaaggttatagcgcgtcatttgatactacgccaaaaatgaaattagacattacgaaaaatggtaaagaagaaaccatcattgtgacagatgacgatttagcaaaaacactcgaggatattcctgtttgttgcttgtgtggcgcagaattgggggtcggaataccggatgattttactggtatcagtcaaaaggatcgtggtgtttcatttgaagggttagtgtcaaaatacaaattccactga

SEQ ID NO: 79505 - DNA, 717 bp, Saccharomyces pastorianus
atgagctcatcgtctcttgattcttcttctaagaatgatgagaggataagaagaaggagcagtagcagtattagcagtttcaaaagtggtaaatcatcgaacaataattacagttctggtacagcaaccaacaatgttaacaaaagaagaaaatcttcgataaacgaaaggccaagcaatttaagtttgggtccgtttggtcccataaacgaaccgtcaagccgcaaaatatttgcttatctgattgctatcctcaacgcttcttatcctgaccatgatttttcatcggttgagccaacagattttgtcaaaacatcattgaaaacttttatttccaaatttgaaaacaccttatattctcttggtagacaaccagaggaatgggtctgggaggtaattaattctcacatgactctttctgattgcgtcctttttcaatattcacctttaaactcttttttggaagatgagcctggctatctttggaatcttataggttttctttacaacaggaaaaggaaaagagtggcttacctttacttgatttgctcgcgtctaaattcgagtacaggcgaagtggaagatgccttggcaaaaaaacctcagggaaagcttataatagatgatggctcaaatgaatacgaaggagaatacgatttcacttatgatgagaatgtaatagatgataaatcagatcaagaagaatccctacagtag

SEQ ID NO: 79506 - DNA, 198 bp, Saccharomyces pastorianus
atgtctccttctaaaacctccaccaccacacctactggcaatgcgattgcatccagaggtttattcgcagcaacagagctggaggagttcgagaatgtttatcgccacttatatgcattaatcaaccttcattggtccgtattcggtcctcattatatcgaaatgttaggagataaagttaataaaaaaggaatataa

SEQ ID NO: 79507 - DNA, 150 bp, Saccharomyces pastorianus
atgttagctggtggactgacgccagaaaatgttggtgatgcgcttagattaaatggcgttattggtgttgatgtaagcggaggtgtggagacaaatggtgtaaaagactctaacaaaatagcaaatttcgtcaaaaatgctaagaaatag

SEQ ID NO: 79508 - DNA, 171 bp, Saccharomyces pastorianus
atgtctgttattaatttcacaggtagttctggtccattggtgaaagtttgcggcttgcagagcacagaggccgcagaatgtgctctagattccgatgctgacttgctgggtattatatgtgtgcccaatagaaagagaacaattgacccggttattgcaaggaaaatttaa

SEQ ID NO: 79509 - DNA, 1029 bp, Saccharomyces pastorianus
atgggaaaaaattttgatatttccaaaaaagacttgacccgcatcacagcggttgctgagcactatgttggagtcaataatggtggtatggatcaagcaacgtctgtttatggggaagaagatcatgctctatacgtagagtttaggccaaaactaaaggccacaccttttaagtttcctcaattgaaaaatcatgaaatcagtttcgtcatcgccaatactcttgtaaagtctaataaattcgaaactgctcctacaaattacaatttaagagtaatagaggtaacagttgctgccaacgccttggcgaccagatacagcgtggccttaccatctcacaaggacaattctaactcagaaagagggaacctaagagattttatggatgcttactacgccagatacgaaaaccaagcccaaccatggaatggagatatcggaactggtattgaacgtttactcaagatgctacaattggtagaagaatctttctcgaggaaaaagagcggattcactgtagatgaagcctctacggcgctaaactgttcacgtgaggagttcactagagattacctgacaacttttcccgtccgcttccaagtcctgaaactatatcaaagagctaaacacgtttactccgaatccttaagggtgcttaaggctttaaaaatgatgacaagtgccacttttcacacggacgaagatttctttacagattttggccgactaatgaatgagtcccaggcctcttgtgataaactttatgaatgttcgtgcatagaaaccaatcaaatatgctcgattgccctagcaaatggttctttcggctcccgtctcactggcgctggttggggcggttgcactatccaccttgttcctagtggcgctaatgggaacgtggaacaggtacgaaaagcactaatcgaaaaattctacaatgtaagatatccggatctcacagatgaagaactaaaagaagcaattatagtttcgaagcctgccttgggtacttgtttgtacgaacaataa

SEQ ID NO: 79510 - DNA, 114 bp, Saccharomyces pastorianus
atggccatagatccgtctgtgtcggaatggtcgaattactttaaatgcggactacatgtggcacattcatacttgaaaataattgctccggaaagatttaataatacaccttag

SEQ ID NO: 79511 - DNA, 330 bp, Saccharomyces pastorianus
atgaatacaaacgttccaatattcagttctccggtcagagatttaccaaggtctttcgaacaaaaacatttagcggttgtagatgcatttttccaaacataccatgtcaaacctgattttatcgctaggtctcctggcagagtaaatctgattggtgagcatatagattattgcgatttttcagttttgccattagccattgatgtggatatgctttgcgcagttaaaattttagacgaaaaaaatccatccattaccttaacaaatgcggaccctaaatttgctcagcgaaagtttgatctgcctttagatggttctacatggccatag

SEQ ID NO: 79512 - DNA, 3063 bp, Saccharomyces pastorianus
atggctcaagagaaatccaaatatacagaaagaacgtcttattatacagtgtcatattgggaacaagttaaactgtgtacccaacgtgggttccaaagaatttacggtaacaagagttatacagtcatcaatgtctgctctgcaataattcaatcttttattactggatcattattttacaataccccttcatccacttccggtgctttttcaagaggtggtgtgttgtattttgcgctactatattattctttgatgggactggcgaatatttcttttgaacataggccaatcttacaaaagcacaagggctattctttgtatcatccttcagctgaggcaattggctccactctggcatctttccccttcagaatgattggtttgacctgtttctttatcattttattcttcctatctgggttgcacagaacagcgggatcattttttaccatctatttgttcttaaccatgtgttcagaggcgatcaatggtttatttgagatggtttcttcagtatgtgacactctttctcaagctaactctatctcgggtattctgatgatgtctatctcaatgtactctacctatatgatccaattgccttcgatgcatccatggtttaaatggatatcgtacgtactacctatcaggtacgccttcgagtcgatgttaaatgccgaatttcacggtaggcatatggattgtgctaacactctagtacccagtggaggagactatgataatttatccgatgactacaaagtatgtgcttttgttggttcgaaaccaggtcagtcttatgtgcttggtgatgactaccttaaaaatcaatttcagtacgtttataagcacacgtggagaaactttggtatcttgtggtgctttttactgggttatgttgttttgaaagtgatattcacagaatataagaggcctgtgaaaggtggtggtgatgctcttatcttcaagaaaggatcaaaaagatttatcgcacatgcagatgaagaatctccagacaatgtcaatgatatagatgccaaagagcaattctccagtgaaagtagcggcgcaaatgatgaagtatttgatgatttagaagccaaaggtgttttcatttggaaggacgtatgctttactattccatatgaaggcggtacgagaatgcttttggataatgtttcaggttattgtattccaggtaccatgacggccttgatgggagagtcaggtgctggtaaaacaactttgttaaatactcttgctcaaagaaatgtcggtatcattactggtgatatgcttgtcaatggacgtcccattgatgcgagtttcgaaaggcgtacaggttatgtacaacaacaggatatacatatcgcagagttaactgttagggaatcgttgcagttttctgctcgtatgcgtcgccctcagcatttgcctgattctgaaaaaatggattatgtggaaaaaatcatcagagttttgggaatagaagagtatgcggaagcccttgttggtgaggttggttgtggtttaaacgtcgaacagagaaagaagctgtctattggtgttgaactagtcgccaaaccagacttattattattcctcgatgaacctacatcaggtttggattctcaatcttcatgggccattattcaattattaagaaagttatcaaaagctggccaatccattctttgtacgatccatcaaccttcagctactctgttcgaagagtttgatagattactacttttgaggaagggtggacaaactgtttatttcggagatattggtaagaactctgccaccattttgaactactttgaaaggaatggggcaagaaaatgtgattctagtgaaaatcctgctgaatatattttagaggctattggtgccggtgccacagcatccgtcaaagaagactggcacgaaaaatggttgaactctgtcgagtttgaacaaacaaaagaaaaagtacaggatttaataaatgatttatcgaaacaagaaactaaatccgaagttggagacaaaccttccaaatatgctacttcttatgcttaccagttcagatatgttttaatcagaacctctacttcattttggagaagtctgaattacatcatgtcaaagatgatgctaatgctggttggtggtctgtatattggtttcacatttttcaatgttggtaaaagttatgtcggcttacaaaatgcgatgttcgcggcatttatctctattatcttgtctgctcctgcaatgaaccaaatccaaggacgtgctattgcctccagagaactttttgaagttagggaatcccaatctaacatgtttcactggtcgctggtgttgatcactcagtacttgagcgaacttccctatcatttatttttttcgacaattttctttgtctcatcgtattttccattaagaatcttcttcgaagcgtcaagatctgcggtgtactttttgaattactgcattatgttccagttatactatgttggtcttggcttaatgatcctatatatgtcaccgaaccttccatccgctaatgttatcttaggtttgtgtctgtcatttatgctttctttctgtggtgttacacaacctgtctcattgatgcctggcttctggacattcatgtggaaggcttccccatacacatattttgttcagaatctggtcggaattatgctgcacaaaaaaccagtcgtatgcaaaaagaaagaactaaactacttcaacccaccaaacggctcaacgtgtggagagtacatgaaaccctttttggaaaaagctactggttacatcgaaaatcctgatgctacgtcagattgtgcatactgtatttacgaagttggagataattatttgacacatatcagctctaagtatagctacttgtggagaaattttggaatattttggatttacattttcttcaatatcattgctatggtttgtgtgtattacctcttccatgtaagacaatcttccttcctaagccccgtatctatactcaataaaattaaaaacataaggaaaaagaagcagtaa

SEQ ID NO: 79513 - DNA, 267 bp, Saccharomyces pastorianus
actttgccatcccacatcatctccacttctgatgtcaccagaattatcaactcttctgaaatccaatctgctatcagaccagctggccaagctactcaaaagcgtactcacgttttgaagaagaacccattgaagaacaagcaagttttgttgagattgaacccttacgccaaggtctttgctgctgaaaagctaggttccaagaaggctgaaaagactggtaccaagccagctgctgttttcaccgaaaccttgaagcatgactag

SEQ ID NO: 79514 - DNA, 819 bp, Saccharomyces pastorianus
atgtcccgtccacaagttactgttcactctttgactggtgaagctactgccaatgccttgccattgccagctgtcttctccgctcctatccgtcctgacattgtccacactgttttcacctctgtgaacaagaacaagagacaagcttacgctgtttctgaaaaggctggtcaccaaacctccgctgaatcctggggtaccggtcgtgccgtcgctcgtattccaagagttggtggtggtggtaccggtagatccggtcaaggtgccttcggtaacatgtgtcgtggtggtcgtatgtttgctccaactaagacctggagaaagtggaacgttaaggttaaccacaacgaaaagcgttacgccactgcttctgctattgctgctactgctgttgcctctttggtcttggccagaggtcacagagtcgaaaagattccagaaatcccattggttgtctccactgacttggaatctattcaaaagaccaaggaagctgttgctgctttgaaggctgttggtgctcactccgacttgttgaaggtcttgaagtccaagaaattgagagccggtaagggtaagtacagaaacagaagatggactcaaagaagaggtccattagttgtctacgctgaagacaacggtatcgtcaaggccttgagaaatgttccaggtgttgaaactgctaacgttgcttctttgaacttgttgcaattggctccaggtgctcacttaggtagatctgttatctggaccgaagctgctttcacaagttggaccaagtctggggttctgaaaccgttgctcctccaaggtcggtaa

SEQ ID NO: 79515 - DNA, 483 bp, Saccharomyces pastorianus
atgtacgatggagatgctaataaatcaaattctaaaaggaaaaaagctgctaatgttaaagtcaacttgatcgattttgcacgttgtgttactaaagaagatgcaatggaatgtatggataaatttcgtatacccccaaaatcgccaaatatagaagataaagggttcttacgaggtgtgaagagcttgaggttttatctgttattaatctggaattatctgacttctgatatgccgttaattttcgatgaagtagagatgaatgatatgattagcgaagaagcagattcgaatagtttcacctccgccaccggttcgaaaatcaacttcaacagtaagtgggattggttagatgaatttgacaaagaagacgaagaaatgtataatgatccaaatagtaaactaagacaaaaatggagaaaatacgagcttattttcgacgctgaaccaagatacaatgacgatgctcaagttagtgattga

SEQ ID NO: 79516 - DNA, 237 bp, Saccharomyces pastorianus
atggatacctctcacgaaattcatgataaaatacccgatacattaagagagcagcagcagcatttgcgccaaaaagagtcggaagggtgcataacaacattgaaagatcttaatgtacctgagacgaagaaactttcttccgtcttacatggcagaaaggcgagtacatatttaagaatttttagagatgatgaatgtttagccgataacaacaatgatgtagatagcgataagtga

SEQ ID NO: 79517 - DNA, 516 bp, Saccharomyces pastorianus
atgtcgcctaagtccacttatcaggagagcttacatggaatatcggaggacttaacgttaaagcctgtttcttctgcaacatactatcctcacaaaagtaaagcagattctggttatgaagaaaaggataaaatggaaaatgatattgatactattcagcctgccaccataaattgtgcctctggtatagcgacacttcctagttcatataaccgacatactttcaaagttaagacatattcaactttatcacaatccctaaggcaagaaaacgtcaacaatcgtagtaacgaaaaaaaacctcaacagtttgtgccacatagcgaatcaattaaagaaaaacccaatacgtttgaacaagataaagaaggcgagcaagcggacgaagaagaggatgaaggtgataatgaacatagggaatatcccctagcagttgaactaaaaccatttacgaatagagttggaggtcacactgcaatattcagattttcgaagagagcggttgtaaggctctag

SEQ ID NO: 79518 - DNA, 1158 bp, Saccharomyces pastorianus
atgccacgttatattggtgtcctgaatgttaggcaacattttcagtcaaaagatgactttttaagcgatttggatcaagaaaacaacggtaaaaatgataccagtaatgaaaacaaagacatagaagtcaatcataacaataacgacgatattgcgcttaatacagaacccactgggacccccttaacacacatacattccttccccttggaacattcgtcgagacaagtacttgaaaaagagcatcctgaaattgagcctgtccatccacacgtgaaaagatcactgtcaagttccaatcaaccttccttgttgcccgaggttgtattaaatgataacaggcatattataccggaatctctgtggtacaaatattccgattctccaaactcggcaccgaatgattcgtacttttcgtcttcctcttctcataactcatgttcgttcggtgagcgtggcaatacaaataaattaaaaagacgcgattctgggtccaccatgatcaatactgaattgaagaatctagtcataagggaagtatttgcaccgaaatgttttagaaggaaaagaaactctaatacgactacaatgggaaaccataatgcgcgtttgggttccagtccatcttttttaacacaaaaatcaagagcctcgtcccatgatgcatcgaatacgtctatgaagactcttggtgattcatcgtcacaagcgagtttacagatggatgactcgaaagtcaatccgaatttgcaggatcctttcttgaaaaaatcgcttcatgaaaaaatatctaatgctttggatggctcgcattcagtaatggatttgaagcaattccacaaaaacgaacaaataaaacataaaaactctttctgcaactctttatcacccattctcactgcaaccaattctagggatgatggtgaatttgccacctccccgaattatatcagcaacgcacaagatggtgtttttgatatggatgaagatacgggaaacgaaactataaacatggataaccacggctgccatcttgactctggtaaaaatatgattataaagtcattggggtataatgtttcaaatgactatagtcatcatgatattgaatcaattacgtttgaggagacgtcccacaccattgtttcaaattatctt

SEQ ID NO: 79519 - DNA, 849 bp, Saccharomyces pastorianus
atgaatgtcaatgcatttgccattacaggtggtaaaactttgaaagacgacctgaagaaaatgcaaaagcatggttgccaggccgttagcggaacaccaggaagagtattagacatgattaagagacaaatgttgcaaacaagaaatgttcaaatgttagttttagatgaggctgatgaattattgagtgagacactaggtttcaagcaacaaatatacgatatttttgcaaaattgcctaaaaattgccaagttgttgttgtcagcgcaacaatgaataaggacattttagaagtaaccagaaaatttatgaatgatccagttaaaatcctagtgaagagggatgaaatatcacttgaaggtatcaaacaatatgtcgttaatgttgacaaagaagagtggaaattcgatactctgtgtgatatatacgattctttgaccattacacaatgtgtgatattctgtaacaccaagaaaaaagtagattggttatctcagcggctaatccaatcaaactttgctgtagtctccatgcatggtgatatgaaacaagaagaaagagataaagtaatgaatgattttagaacaggtcattctcgtgtactgatatcgacggatgtttgggcgcgcggtattgatgtccaacaagtttctttagtcattaactatgacctaccagaaataatagaaaattacatccatcgtatcggtagaagtggtcgatttggtagaaagggtgtggctataaacttcattaccaaagctgatttagcaaaacttagagaaattgaaaaattctattctatcaaaataaatccgatgccagcaaattttgcagaattatcataa

SEQ ID NO: 79520 - DNA, 756 bp, Saccharomyces pastorianus
atgatgaataaagaacttatgtcaaaaactgctcaactatctgaattcgatgaggagttatacaaagttatcgatggtgaagatgaaaaatacctaattgctacctcagaacaacctatctccgcttaccacagcggtgaatggtttgaaaagccacaagagcaattgccaattcactatgtcggttactcctcttgtttccgtagagaagccggttctcacggtaaggatgcttggggtgtcttcagagttcatgctttcgaaaaaattgaacaattcgtcatcactgaacctgaaaaatcttgggaggagtttgaaaagatgatctcttactctgaggaattttataagtctttgaaattaccataccgtatcgttggtatcgtttccggtgaattaaacaatgctgccgctaaaaagtacgatttagaagcctggttcccataccaaaaggagtacaaagaactcgtctcttgctccaattgtactgattatcagtcaagaaacttagaaattagatgcggtataaagaaaatgggcgacagagaaaagaaatacgtacactgtttgaattccactttggctgctacccaaagagctttgtgctgtatcttggagaactaccaaacggaagatggtttggttgtaccagaagttttgaggaaatacattccaggtgaaccagaatttttaccattcgttaatgaattaccaaagaattccacctctagtaaagacaagaaaaagaagaattaa

SEQ ID NO: 79521 - DNA, 234 bp, Saccharomyces pastorianus
atgcaccgtaccattgtcatcagaagggcttacttgcattacattccaaagtacaacagatacgaaaagagacacaagaacgttccagttcacgtttccccagctttccgtgtccaagttggtgacatcgttaccgtcggccaatgtagaccaatctccaagactgttagattcaacgttgtcaaggtctctgctgctgctggtaaggctaacaaacaatttgctaaattttaa

SEQ ID NO: 79522 - DNA, 1545 bp, Saccharomyces pastorianus
atgtctcatgaagatgaagacactgatatggattggtatttgaaaacatcgggttcaaaagatttacgtaaagtggatgatatcgaaccaaattctgttgctgtagcagctgttgctgccgcatacaacagctcaatgagagaaaaagataagaggagctgtcataaaaaatcttctaatagtagatcagagaggaagaagcaccgtaaaagaaaaagctctagagaaagaaaagccaagataaaaatggtcctagatccgcagctgactacactggacgatggcataacgacaacagcatttttacctgatgatctcattgctgaaacagcttttgataagtatgttgatactgaaaaggcatacctagctaaacatccaagtaaatcgttagaagttaatgaggatgataaagaaaacaactttaataacaatagcagcacgctggttagaatttataccgatttagaggggataccaaatgacggcagctacataaagcgcactccaaagataccagaaaaggatgtgaaatcagacgacttgatattggcaccagaagaaaacaatggagataccgcattactgcgatccgatattgtgaaagcgtcagtaattgacggtgctatcacaaaatccatcggtaagaagttcactcccagcgaggaaaatgctttggaccaattcatcgaagaatacatgaaaataagaggcttggatagacgccaaatgtgcgagagaatttggtctacagacggagtcattagagatgggttttgggcaaatatcagcaaagttttaccttatagaacaaggtcctcaatatataaacatataagaagaaaatatcatattttcgaacagcgtgggaagtggacgccagaggaagatcaagaattggcaagattatgtttagaaaaagagggtcattggaccgaagtaggcaaattgttaggcagaatgcctgaagattgtagggaccgttggagaaactatatgaagtgtggttcaaagcgaggttctaaaagatggtcgaaagaagaagaagaattgttgactactgtagtaaatgaaatgattgaagaggcacaccaatatcaagggatgaaggcattggaggctgccaacaaaaatgatagatacaatcaaatgtattctaggggtccaaagggaaagagaattagcgataatcctaccttcaaagatatgatcaattggactgtcgtcagtgaacgcatgagcggaactagatcccgtatacagtgccgctataagtggaataaattagtaacagatgaagcagccagaagtatgttgagcattcctgtttctgaaaggaagtggctgctagaacgattgaaacagctacctaaaacgtcctattcaaatatcgactggaacagtatagctacctacaagcccggatatcctcgaactggtcttgaactgagattatgttacgagcagatgagagaaaagattcatgactttaaaggaaggtcaacagctgaaataattgattcattgttggaacaaatcaattaa

SEQ ID NO: 79523 - DNA, 501 bp, Saccharomyces pastorianus
atggtagggggttctcatgattgcgaaaatggcagaagcgaggacaaggaaaaagatgaaggaaatgaaacatatcaaggtcataggaaatcggttgttgttggcgataaaacttttgtggccagtagttctctgctcgctaccattgaggttattaaggagctaatggttctttccataaaccttccctcgatatacttatcaaatttcgagaagttgtgctatgacgcactacaatactacaacagtagcgccatggcatctgtcacacaacctggaaacccacttttaaaaacgggtagaaacttatctatcatgggagagtcattggactgtctcgcagaatttgtgattattgttcagagattttatcaaaggctttccaactctaacagggattttgagccattcgatgcgagtcattatacaaccctgttggggcaattccaggcctcatcgaataaaatatacatggccaatgccccacctccgcctgtataa

SEQ ID NO: 79524 - DNA, 2256 bp, Saccharomyces pastorianus
atgcccactaaaaattcaaagtcgatcgcagctgctccgaaaccaattttgaagaagagaaccgtcacagaaattatagaggacaacgctttatggaaactgaatgaggcaagaaaacacatgacagaaatgaaacatgcttcggtaataatggatcccaatggcaacaaaaacgtccatgacgatttcgatgctctggccgctcaagttaacgcccagtactaccattatcccaaagaatcgaacagtagcgttagtttgaagagtcaacactctgacaaaaaagataattctactataccgaatcctgtaggagaaaattcaaatggtggcggtgacaagggagaagaagacctgcatttaaagtcagcgcttcatgttcaaaacaataggtcaacggcacaatcaaacaaaagcatactagaaaatagtaccaatgatcgtaaggctaacttggatcaaaacctaaattctcctgataataataggttcccctcctcaacatcttcctccaatagagataatgaaaacaattccatgggattatcatcaatattaacctcaaacccaagtgaaaaatctaacaaacctactaaaaatagacatatacattttaatgacagggtggaacaatgtatggcactacgatatccagcttcacaatcggaggatgatgaaagcgatgatgaaaataaacaatatgttgatgttaataacaatgcgaacgttacaacaataaacaacaataggactccattgctagccactcagcataaatctattcctatcaactccgcaactgaacatttgaacaaaaatactagcgacgatgatacatcctcacaatcatcatcttcatcacattctgatgatgaagaacacggcggcctttacataaatgcaagattttccaggaggtctgactctggagttcattcaccaataacagataattcctctgtggcttcatctactacttcaagagctcatgtacgtcccataataaagttgcttcctgataccactttgaattatggatcagacgaagaatctgataatggcgaatttaatgggtatggtaatgctgtgtcacataacgtcaatacctccagaggctatgattacatatacgattataactcggtttacactggtgatacttccagttttttaccagtagattcatgtgacattgtagatgttcctgaaggaatggacttacaaacagccattgcagatgataatgcatcaaactatgaatttaacaatgcggtagaatccaaggaaaaacatgttccacaactacacaaagcttcagcaaataatacaacacgtcaacatggatcacatatgttattatatgacgacgacaattacagctcttcatcagatagcgaacagcaatttattgaagactcacaatacaatagtagcgacgacgaagaggaagaagatgacgatgaccaagaagtagacgataaccacgatgaaggactttcactgaggagaacattgtcacttgggaaatcaggatctaccaattctttgtacgatctagcacaaccatcactctcttcggcaactcctcaacaaaaaaatcctactaattttacagggggtaaaactgatgtagacaaagatgcacaactggctgtcaggccgtatccgttgaagcgcaattcctcttcagggaacttcatattcaattcagatagtgaagaagagagtagcagcgaggaggaacaaagaccattacccgctaacagtcagctggttaatcgaagcatattgaaaggcagtgtgacaccagcaaacatatcatctcagaagaaaaaagcccttccaaagcagccaaaagcgtccgatagttcacaaagctttagaattgtaaataatactccttcaccagccgaagtgggggcgagtgatgttgccatagagggttatttctctcctagaaatgaatctatcaagtctgttgtttccgggggaaatatgatggaccatcaagatcactcagaaatggacactttggcaaaaggatttgaaaactgccatataaataatgctagtaggctaaaggacaagaaagttgatagcgtgcaaaccactagaaaagaagcgtctttgacggattcgagtaatgaaaggttacacaaagtggtgcagaatgcaagaggtatggcaagcaagtacttgcactcttggaaaaagagtgacgtcaagccacaagaaaatggaaatgacagcagttag

SEQ ID NO: 79525 - DNA, 645 bp, Saccharomyces pastorianus
atgtcaacaaatctagcaaattacttcgccggtaagaaagatattgaaaacgagcatgtaaatagaaatgcgagccatgaaagtaatagcaaaagtgatgtcaaaattagtggtaacgataacgacaacgacgaagatatggggccttcagtatcgatggctgttcaagcgaaaaatgatgatgatttccataaatcaactttcaaccttaaaagaacaagatcaatgggccttcttgatgaatatattgaccctaccaagaaattgctaggaaggtcagacgacctatatgataacgacaatgaatattatgacaactcatctaataattcttcaagcaattcttcagatgatgattatgatgacgactatcaggaacactcaacctccgtttctccaccgccggcggataatgatagctacttaattccacaagatgataatgacgtagtggtagagccagaaagacatgttgactatctgtcacatgaatggaaagaatcagaaatttctaattcttggaaatatatcatcctaaagaaaaagaaaagagatgttgatctagtaaatgctgctaggttagaaaatgcctcatggagaacatgggcaaaagcaagaaacaacttgaaaaacagtgtcacctga

SEQ ID NO: 79526 - DNA, 894 bp, Saccharomyces pastorianus
atgttttttactggctcaaatgataaaactgtaaaaatatgggacacaaacaggtttgaagcggttcaagatataaacctggggtataaaataaatcaaattgataataacgttgtcgacgacagttctttgcttgtagtggcaagtgaagactactatccaagattaattgacctgagaaccatgaattcaggggtaactgcgcttggaatgggaaatcaaacacgaatgcaatcagaaattttatgctgcaaatttaaccccgtcagggaacagattattgcttgtggtgacatggagggtggggtaaaattatgggatctaagaatgaggaacagactgtattcagaattgaaaagaaataaaaataggttcaagactataaataacgatgataatgacgatcaaagcgatgtctatttcagctctaaccaatcaaaagcccatctgagatgttgcagtgacattgtttggaatagtgagggttcagagctatgttcagtcggcatggatggaaaactgaatgtttggaggccatttacggaaattctgcaaccagaaggtctagctagttattcccagttgggaacacaagacctgagccgtatcaaatacaaaaaaagagtatctcgaaggttgctttggtttgacaagtttttactgtgtattactgacaatggtgaagtagaaatatacaatacggaggaaaaaaaactttggaacaagctcgaatacccaatggttaatcaggtaaaaaaaaatcaggcttcgcattgtcagtttagttccatgattgtgcaaacaaatataatgaattcagttggcctcaaattgttctttggaactaacaacaacaccgttagcgacggtggatccatctttgaatgttcataa

SEQ ID NO: 79527 - DNA, 537 bp, Saccharomyces pastorianus
atggatccatttttagagttcagagtaggcaatatctcattaaatgaattttatagaagaactattcaaagcgaatttgagaggatccttgaagatcccctatcaaatatgaaaaactacagatttagtaaacaatcaaactatagtacaaaagaaaaaacaccgttaagtataggtgttaactgtcttgatattgatgatactggtcaagtgttattaggaggtggagatgatgggtcactttccatttggggtttagatgaatcattgcaccgcaatgatgaaggtgaacaggaattgatcaataaaaggctaaactatatcaagcgacagcctcaccaatcagatgatgagcctgctcaaataatgggttataaaaataaaagaacacgaataaacgacaacaacactatgagactggtgcacagttttcaaacacagagaaaccaatatcgaatgtctagacagtctagtgctgcagttcccgttcaaagatcaacatatcaaataaaacggatctcctatcgggttaagtga

SEQ ID NO: 79528 - DNA, 225 bp, Saccharomyces pastorianus
atgaactctttgtctactttggctcatcacggtatcatttttgtcccattgggttacaagaatgttttcgctgaattgaccaatatggatgaagttcacggtggttcaccatggggtgcgggtaccattgcaggcagtgacggttcaagatctccttccgccttggaattacaagtacacgaaattcaaggcaagactttctacgaaaccgttgcaaagttttga

SEQ ID NO: 79529 - DNA, 120 bp, Saccharomyces pastorianus
atgccaagagtagctatcatcatttacacactatatggtcacgttgctgccaccgcagaggcagaaaagaagggaattgaagccgctggaggctctgcagacatttatcaagtcgagtaa

SEQ ID NO: 79530 - DNA, 363 bp, Saccharomyces pastorianus
catccagacactgacagcccagtcaaggaatttttcagaagtatttggggaaaccagtttttgttctggtcaatcatttttggatttgtgtcagccttccccgtcgtctatattccggttattaatgataaagtgtttttgcataaaccaattggtgctgaatggggtctcgccattgcattcacaattgcattctgggtaggtgctgaactttacaagtgtggaaagaggcgctatttcaaaactcagagagctcacaattcggaaaacgatttggagcgaagcagtaaacacgatccatttgaaacgtatagcacatccacaacccttcaaagcgaaattaatatcagtgtcaagcattaa

SEQ ID NO: 79531 - DNA, 1098 bp, Saccharomyces pastorianus
atggttgcaggattcattattttatcagtcgtcatcaattgtgggggagccggtgtggacggctatattggcggcaaatattggcgcgaccctggttcatttgcagaaggcagcggtgccactcgtttcaaagggatatgttatattctagtatctgcatatttctccttcggtggtattgaattatttgttctttccatcaatgagcagtctaaccctagaaaatccactcctgtagccgcgaagagaagtgtatatcgtattttgatcatttatttgctgacaatgattctaattgggttcaatgttcctcacaataacgatcaattgatgggttccggtggctccgcaacgcacgcttcaccatatgtcttggcagcctctattcacaaggttagggtcatcccccatatcattaatgctgttattttgatatcagtcatctctgttgcgaactctgccctttatgccgcaccgagattaatgtgttccttggctcaacagggctatgctccaaaatttttgaactatattgatagggagggaagacctttaagggccttggtagtgtgctctcttgttggtgtcgttggcttcgtcgcctgttctccacaggaagagcaagcatttacatggttggcagccattgcaggtttgagtgaacttttcacatggtcaggcattatgctttcacacattcgattcagaaaagcgatgaaagtccaaggaagatcacttgatgaagtcggctataaggccaataccggtatatggggttcatactatggggtttttttcaatatgcttgtctttatggcccaattttgggtcgcactatctccaataggaaatggcggaaagtgtgatgctcaggcattcttcgagagttatctggctgccccgctatggatattcatgtatgttggatacatggtttacaaaagagatttcacctttttaaacccactggacaagatcgacttggactttcatagaagagtttacgaccctgaaataatgaggcaggaggacgaagaaaataaagaaaggctaaagaactcttcaatattcgtcagagtctacaaattttggtgttag

SEQ ID NO: 79532 - DNA, 171 bp, Saccharomyces pastorianus
atgtatggttctatagaggtaatatcaaagaaagttaaacagatgattgaggcttttggaggtgggaagtcccgctacattgttaatttcggtcacggtacccaccctttcatggatccagacgtcatcaagtttttcttggaggagtgccacagaattggttcgaagtaa

SEQ ID NO: 79533 - DNA, 558 bp, Saccharomyces pastorianus
atgagtaagaacatgaagtcattaagtagactaatggttgatagaaagttgggagtaaagcagacaaatggaaataacaaaaattatacagccactatagcaactgctgctgaaacatcaaaggaaaatagacacagattagattttaatgctttgaaaaaagacgaagccccctcgaaagagacgggcaaagatagtgctgtacacttagaaactaatagaaagccccagaatttccctaaggtagctaccaaatcagtctccgcagactccaaagttcataatgacatcaagataacaaccacagaatctccaacagcatcgaagaaatcaacttccacaaacgtcaccttacattttaacgcacagacagcacagacagcacagccggtgaagaaagaaacggtaaaaaattccggatactgtgaaaattgtcgtgtaaaatacgaatctttagaacaacacatagtttctgagaagcatttgtctttcgctgaaaacgatttaaattttgaggctattgactcgttaattgaaaatctcagatttcaaatatag

SEQ ID NO: 79534 - DNA, 1296 bp, Saccharomyces pastorianus
atggtttctccaacgaaaatgataataaggtctccgttaaaggaaacagataccaacttgaaacataataatggaattgccgcatcaactacagcagcgggccacttgaatgtgttttctaacgacaataattgcaacaaaaacaataccactgaatcctttccgaagaaaagatcccttgagcgcctcgagctccaacagcagcagcatttgcatgaaaagaaaagggccagaatagaaagggccaggtctattgaaggcgctgtccaagtcagcaaaggtacgggtctgaaaaatgtcgagccaagggttacgcctaaggaattgctggaatggcaaacaaattggaaaaagataatgaaaagagattctcgcatttactttgacattactgatgatgtagagatgaatacatataataagtccaagatggacaaacgcagagatttattgaaaagagggtttcttacattgggtgcgcaaataactcaattttttgacactactgtcacaatagttatcacaagaaggtctgttgagaacatatatttactaaaagataccgacattttatcgagagctaaaaaaaactacatgaaagtttggagttacgaaaaggctgccagatttctgaaaaatcttgatgttgatttggatcatttgagcaagactaaatctgcttctttagctacgcccacattgtccaatcttctacacaatgaaaaattgtatggaccaacggatagagaccccagaactaaaagagacgatattcactactttaaatatcctcatgtatacctttatgacctatggcaaacttgggcccccataataactttggaatggaaacctcaagaactaacaaacttagacgaactaccttacccaatattgaaaataggttcattcggaagatgcccttttataggggataggaattatgacgaaagttcttataagcgcgtagtaaagagatactcgagagacaaagcaaacaaaaaatatgcactgcaacttcgtgctctatttcaatatcatgcagacaccttactgaatacgtcatcagttaatgatcaaacgaaaaacctaatattcatacctcacacatgcaacgattctaccaagagcttcaaaaaatggatgcaagaaaaggcaaaaaattttgagaagaccgagttaaagaagacggatgatagcgcagttcaagatgttcgtaatgaacatgctgaccaaaccgatgaaaaaaatagtatattattaaatgaaactgaaaccaaagagcctccgttgaaa

SEQ ID NO: 79535 - DNA, 1029 bp, Saccharomyces pastorianus
atggttgaaatacaatatgtctgtggcggctcaaactctggaccatcgactattcaatgggtgagagaaacaaaaatttgtgtttatgaagcccaagttaccatacctgaattgtgcaatttagaattactagccaaaaatgaagaccaaaagaacgcctcacctatactttgcaggatgcccgcaaaatcaaaaattgatagtaactctattgatttaatcaccaaatatgaaccgatttttttaggttctggaatatactttctaaggccctttaacaccgacgaaagagacaaattaatggttactgacaatgccatgtcaaattgggatgagattacggaaacatattaccagaaatttggaaatgccataaacaaaatgcttagtttgagattagtatcgttacctaatggacatattctccagcctggtgactcatgtgtttggttggcggaagtggttgatatgaaagatcggtttcaaaccactttatcgttgaacatacttaattcacagagagcagagatatttttcaacaagacgtttacatttaatgaagataatggaaacttcctatcatacaaaattggggatcatggtgagtcaactgaacttggtcaaataacccactcaaacaaagcagatataaatactgcagaaattcggtcagatgaatacttaattaacactgataatgagctattcttgaggatttctaaggagatagcagaagtgaaagaattattaaacgaaatcgtaagtccacatgaaatggaagtaatatttgaaaatatgagaaatcaaccgaataatgattttgaactggcgttgatggacaagttgaaatcctcattaaatgatgataacaaagttgagcagataaacaacgcaaggatggatgatgatgaaagcactagtcatacaaccagagacatcggggaagcgggatcacaaacgacagggaatactgaatcggaggtaacaaacgtagcagctagtgttttcatcgaacatgatgagctttaa

SEQ ID NO: 79536 - DNA, 183 bp, Saccharomyces pastorianus
atgcaagctaaaattatatatgctctgagcgcaatttctgcgttgattccgttaggatcatcactattagcacctatagaggaccccatagtatcgaataagtacctcatatcttacatcgatgaggacgactggagtgataggatattacaaaatcagtctgtcatgactcgggatatatag

SEQ ID NO: 79537 - DNA, 549 bp, Saccharomyces pastorianus
atggggggactagactgccgatatctaatttgcaatataaaaaataggaattacgatatattgagcctaaccactatttcaactccacatagagggtcagaaatggccgattacgtagtcgacctttttgaaaatctaaacgccttgagagttagccaaaagatattgccaatatgtttctaccaactcacgactgcgtatatgaaatacttcaatttggttacgccaaatagtccaaaagtctcttatttttcatatggatgctcctttgtgcctaagtggtacaatgtcttttgtacgccctggaaaattgtttatgaaaggtctaaaggttgccccaacgatggccttgtaaccataaatagtagtaaatggggtgaatacagggggactttgaaggacatggatcatctggacgtcatcaattggaaaaataagttacaggatgattggagtaaattttttcataccactactgtcggagagaaggttgacatcctgaatttttacttgaagataaccgatgacttggcaagaaaaggattttaa

SEQ ID NO: 79538 - DNA, 378 bp, Saccharomyces pastorianus
atgaaaaatgataataaagctaatgatataataatagactccgtcaaagttcctgattcgtacaagcccccaaaaaatcctattgtattttgccatggtttatcaggatttgacaaattaattctaatcccttctgtattccatctgacaaacctaatttccaattcaatagtacgtaatatggcagaaaatttcatgcaggatgacgaagataagagtgataacaagtacacaaatttgttggagattgaatattggattggcgttaaaaaatttcttcaatctaagggatgtactgttatcaccactaaggtaccaggttttggtagcatcgaggaaagagcaatggcttggatgctcagttacagaaagaagtaa

SEQ ID NO: 79539 - DNA, 333 bp, Saccharomyces pastorianus
atgggtccttcagactcaccctacgctggtggcgttttctttttgtctattcactttccaactgattatccattcaagccaccgaaggtaaactttacgaccaaaatttatcatccgaatattaattcgagtggtaatatctgccttgatattttaaaggaccagtggtcaccggcgctaaccctttcaaaagttttgttgtctatttgctctcttttaacagatgctaatcccgacgatcctttggtccctgaaattgctcaaatctacaagacagataaggctaagtatgaagccaccgctaaggagtggactaaaaaatatgctgtttga

SEQ ID NO: 79540 - DNA, 1335 bp, Saccharomyces pastorianus
atggaaactcttttcaaaatcacacactcctctaactttaacacctcaatccaagcattagttttgattaatcaagtcaccgtcaaggcaaagttgaacagtgatcgatattatagaacattatacgaaagtttatttgaccccagactggtgaactcttctaagcagggtatttacttgaatttactatacaaatcattaaaacaagatgcactcaatgttgaacgagtagaagcctttgtcaagagaattcttcaagtttgttctcattggttgaacgtcggcgccattactggttttttcttcttattaatccagttggctaaaacagttccacaaataaaaaatcttctaaccaacacgccagttgattacgagtatgaatctgatgcagaagaggagcaagggaacaaggacataaaaaggaaggaatatgacggccgcaagcgtgatccaaagttcgccaatgctgaaaaatcttctttatgggaaatcaacaacttcatcaatcattttcatcctactgtgaaaacatatgcaaacgcctatgtgacaggagaaacagagcaaatagctaaaccagacctgggtctatttactctatcacacttccttgacagatttgtctacagaagtgccaagcagaccaatacagcaagaggtacatctattatgcaacctctgtttagtggctcacgagttaatgactctgtcttagttaaggcatctgatattatgcatgaccagggtcccgtgaacactgaagactggctaactaaaaaggtcgaagatatcaaacctgaagataaattcttttatcaatatttcactaccaagaaaaccgctgatggaaaaggaaagaaatctaacaaagcatctaatttcgatagtgatgacgaaatggatgaaaatgaaatttggagtgctttggttaaatcgagaccagatgttgaagatgatagcgacgacagtgaacttgacttcgctgaagatgatttcagcgattcaactagtgacgatgaacctaagctggacgcaattgatgatgaagatgctaaaagtgaaggcagccaagaaagcgatcaagaagaaggcctcgatgaggatattttttacagtttcgatggagaacaagacaatagtgataaaaaacgttccttcgctgaaagtagtgaagaggacgagagcagcgaagaagaaaaagaagaagaagaaaataaagaggtatccgcaaaaagagcaaagaagaagcagagaaagaatatgctcaaaagtctaccggtatttgcatctgccgacgattatgctcagtatttagatcaagattcagactag

SEQ ID NO: 79541 - DNA, 1710 bp, Saccharomyces pastorianus
  modified_base (1692)..(1692): a, c, g, t, unknown, or other
atgagtgagaacaacggcaatccgctggatttgtcttcactaagaaataagatttcgtcaaaattgcgagacaataacagcaaaaaggcgaagaaagcccacaaaggcaaggacgtgaaggccagtagtaattcaaagaaggtaaatgaggacatacgtcgtgaagcactagcattgggtgccagcgaagaagatctaaaattgattcaaggattaagcgatgatgatgacgctaagagcgaacaggaatttgatgccgtcgctgacgaggatgctggcgacaagggattcaagaacgatcttcaaaatttcatgaagaatgtaggatttgaccaacacaaactcgaagatgtagacgatgacgatatagaagaagaatccactagctccaaagaatctaaaatacccgctcaagagaaggaacatgcacaatcaaacattgcatcatcgacaatagagaaaacctcccaagagtcaatcgataatggcagtgaaaaagaagaaaacacagtagaagaggctaatcttagttcagaccaagagccagaatcagaatctgcagagaaagaaaagaaagaggagaaagatggaggtttaattactcaaactactattatctcatctgacaaacttattattccttacgataaaccatggtatgaaattccattggatcctcaagttggacaaaatgatgatgttgaagaattatccaaggaacagattgagaaactttttgaaagaggtaagcaaacgctagaagctgacaaccaaacttactatgaggagtttacaaaggactcatcgcaggccaagttcatgtctcaaatcctatcggacggtaccctcaacgataaaatatctgccgtaactttactcattcaagattcgccattgcataacactaagtctttagaaactctggtttcatattgtggcaaaaaatcgagaaactctgctttacagagtttaaacgctttgaaggatttattcttaaatggtcttttgcccaacagaaagctgaggtatttcaaaaatcaacctggcttatctatgatgctaaacaagagaactcttgcaattttctatttcgaagattatttaaagaaactgttctttcgtgttttagaagtcttggaagtgctttcccacgatccgattattcacgttagattacaaatattaaatcatgtatttgatttattgaccaaccaaccagagcaggaatttaatttattgagattaggtgtaaataaaattggtgatattgattccaaagtttcttcgaaggcgtcatatttactactgaagttggaacaagctcatccgaatatgaaatctattgtcattgatgctatcgttgatatcgcattgagaccgaatgcggattatcataccacttactattctgttattactttaaaccaaaccatcttaaaaagatcagaagactctgttgctaataaattagtaaaaacatacttcactttgtttgaaaaattcttgattaatactgataaagacaataccaatggcgttgttaagagtaactcaaagtcgtatgaggagaaaagaaagaagaactttaaaaagggtaaacacggtggtaaatctgtaaaaatcgaaaaaacggaaaatgaagttttagatgaaaagaactcaaaattattcagacctgcaggcatgcaagcntgcactgccgtcgtttac

SEQ ID NO: 79542 - DNA, 498 bp, Saccharomyces pastorianus
atgttactaacattcgataaattttttggaatatccaattccactaaatatcacttcaaacagggtaaaggtatttcttcttctgctattccatactctagaaatgctccagcttggttcaagttgtcctctgaatctgtcattgaacaaattgtcaagtacgccagaaagggtttgactccatctcaaattggtgtcttgttgagagatgctcacggtgttacccaagctcgtgtcatcactggtaacaagatcatgagaatcttgaagtccaacggtttggctccagaaatcccagaagatttgtactacttgattaagaaggctgtctctgttagaaagcacttggaaagaaacagaaaggacaaagacgctaagttcagattgattttgatcgaatctagaattcacagattggctagatactacagaactgttgctgtcttaccaccaaactggaagtacgaatccgccactgcctccgctttggtcaactag

SEQ ID NO: 79543 - DNA, 225 bp, Saccharomyces pastorianus
atgtatctggaccaccattatagatttgaccttttcgttggtgttttatatgcaatgacaagtttcatcatcataaactggtttgttttacaaccaaaagttttaaaaaaatggattcatataaggttaggcgacaaagtggatacaagaaacgaagctcgcacttttggcatgagagtattttgtggcaccaagatggaatggttttttgatccgcttgcatag

SEQ ID NO: 79544 - DNA, 594 bp, Saccharomyces pastorianus
atgataagtccttatgaaaatcaactaattgaactttattctgaatacgaccgacaaagccttctgccttttctgcaaaagcacaataactataatgtagagagtgccatcgaagtctgttcatcgaaacttggtttatataatgaactgatctatttgtgggggaaaatcggtgaaacgaagaaagcattgtctttgattattgacgagttaaaaaacccgcaattagctatagattttgttaaaaactggggtgattcagaactttgggaattcatgattaactatagtcttgacaaacctaattttactaaagccattttaacatgttctgatgaaaccagcgaaatttacctaaaagtgaccagaggtatgtccgatgatctgcaaattgacaacctgcaggatattattaaacatatcgttcaagaaaattcattaagcttggaagttagagataatattttggttatcattaatgatgaaacgaaaaaatttgccaatgaattcctgaaaataagaagtcaaggtaaattgtttcaagtagacgaaagcgatagtgaaattaatgacgacttaaatggtgttttataa

SEQ ID NO: 79545 - DNA, 1836 bp, Saccharomyces pastorianus
  modified_base (1810)..(1810): a, c, g, t, unknown, or other
atgactacggataatcatcagaatgattctgttttggatcaacaatcaggcgaacgaacaattgatgagagtaattccatctctgacgagaataatgttgataataagagggaagacgttaatgtaacttcaccaacaaaaagtgttagttgcatatcacaagcggaaaatggagtagcttctcgaacagatgagagtacaataacaggaagtgcgacggatgcagaaacaggtgatgatgatgatgacgatgatgaagatgaggatgacgaagatgaggatgacgaagatgagccccccttattgaagtacacacgaattagtcaactcccgaagaacttttttcaacgagactcgatctcttcatgtttatttggtgatactttttttgcatttggtacacactcaggcattctacacttaactacatgcgcattcgaacccattaaaaccatcaaatgccatagatcttcgatactttgtattaacactgacggaaaatattttgctacgggatctattgacgggacagtgattatcggatcgatggatgatccacaaaacattacacaatacgatttcaaaagacctataaactctgtagcgttgcactcaaattttcaagcatccagaatgtttgtttctggtggaatggctggcgacgtcgtactatctcagagaaattggctaggaaatagaatcgacatcgttttaaacaagaagaaaaagaaaaaaacaagaaaagatgacctatcctctgatatgaagggccctatcatgggaatttatactatgggtgaccttatattatggatggatgatgatggaataacattttgcgatgttcctacaagatcacagcttttgaatattccattcccctccagaatttttaacgtacaggatgtaaggccagatctatttagaccccatgttcattttttagaaagtgatcgtgtcgttatcggatggggatctaatatttggctatttaaagtttcctttaccaaggattcaaattcgatcaaatccggtgactctaattctcaaagtaataatatgagtcattttaaccctacgacaaacatcggatctctcttgtctagtgctgcatcgagttttagagggacacctgataagaaagttgaattagaatgccattttactgtgtcaatgttgattacagggcttgcatcgtttaaggatgatcagttattatgcctaggttttgatatagatattgaagaggaagcaaccatagatgaagatatgaaggaggggaagaattttagcaagcggccagaaaacttattagccaaagggaatgctccagaattaaaaattgttgatctttttaatggtgatgaaatctataatgatgaagttatcatgaaaaactatgaaaaattgtctataaatgattatcacctcggtaaacatatagataaaacaacaccagaatactatttgataagttccaacgatgccatcagggttcaagagttatcattgaaggatcatttcgattggtttatggaaagaaagcaatattacaaagcttggaaaatcggtaaatatgtaattggatcagaagagaggtttagtataggcttgaaattcctcaactctttagtaactaaaaaagattggggtacattagtggaccacttaaatattattttcgaagaaactttaaactcattggattccaactcatatgatgtcactcaaaacgtgctgaaagaatgggcagatataatagagattttgattacatcaggaaatattgtagaaattgcgcttgattccncaagaaacctgcctgggatcctctag

SEQ ID NO: 79546 - DNA, 1533 bp, Saccharomyces pastorianus
  modified_base (379)..(442): a, c, g, t, unknown, or other
atgatacatttgaatgagaatgttagtatggcatttaagaaaaacgaagtcttagagagcgttttgaatagattatgtgatgaatactactgtgttaaaaaatgggaatatgaaatgttgttagatttaaacattgaaaacaaaaacacaaacttcttgagtacagaagaattagtggaaagtgctattgtggagccttgtgaacctgatttcgatactgcgccaaaaggtaatgaggtccatgatgataattttgatgtatcagtttttgccaatgaagatgataataatcaaaatcatttaagcatgtcacaagctagccacaaccccgattacaacagcaatcacagcaacaatgctattgaaaatactaataatnnnnnnnnnnnnnnnnnnnnnnnnnnnnnnnnnnnnnnnnnnnnnnnnnnnnnnnnnnnnnnnngcgtgaagtatttgcaacagaatactgttgataatagtactaaaacaggtaaccctggacagccaaatatttctagtatggaatcgcaaaggaactcttcgactacagatttagttgttgacggtaattatgacgtcaattttaacggccttttgaatgattcatataatacaatgaaacagccgggcccattagattataatgtcagtacattaatcgataaacctaatttattcttaagtcctgatttggatttatctactgttggcgttgatatgcaactaccatcatcagaatattttagcgaagtattttcttcagctattagaaacaacgaaaaagctgcctcagatcagaacaaatcaactgatgaacttccttcaagcacggccatggcaaattcaaactcgataacgactgcccttctagagtcaagaaatcaagcacagccgtttgatgtcccacatatgaatgggttgctgagcgacacatcaaaaagcggacattctgttaattcctcaaatgctatatctcaaaattctctgaataactttcaacataattcggcgtccgtcgcggaagcttcgtctccttcaattacaccatctcctgtggcaataaactcaacaggcgctccagcgagatctattatatctgcacccatagactcaaattcctctgcgtcatcgccatcagctttagaacatcttgaaggtgctgtttccggtatgtcaccctcttccaccacaatattaagtaacttacaaacaaatataaatatcgccaaatcattgagtaccattatgaaacatgcagaatcaaacgaaatatcactgacgaaagaaacaataaatgaacttaatttcaattatttgacacttttaaaaaggattaaaaagactagaaaacaattaaatagcaaaagcattaaaataaacagtaagaatgcacaagaccatttagaaacccttctatctggggctgcagctgcagctgcaacttccgccaataacttggaccttccgactggtggttcaaacctcccagactctaataacttacacttacctggtaacacaggttttttttag

SEQ ID NO: 79547 - DNA, 1062 bp, Saccharomyces pastorianus
atgctttccattcagcaaagatataatatttgtctaatggcggagaggcacccaaagtggacgcaacttgaattggcaaaatgggcttatgagacgttccagctgccaaaaattccatcccaaggcaccatatcgcgtttgttggcaaggaaatcaacttatatgaattgtaaagagcatgaaaaagatgcgaatagattaaggaagccaaataatcttttggttcggaaaattttacaagaatggatttctcaaagtttgtggaatggaatccctataacgtcacctattattcaagacactgcacaagctgtttggcacagaattcctgcggagcatcgcgagggaaatggttcttttagttataaatggatttcgaattttttatcaaaaatggatgtcaatatttctgttttagacgaagagttacccaaaaccccaaaagtctggacatttgaagagagggatgtattgaaggcttatttctccaaaattcctccaaaggatttattcactttagatgaagcgtttctctcctacaacctaccgttggattatgctcaatatgaagcaagtagcattcaaaggcgtatagaggtggcaactgtcatgctgtgctccaatttagatggctctgaaaagttaaaacctgttgtcgtgggcaaatatgatagttacaaatcattcaggaattatttccccaatgaaccgaatgatcctgtgtcacaatcaatgttgggtactaagatggctaagaaatttgatatctcataccatagtaacaggaaagcatggctaacgagcaatcttttccacaactggttagtcaggtgggataagaggttggttgctgtgaataggaagatttggattgttttggatgattcttgctgtcatcgaataattaatttgcgccttcaaaatataaatcttgtatacacttcctcaaattcaaagtttttgccatttaactggggtgtctgggatgaattcaaacacgatacagaatacaacagtatcaggcgctcattgacttgcaaaatagaatttcgaagaatatcc

SEQ ID NO: 79548 - DNA, 174 bp, Saccharomyces pastorianus
atgtgtctgaccgcctggaacacgtatggatttcgttgttgcgatagatgggagcccagtagtggacaatctgacggtcaagatactaataattggttcgctcttccttctgttccgggctttgaaaatctttcaaggctggctaatatccaatcgtttttccagagacaataa

SEQ ID NO: 79549 - DNA, 2457 bp, Saccharomyces pastorianus
atgttcagtagccttgaccaggaatttcaaaatgttaatttatttgtttctttgaaaataaaggaaatttccactcgtattctttctgtggaatcatcaataatcgatttttcaaagggcttaaacaaaacttccagaaaccgtttcaaccttcgtaaactgaaaatcatcaacgctcatgtagacgattgtaactttgaactacaactactgtcaaggtttttgataatacaaaggattgccttgagaaagttattcaaaaaattactaaatgaatttcctcaagacagtgaaaatccattgactgcaagtgagtatgttacgtcgatcagaaactctgaaagtttacgaaatggacacgaaggcatatcatttatgaagcttgatttagatccatatcttttagaagtttcgctaattgttgatgttttacatgatttggaaaataaacttgaagatgcaactgagccagcagtggagcaaagatccctaaaccgctccgatgaatctgcccatacaagttcaagtccagaagccaacaattcttccttgccagcatctccaaggtcaattccgctactttcaaacaagaaaacttcaaaaatgattgattcttcgctagaattcgatactgccctcatagatcaagcagagaatctaggaaggtttttattatcgtccgaggacatagagggactgaagttcatgctattgaatattggttttaggataattgacgatagcatcatatccacttcaaaggagattttagacactacagataatattaattctgcgggcaacaaatctataagatcagcaaagtcattcaatgacttacaacataccttatccctatctaaacagaagaacatattaccctctgctgtacaatccaatgagaagtacgtttctattagtatactagatactgtcgggaacgaaggcagtcctttactacttactgatgataatataaatcagcacccaaacatgatagtcagctctactgctgaggatacttgtatagtaatgtgccacgtgggcggcttaagaaatcatgttgtcacaaatgatctgcttctaagggatgtaaagaatattctttcggccatgaggagtggcaacgacacaaaaaatattagcgctctcataaactcactggatccatcgccaatcagtaagatcgctttggagtggattcagtctcatcgattaaaaaccattgaaccaaagctagattttaaaagaacaagattcatatcagcagacaatggagatatatacttgatagctttggatgaatctatcactattggaaatgtatctacattaccctttccaattttagaaattaaaaagcttagtcgatccagtggtctttcacaaacggctattaatgaagacaataagtttaaacagttaatgaaatcagttgttacaaatgagtttcaatgcagcttaataccaccagacttaaccacatggaaaatatgtttagaattagtacactcaaatgaattgcaaaatgatttatttcaacttttactaagagatcaatataaattaaattccgatgattcgctatcacctgatgaatttttccagctgggcaaggatcgtctagaggaagagtttgacctgactgggccgataaacaactcacaaggtagtgttgacagcggcagaagagttcgaattaacaaaaaatcaaagcaatcggataatgaaactaaaaagaaacctattaggtattggaatgaatttgatgaacaagaagaggataatttagacaatgctttttacattgatactaatggaagcaggagtacaacagataacgaagaatccttacttttgagaaattctccgcctgattatgggtttattttgtttagccggaatttcatcaaccgcacatatgatttttgtgagaagttacgaaacttgattcgccatgacaagaaaacatcgccagatttgtttcaaaactctaagcatccgcattgttcatcaactaactatggttctgttgcgtcatttggttcacaatcaacttcagcgtcatatgatgacgttcaaaggtacttacagtatcaacagcaagacatagaggactcacaatctatctacgaatataggcatgacgaagttgttacatttttatacttgtctgcactgctaacatcttgcattatggcaagtgtatgtctgggaatcgttttatccttgtttcgcgggcaaagtaataatgagatagatttagaaattcaaaatattctcatagccattattatcatttccttactggtttcccttattttgatctgtgcgtgcctgttgttgttatttagtcggttcactttggcgccaatctggcattatgttggttgcttcacaatgtttttctcagttactggaacagtgtgctatggtatgattgaaattttcttttaa

SEQ ID NO: 79550 - DNA, 207 bp, Saccharomyces pastorianus
atgaaatttgaagatcgcatattgaataaatcaatccctgaatggaaattctacaatattaactatgagaagttaaaagtagccataaaaaaagtaacggcttatgattatgacaatccaaatgattcgggcatggagaagttgttgaatcaatgttcagtagccttgaccaggaatttcaaaatgttaatttatttgtttctttga

SEQ ID NO: 79551 - DNA, 714 bp, Saccharomyces pastorianus
atgttcttctgttctataagtttcgtccaatcgtgttattatccaccaatcagtatggcgagatccaaaatagtaatgattgtagctgctattattgcggctgatgttggcatggaagttggctttatattatggctgaggcccctttacgagaagggtgttaaatggcccgatctgatttttggtatttctgcatctgttttgttagctgtcggactgcttccaccttactttgaactagccaaaaggaaaggtcgtgttattggcatcaactttgccttcttattcatcgattcattaggtgcttggctatctatcatcagtgttatcctaggtaatatggatattatgggtattatattatactcaatagttgctggaatggagttaggaattttcgcgtctcatttcatatggtggtgtaggtttagattcctagctaaaggcaatacttttgacgaagaaagtggccaagctcaaaaggaagaacccgatgaaaaaatcgaacaagatattagcaagagtgaccaaaatgttactaactataacctggataactgttcaatccccgacgatgcttcgagctttgcagacgattttaatatacacgatagtactgatggggggacgttatcaagagcccaaacattgcatgctgtccatggagttgtggttagaacagatcctgatcgttattcgaggctaagtgtgtaa

SEQ ID NO: 79552 - DNA, 681 bp, Saccharomyces pastorianus
atgatgggtgaaaacggtaccggtaagaccactttgatcaaattactagctggtgctttgaagccagatgaaggacaagatattccaaaattgaatgtttctatgaaaccacaaaaaattgcaccaaagttcccaggtactgtcagacaattgtttttcaagaaaattagaggacaattcctaaatccacagtttcagactgatgtcgttaaacctttaaggattgacgatattattgatcaagaagtccaacatttgtctggtggtgaattacaaagagtcgccatcgtcttggcattgggtatcccagcagacatatacttgattgatgagccatctgcctacttagattccgaacaacgtattatctgttctaaagttatcagaagattcatcttacataataagaaaactgcgtttattgtcgagcacgatttcatcatggctacttatcttgctgataaggtcattgtttttgaaggtattccttccaagaatgctcacgcaagagcccctgaatctttgttgactggttgtaacagatttttgaagaatttgaatgtcaccttcagaagggatccaaactccttcagaccaagaattaataagctagattcccaaatggataaagaacaaaaatcatcaggaaactactttttcttggataacaccggtatttaa

SEQ ID NO: 79553 - DNA, 273 bp, Saccharomyces pastorianus
atggaagcaccgaaagtacgttttttaaccaagatatatcatcccaatattgataggttgggccgtatatgtcttgatgtgcttaaaactaattggtcacccgctttacagatcagaaccgtcctgctgtccattcaagcactgttggctagccctaatcctaatgatccgctagctaatgacgtcgctgaagattggataaagaatgagcaaggtgccaaagctaaggctcgcgaatggacgaaattgtatgcaaagaagaaacccgagtga

SEQ ID NO: 79554 - DNA, 2676 bp, Saccharomyces pastorianus
atggaattcaaaaaatgtactattaacggtgtgtcttatggacgtgcctatacggagccactagcaggcctgaggaagagacaaggtgttgatgtcgaatcggaaggtcgtcgcgaaaaggaagagatagcaaaagatagggaaacaatgatcgacgaattaagatcaatgagtgataatacacagttttgtccggaggatttaacttttgtatctaaggaaattgtggaagacttgaaaggatccagtggcgaccatcaacaaaagtgctgtgaacactttttgctggcgctcgcattatgtcattctgtccttgtggagccaaataaagatgatcctaaaaaactggacatcaaggcccaatcacctgatgagtctgccttagtttccaccgccagacaattagggtacagtttcgttggtagttcaaaaagtggattgatagtagagatccagggtgttcaaaaggagttccaagttctgaacgtacttgaattcaattcgtcgagaaaaaggatgagttgcattatcaagatccctggctctacaccaaacgatgaacctaaagcactgttaatatgtaaaggtgcggattccgttatctattcaagattagatcgcactcaaaacgacgctactttgttggaaaagacggccctccatttggaagaatatgccacagaaggtttaagaacattatgtttggctcaaagagagctcacgtggtccgagtatgaacgttgggttaagacttatgatgtggccgctgcatccgttactaatagggaggaagagttggacaaagttactgacgttattgaacgtgagcttattttgcttggtggtacggccattgaggatcgtttacaagatggtgttcctgattcgattgccctcttggccgaggccggtattaagttatgggtcctaacgggtgataaagtggaaactgccattaacattggtttttcctgcaatgttttgaacaatgatatggaattattggttgtgaaggcttccggcgaagatgtagaagaatttggtagtgaccctattcaagtggttaacaatttggtgacaaaatacttaagggaaaaatttggcatgagtggatccgaggaggagttaaaagaagctaaaagagagcatggtttgccacagggaaattttgctgtcattatcgatggcgatgcgctaaaagttgctttgaatggtgaagaaatgagacgcaagttcttgctactgtgtaagaattgtaaagctgttttgtgttgcagagtttctccagcacaaaaggctgcagtggtcaagttggtaaaaaagaccttagacgttatgaccttggccattggtgatggttcgaatgatgtagccatgattcaatcggcggacgttggtgttggtatcgcgggtgaagaaggcagacaagctgtcatgtgttctgattatgccatcgggcagttcagatatgtgacaagactggtattggtgcatggtaaatggtgttataagagactggcagagatgatcccacagtttttctacaagaacgttatttttacgctatccctgttctggtatggtatttacaataatttcgatgggtcgtatttgtttgagtatacgtacttgacattctacaatcttgcattcacatccgtacctgttattttactagcagtactcgaccaagatgtttccgacaccgtttcgatgctggtgccacagttgtaccgtgtgggtatcctaagaaaagaatggaaccaaaccaaatttctttggtacatgttggatggtgtataccaatctgtgatatgcttctttttcccctatttggcgtaccataaaaacatggttgtaactgaaaatggccttggactagaccaccgttactttgtcggtgtcttcgttacagcaattgcagtcacttcatgtaacttttacgtcttcatggaacagtatagatgggactggttctgtggcctattcatatgtctatcactggccgtgttttacggctggacgggtatatggacaagctcgtcgtcaagtaacgaattttacaagggtgcggcgcgtgtattcgcacaacctgcctattgggcagtacttttcgttggcgtgctgttctgcctactgccaagattcaccattgactgtatcagaaagatattctatccgaaagatatagagatcgttagagaaatgtggttacgcggtgattttgacctctacccacaaggctacgaccctacggaccctagcaggcccagaataaacgaaatacgtccccttacagatttcaaagagcccatttcactggacactcattttgatggcgtcagccactcacaagagaccatagtcacagaggaaataccaatgagtatactcaatggtgagcaaggctcgcgcaaggggtaccgtgtctctaccactctggaacgccgtgaccagctcagccccgttacaacaacgaacaacttgcctagaagatcaatggccagtgcccgcggaaataagctcagaacttcgctggatcgcacaagagaagagatgcttgccaaccaccaactggacacaagatactccgtggaaagagcacgtgcctcgctggatctgccgggtatcaatcatgcagagacgctgctcagccagcgcagcagggaccgttaa

SEQ ID NO: 79555 - DNA, 1779 bp, Saccharomyces pastorianus
atgtcaagtccctccaaacccacttctcccttcgtggatgatattgagcatgaatcgggatcagcatctaatggtctgtcgtccatgtcaccatttgacgatagttttcaatttgaaaaacccagtagtgcgcatggaaatattgaagtagcgaaaaccggcggttctgttttgaagcgacaatctaagccaatgaaagatattagcacacccgatctctcaaaagttacttttgatggaatcgatgattatagtaacgataatgatattaatgatgatgatgaactcaatggtaaaaaaaccgagatacatgaacacgaaaatgaggtggatgatgacctccattcgttccaggcaacacctatgcctaatactggaggctttgaggatgttgagttggataacaatgaaggtagcaacaatgattcccaggcagatcataagttgaaaagagtacgttttggtacaagaagaaataagtcaggtaggatagatataaataggtcaaaaacattgaaatgggccaagaagaacttccacaatgctattgatgaattcagtacaaaagaagacagtctcgaaaattcagccttgcaaaataggtctgatgagttgagaacagtttactataatttacccttgccggaggacatgcttgacgaggacggcttaccgttggcagtttacccgcgtaataaaatcaggactacgaagtatactccattaacattttttcccaagaacattcttttccaatttcataattttgccaatatttactttttaatactgttgattctaggtgcttttcaaatatttggtgtgacaaatccaggttttgcatccgttcccctaattgtcatcgtaattatcactgctattaaggatggtatcgaagattccagaaggactgtattggatttagaagttaataatacaagaacacatatcttaagcggggtgaagaatgaaaatgttgctgttgataacgtttccttatggaggcgtttcaagaaagcgaatacaagggcattgattaaaatttttgagtatttttcagaaaacctcactgctgctggtagagaaaagaagttacagaaaaaaagggaagaattacgaaggaagaggaactcgagaagctctgggctacgtgggtctctggattcaattggtagttacagaatgtctgccgactttggtcgtccctctttggattatgagaacctgaatcaaacaatgtcacaggctaacaggtataacgatggtgaaaatttagttgatcgaacgctacagccaaaccctgaatgtaggtttgccaaggattactggaaaaatgttaaagttggtgatattgttcgtgttcacaataacgatgaaattcctgctgatatgatcttattatcgacatcagatgttgatggcgcttgttatgtggaaaccaaaaatttggatggtgaaacaaatctaaaggtccgtcaatcattaaaatgtagcaagattattaagagttcaagagatattaccaggacgaagttttgggttgaaagtgaaggcccacatgccaacttgtattcttatcaaggtaatttcaaatggcaagatacacaaaatggaaacatcagaaatgagcctgtaaatatcaataacttattattgagaggttgtaccttgagaaacactaagtgggccatgggtatggttatttttactggtgacgataccaagattatgattaacgctggtgtcactcaatgcaaaaatccaaattcagaagattga

SEQ ID NO: 79556 - DNA, 150 bp, Saccharomyces pastorianus
atgcctgcaggtcctggtgacgataccaagattatgataaacgctggtgtcactccaaccaaaaaatccagaatttcaagagagttgattttctgtgattttgaattttgtactattgtttatcctatgtttcactgctggtattgttaa

SEQ ID NO: 79557 - DNA, 753 bp, Saccharomyces pastorianus
atgcctgttattgaaattaacgatcaagagcaatttacttacctaactaccactgcggccggcgacaagttaatcgtgctttatttccataccagttgggcagaaccatgcaaagcattaaagcaggtttttgaggccattagtaatgagccttccaattccaacgtctctttcttatccattgatgcggacgaaaactcggaaatttcagaactttttgaaatctcagctgttccatattttatcataattcacaaagggacaatcttaaaagaattatccggcgcggatccaaaggagtttgtgtctttattagaagactgcaagaactcagtcaattccggatcatcacaaactcatactatggaaaatgcaaacgtaaatgaggggagtcataacgatgaagacgatgacgacgaagaagaggaagaagaaactgaggagcaaataaacgctagattgactaaattggtcaatgccgcgccggtaatgttatttatgaaggggagcccctctgaacctaaatgcgggttttcgagacaacttgtgggtatcttgagagaacatcaagtaagatttggcttctttgatatattaagagacgaatctgttagacaaaacttgaaaaagttttctgaatggccaactttccctcaactttatataaatggggagtttcaaggcggtttagacattatcaaggaatccttggaggaagaccctgattttttgcagcatgctctccaatcttaa

SEQ ID NO: 79558 - DNA, 444 bp, Saccharomyces pastorianus
atgaagggtgactaccaccgttatttagctgaattttccagcggagatgcaagagaaaaggcaaccaactcctctttggaggcttataaaaccgcttccgaaattgccacaactgaattgcctccaactcacccaattcgtttaggtctagctttgaatttctccgtcttctattacgaaattcaaaactctcctgacaaggcttgccacttggccaaacaagcctttgatgatgctattgctgagttagatactttatctgaagaatcatacaaggatagcactttgatcatgcaattattaagggacaacttgaccttatggacctctgatatttctgaatctggtcaagaagatcaacaacaacaacaacagcaacagcaacagcaacaacagcaacaacaagctccagctgaacaaactcaaggtgaaccaaccaaataa

SEQ ID NO: 79559 - DNA, 189 bp, Saccharomyces pastorianus
atgtcccaaactcgtgaagattctgtttacctagctaaattagctgaacaagccgaacgttatgaagaaatggtcgaaaacatgaaggccgttgcttcatcaggtcaagagttatctgtcgaagaacggaatctattgtcggttgcttacaagacgtcatcggtgctcgccgtgcttcatggagaatag

SEQ ID NO: 79560 - DNA, 1212 bp, Saccharomyces pastorianus
atgaggacaatatcacttccacccatgcctattcttcccattataaagaacttttcaaaagatgttggtaatggtaggtacgagacgagtacctttctaggtttaatcaatcctaacaaagttgttgaagttgcaaatgtgcacgataatgatactgtaatcataaggaggggattcaccttaaattcaggagaatgttctaggcagagtactgttgacagtatacaatctgttctaactacgataagctcaattctttccttaaaacgagaaaaacctgataatttggcaataatcttacagattgattttacgaaattgaaggaagaagacagtttaattgttatttataacagcctaaaagctttaaccattaaatttgcgcgtttgcagttttgtttcgttgatcgaaataattatgttctggactatggatcggtattacacaagatagattcactagattccatctcaaatctcaaatcaaagagttcctcgacacaattttcacctatttggctgaaaaatactctatatcccgaaaatattcatgaacatttgggtattgttgctgtatcaaatagtaatatggaagcaaaaaaatccgtactatttcaagattacagatgctttacaagttttggaagaagaaggcccaatgaattgaagattaaggtgggctatttgaacgttgactacagtgataaaattgatgaactagtcgaggccagctcctggacttttgttttagaaactctttgctacagtttcggtctaagttttgatgaagatgatgacgatgacgaagaggataatgatgattcgaccgataatgaacttgataatagttcaggattactgtcggatgctgaatctacaaccactattcatattgactctccatttgataatgaaaatgctaccgcaaatatggtgaatgacagaaaccttctcactgagggtgaacatagcaatatagaaaacttagaaactgtcgcttcttcagtacagccagctctgattcctaatattagattttcacttcattctgaggaggagggtactaatgaaaatgaaaatgaaaatgatatgccagtattattacttagtgatatggataaaggaatcgatggcataaccagacgcagttcattctcgagtcttatagagagcggtaataacaactgtcccctccatatggattatatatag

SEQ ID NO: 79561 - DNA, 1614 bp, Saccharomyces pastorianus
atgatggaaactcctacagacaatatagtttccccttttcacaattttggtagctcgacacaatatagtggtaccttgtcgagaacgcccaaccaaataatagagctagagaagcccagcactctatctccattgtcaagaggaaaaaaatggacggaaaagttagccaggttccaaagaagtagtgctaaaaagaaaagattctcaccttctcctatttcctcctctacattttcgttctcacccaaatctagggtcacttcttcaaactcttctggcaatgaagacggtaatctaatgaatacaccttctacggtttccactgattatttaccacaacaccctcacagaacatcgtctttgccaagacctaattccaatctctttcacgcaagtaatagtaacctatcccgagcaaatgagcctccaagggccgaaaatttatcagataatataccacccaaggtcgctccatttggctatccaatacaaagaacctctattaaaaaatcctttttgaatgcttcttgtacgttatgtgacgagcctatttctaacagaagaaaggaagagaaaattatagagcttgcatgtggccacttaagtcaccaagaatgtcttattatctcttttggcaccacttcaaaggcagacgttcgtgcgctatttcctttttgtaccaaatgtaaaaaagatactaacaaagccgttcaatgcattccagaaaatgatgaactaaaggatattctaatttctgattttttgattcataagattcctgattctgagttatcaatcacacctcagtcccgctttcctccttattcaccactcttgcctccttttggtttatcctatacacctgttgaaagacaaacgatatattctcaagctccaagtctaaacccaaatctcatattggctgcaccccccaaggaaagaaaccaaattccacaaaaaaaatcaaactatacatttttacattcacccctggggcacagaagaattccgtccggagcaaactctatcttagcagacacctctgtagcgttatcagctaatgattctatttctgctgtttccaattcggtaagagcaaaggatgacgaaaccaaaataacgttgccgctgttaaggtcatattttattcaaattcttttgaacaatttccaggaagaattgcaggattggagaatagacggggactatggattactaaggttggtagacaaattgatgatttccaaagatggtcagagatatatacaatgctggtgtttcttatttggagacgcatttgtaatagcagaagtggataacgatgttgatgttttggaaactagactaaagaatttagaagtatttacacctattgccaacttgagaatgactacactcgaagcttcagtactcaaatgcaccttaaataaacaacattgcgccgatttatcagatctttacattgttcagaatataaattctgacgaaagcacaactgtacagaaatggatatctggtatattgaatcaggattttgtattcaatgaggacaatatcacttccacccatgcctattcttcccattataaagaacttttcaaaagatgttggtaa

SEQ ID NO: 79562 - DNA, 768 bp, Saccharomyces pastorianus
atgctaaatggagaagaggaaacaaaaattggtgagaatacattgcgctggatcgtagaacatgggcgtgcagatgagcaaacctttaatgcaaatggaatatcattaagtaggccgttaattcaaaagggacctttatatcaaaagccgcacaagcattctgttttctcgaagtactacgtcgttttgatatcaggttttattgtactgttccactgctttcatagatcaaccacaggttttgctaaggaagttttggagtatgctcattatgtaaccattccgattgacgattgctacctatactctgggaccacaacagaactagaccttctgcagagagatcgtacttttgacgaaataaactatggatcccacgctctcccacgagtttatggggacggatggcgatctgtagaagacgagagttcgcgatgctttacgctttggtttggaacaaggcgtgccctttctagcaatcgcttacagaagaaagggaatgaaaagcaatatacgcaagattatggtagacaagataataatattgacccaccttctgctccggaagctgacttgaataacactaatgttccaagtaacacagataagatccatttcactaaaaagttaggtgtgagcggcaagtcaatggttttcatggcaagatcaagacaggaaagagatctttgggtaatgtctatttactatgaacttgaaagactaagaagaactgcgtccacttcaaattcacggaatcaagctatgtaa

SEQ ID NO: 79563 - DNA, 2940 bp, Saccharomyces pastorianus
atggattctatcgttaatgttgttgaagacgatgttaagtacgcgcagagagtgactagcttcagctcaccacaaaatgcaaatgtcaaggtcttcaccattccccggcattccttcacagcgtttagactgtcgtatgtttcacctacagagctttcagcatgttcacaggtgactttgctaggtggtattccaaaacaatggtacgctgatcaaaataatcaagtctggaaacttctaactaaaatttcacttcggaaggttaggaagcaatctgacatgctaagaagatatggctatggaacaatttacaaaaagcgtgtagggaagatcccaactgcattgtacttaagaaagcactttacatggtcctatgaagataatacatcaattcacaacggtcatcgtcttaaagaagcggaaatggagatgaggagaactaggtcaagtcctgcgcagaaaagtgaatataaattaagtctacccagaaggtgtaggagttcttccgatcaaaatttcatgcgacaagagcttttgaaagaaaaaaaatcagagctttctagcaacaatagtttgcctctcatcgatacggcgcaagccgtggatatccacccagttttacatgaagaagatcaagaaaatacaaataaaaggaataaatcactcctttcgaatttgaaacgaaaagatctaggggaatcaaaaagcatatccagaaaagattattcgcattttgatagaataccgagcccctcttcagccagaagtgttggagaaacagactttaattataatagagaaccttctgaagatactttgagatatcccgacagtataattgaagtaacaaatcggacaagccccgccccaaatagtattctaagtagatcaggacaatttgttaactcgaatgacctaagtgatggcttttcaacatctaatactatcaataacgtgggattaaatgcaaatgaaaagattttttttaatgctctgcaaagtatggaaaaggaaaacttgatgctgtggaaaacatcccagaaatatgggacttatctcgatgaaagacgtaaaagtgcggatgcctttcaaaaaagagaaagaggttcatgcgtggacattggtaagttgcattcgagtcatcttccgtttattaatatcctacctccatggcctaccgaactgacggaggaagagagaattatacacgataggctagcctctaaacattctcatcatataagaaaacatgttcacaatgctcgaaacaaaactagctgcaaaatcaaagatagtgttggaactttcttaggtatgacaaattcactaacaaataaagcaactgtcaagaaacgcaccggtcagatccttaaaaaagaaaaaatgctagtgatggtaaaagaagctatacaaaataaagtaccacttcccaacttctctgaaaacgagtgctttgatacaagggtcagtgaacggtggaaagaatatattgttattgcaagatccacgggaagattcgatcccccaatacttttacagttctatcgtcatcgtcatatcccagaaatcgaagatatcagttccatagctacaaagtatcaccgcaacccgttggatttttttctttcaagaaattgtattgtaaaattctacagctctctagacaaaactatatccatacaaaagcctgataagcggttaggtgggtttatagacgagagtattgaaaagaaggacgaattaaaacactattcccccattaaaatttttattttaagatgcagcagtattcgctcgtctggtagatggtacaaatttctactagaatctttggaccgacaactatttacacctgccatcaacttgaaaattccattaactgagatctcgataaaaataaacttgaatgaaattatattccaaaagctaatagatttagggaagcaggaaaaagatagattaaaaatatgttttcttcaaagaggttataaaattttccagcatcccattttacgatatttcacagttgctattttggagaaattaaaattggcgcattatgactatctgattaggaaatgggatacagaaaatcctgtactaggatgtgccctgaaaagatatgatagattggagtggatcccatgtgatgaagattctctggtaactggaatttttgcattttgtcaatctcacctaatccagtacaggccaattgcgaatcgtttaagggaaacaaaatctttagaaggaaaatgtctgaaagaaccaacacctattgaaggttttttaataagattgactgacaagtatggctctgcgaggacaaattttggtaaatatagtatttcaacagcttacttcttcacgtgtgagaatttgcttttttcgatgaaagcatatagagcaaacccaccattgcctatagattcgatgattgacgacactagcacagaaatagaaaaagaagaaatttggaaacagtggaagaaaattccagaggtttacgagcaacaaccttatcccttagacgcaaatgatcacatcgagtggatgaactgtcaaacgacccaaagtgaatatgattccagagatttctatgctttccattgttttcatagaaggattgatcaaatactaaaaacggacaatgtgattgacctaactgaggtgaaagatatatatcaaggaacaaggactgattacgaagcagacaaaataaaatatggggtttacaaggaagctagtgaaatcttttggcatagaaactacgagattgatgatgtttcacggtccgtaataaatatagaaacctcaaatggactcctcttgaagctgcttgctacatcagcaacagttgctgaagagtgggtcataaagctgaaacaaatgatatcctattggaaaacaagcaaagggaagatacggagaggcttttaa

SEQ ID NO: 79564 - DNA, 381 bp, Saccharomyces pastorianus
atgccaatattttttgacgaagaatacaactctaaaaattgtgaagtagatgaaaccccggtaataaatcttgtcaaaaatattgtagagtcacttccgatcgacttgagaaggccactgagagaaaatatcattatagtaaacattgaagaggcgtatgaaacagcaataaggaatttattcaagttaaaaatggatacgtccaaaatccagtttcctaaaaattactggcaggctggttctgcatgcgcgaaaatacttctgcactataaggggagcaacattgtaggaatagaaagagacgagttttataacaatcctcatattgctcctgattggtttgattattacttcagaactggagtgaagcgcttacaataa

SEQ ID NO: 79565 - DNA, 204 bp, Saccharomyces pastorianus
atgtcgaataatattgtgatagtttatttgggagctaacagaatcgaaattggaagaagtgctgatgcgtgtccacaagaaattatcgcctggaaaacaggtagtattaatgaaaaaaatagggaagaattgaataaaatatttgaacattacttccaaatttgcaacatcttgggaaatcgagaagtacaagtgttatactag

SEQ ID NO: 79566 - DNA, 1647 bp, Saccharomyces pastorianus
atgttattcaattaccattctttagaggtattcttagataattatttgaaattggttgcagcaaatactgatgaaatggttcctcataatcttcttaagaagtccatttatcatagtttcttttcactagcaatttcatccacaaataacttatcgccctatgaaacttttaatcaccctattctttccttgattgctttagatatatcaaatggcgaagtttatgaggatgcaagagaccttttagtcaatttcaagaatcttaatcataatactgaaaactttcctatcttcatgaatacaaatgaaatgcttccagttttcttactctgctacaatgacgattcccaagaagaattcgaaaaatgccaggcgttagctaagaaactaaagaagcagttgtttattgagagtatcctgctagcactctggaaggattcttttatttacgacgaaaattcagtcatacagttacaccaaccagtaatgtcatcgcttgaagaaattctcttcttccttcaagctccaactcaaacaacactctctctggctttgataaactcgatctatgatatgcttgattatttggtttatgatttaatgataccattcatgaaaagaaaagtgtcattttgggaagagacaattttacagccaagaaagtcgctatttaatggtgcaaagtttttcaaaaaatttatgaataaaaatcctgtcaatggtaatcaccaacataattctctaacgagagacagccagggaaatgaatacttcgcatcgtcatcttctgagtttttgatgagaaagttagcagattggtctatgatgctatccgacttcaaaactgcttattccacatacgaatcgcttatggatgacctagatgcatttccaaagtacctggcatcatgcatcgaatggtgcgcggtatcactattgatgggtgcgcagagcatagtcaccgtgaaaatgatcaaaaacgatataaatcctcttatcgaaagggcattagccacatacgaaaactgctcacaaatacaacgtggtaaaggcaaagaatcaaactctttggatgttacagagccagtgcgttcgtatgagacacgttgtatgattttggcatctgaattatttttatctttaagcgatacgtggacatctaccccatacgctatccaatatttagaaacaattctagacgagtgcaagttgggaccttgttcacagataatggtttgggaaaggcttagtgactgctataatttgagagttgaccctagaatcaaacatagagttggagcaatgaagaaggacgcaaaagacaccgaagatctccgaggtgagcataagtatagcacagatcatttcacagacgaggacatattatcggaagggttaacaagaagacgcaaggcagctttttttaggttaatagcagctaagaagtgggcagagcaaaaacaatggagacaggtttcttggtgcttaaaagatattgaaagtacctattcagagatcgaatttttgcatggtaacggtttaattttaagcaagctaaaaaatcaactcaatttaaaggacgtggattctgcaccacggccctccgaaaagaatcttacaagaacaagtgttagctttattggatga

SEQ ID NO: 79567 - DNA, 156 bp, Saccharomyces pastorianus
atgactacaacagaaaaagagcccatcaaattcgaaattcatatcgtcaaggttcgtattgttggtttagccggtgtgcattttaagaaaatttctgggaacacttggttgtataaagagctggcttctagtatattaaaagaactaaagttataa

SEQ ID NO: 79568 - DNA, 2820 bp, Saccharomyces pastorianus
atggatgattatcacgtaaatactgccttctcaatgggcagaggtaaccagcaggatgatggcaatagtgaaagcaacagcatgcatacacaaccaagcactagggcgcccgctacgctgagaatgatgggaaaaagtccacagcagcagcagcagcagaacacaccgctaatgcccccggcggatatcaaatacaccaataatggtaactcacatcaagcagggcaaaaggagagacaagtagaacttgaaggtaaatcgagagagaatgcaccaaagccaaatactaccagccagagtcgagtttcgtcttctcagggcatgcctaagcagtttcatcgaaaatcgttaggagattgggagtttgttgaaacagttggtgcaggttctatgggtaaagtgaagctggcaaaacatcgttacactaatgaggtttgtgcagtaaaaattgtaaaccgtgctacaaaggctttcctacataaagaacaaatgctgccaccacccaaaaatgaacaagatgttttggagagacagaagaaattagagaaggaaatatctagggacaaaagaactattcgagaagcgtccttgggacaaatcttatatcatccacacatatgtagactttttgagatgtgcacgttgtcaaatcatttctatatgttgtttgaatatgtttcaggtggtcagctattagactatatcatccaacatgggtcaatacgagaacaccaagcgagaaagtttgctaggggtatcgcgagcgccttaatatatttgcattctaacaacatcgtccatagagatttgaagatagaaaatataatgatttcagattccagtgaaatcaagataattgattttggactttcaaatctttatgattctaggaagcagcttcatacattctgtggctctctatattttgccgctcccgagctgttaaaagcgaatccttatacaggacctgaagtagatgtctggtcatttggtgtagttttatttgttttggtatgcggtaaagtgccatttgacgacgaaaattcgagcgttttacatgaaaagatcaagcaaggtaaggttgaatatccccaacatttatccatcgaagtaatatcactgttatccaaaatgttggtagtagatccgaaaagaagagccacacttaaacaggttgtggagcaccactggatggtaagagggttcaatggtccccctccttcttacttaccgaaaagagttcccctaactatcgaaatgcttgatataaatgtcttaaaagaaatgtaccgtttagaatttattgacgatgtagaggaaacaagaagtgttttggtcagtataatcacagatcctacttacgttcttctctctagacaatactggactttagcggccaaaatgaacgcagaatccagtgataacggaaacgcgccaaacataacagagagttttgaagacccaactcgggcatatcatccaatgatttccatatattacttgacttctgagatgcttgataggaaacatgcgaaaattcggaatcaacaacagcgacagagccacgaaaatatagaaaagctttctgaaataccggaaagtgtgaagcaaagggacgtagaggtcaatacaaccgctatgaaatcagagccagaagccacgttggcgacaaaagatacctctgtgccattcactccaaagaatagcgatggcacagagccccccttacatgtcttaattccaccgaggttagcaatgccagaacaagcgcatacgtcaccaacgagtagaaaaagttctgataatcaacgccgtgaaatggaatatgctctctctccaactcctcagggaaatgactatcaacaatttagggtaccttcaactactggcgatccctcagaaaaggcgaagtttgggaatatatttagaaaattatcacagcgccgtaaaaagaccattgaacagacatctgttaatagtaataatagtatcaataaacctgtgcaaaagacgcattctcgcgctgtttcagactttgtccctggttttgctaaaccgagttatgattcaaattataccatgaatgagcctgtcaagacaaacgatagcagaggtggcaataaaggtgactttccagcattgcctgcggatgcagaaaatatggtagagaagcaaagggagaagcaaattgaagaagatataatgaaattgcatgatattaataaacagaataatgaagttgcaaaaggaagcgggcgggaagcttacgctgcacagaagtttgaaggaagcgacgacgacgagaatcatcccttaccacctctcaatgttgcaaaaggtcgaaaactacatccaagcgcaagagctaaatcagttggtcatgctcgtcgtgaatcactcaaatatatgagacccccagtgccttcatctgcctatcctcagcaagagcttatagatactgggttcttagaatcaagtgacgataacaaatccgatagtttgggaaatgttacttcacagacgaatgatagcgtcagcgtgcattctgtgaacgcacacataaactcgccatctgtggagaaggaattaacagatgaagagatattgcaggaagcttctagagctccagccggttctatgccatccatcgatttcccccgttctttatttttgaagggtttcttttctgttcagacaacttcatcgaagcctttgccaattgttagatacaagattatgtttgtactgaggaaaatgaatatagacgtcaaggaggtaaagggtggtatagtaagtatgcaaaggttctcttccaaataa

SEQ ID NO: 79569 - DNA, 996 bp, Saccharomyces pastorianus
atgacttttaaaggtagcatttctcgtgttgtgaataatgttttaacacctgtgacatcagatttattgcctaactccgctgcccctggccaattgacagtagcacaaattaacaagatgtatacatctatgggaggtatcgagcctaaggaactgtttgttgttggaaagccaattggccactctagatcgccaattttacataacactggctatgaaattttaggtttacctcacaagttcgataaatttgaaactggatccgcacaattggtgaaagaaaaacttttggacggaaacaagaactttggcggtgctgcagtcacaattcctctgaaattagatataatgcagtacatggatgaattgactgatgctgctaaagttattggtgctgtaaacacagttataccattgggtaacaagaagtttaagggtgataataccgactggttaggtatccgtaatgccttaattaacaatggcgttcccgaatatgttggtcataccgctggtttggttatcggtgcaggtggcacttctagagccgccctttacgccttgcacagtttaggttgcaaaaagatcttcataatcaacaggacaacttcgaaattgaagccattaatagagtcacttccatctgaattcaacattattggaatagagtccactaaatctatagaagagattaaggaacacgttggcgttgctgtcagctgtgtaccagccgacaaaccattagatgacgaacttttaagtaagctggagagattccttgtgaaaggtgcccatgctgcttttgtaccaaccttattggaagccgcatacaaaccaagcgttactcccgttatgacaatttcacaagacaaatatcaatggcacgttgtccctggatcacaaatgttagtacaccaaggtgtagctcagtttgaaaagtggacaggattcaaggcccctttcaaggccatttttgatgccgttacgaaagagtag

SEQ ID NO: 79570 - DNA, 3642 bp, Saccharomyces pastorianus
atggtgcagttagccaaagtcccaattctaggaaatgatattatccacgttgggtataacattcatgaccatttggttgaaaccataattaaacattgtccttcttcgacatacgttatttgcaatgatacgaacttgagtaaagttccatactaccagcaattagtcctggaattcaaggcttctttgccagaaggctctcgtttacttacttatgttgttaaaccaggtgagacaagtaaaagtagagaaaccaaagcgcagctagaagattatcttttagtggaaggatgtactcgtgatacggttatggtagcgatcggtggtggtgttattggtgacatgattgggttcgttgcatctacatttatgagaggtgttcgtgttgtccaagtaccaacatccttattggcaatggtcgattcctccattggtggtaaaactgctattgacactcctctaggtaaaaactttattggtgcattttggcaaccaaaatttgtccttgtagatattaaatggctagaaacgttagccaagagagagtttatcaatgggatggcagaagttatcaagactgcttgtatttggaacgctgacgaatttactagattagaatcaaacgcttcgttgttcttaaatgttgttaatggggcaaaaaatgtcaaggttaccaatcaattgacaaacgagattgacgagatatcgaatacagatattgaagctatgttggatcatacatataagttagttcttgagagtattaaggtcaaagcggaagttgtctcttcggatgaacgtgaatccagtctaagaaaccttttgaacttcggacattctattggtcatgcttatgaagctatactaaccccacaagcattacatggtgaatgtgtgtccattggtatggttaaagaggcggaattatcccgttatttcggtattctctcccctacccaagttgcacgtctatccaagattttggttgcctacgggttgcctgtttcgcctgatgagaaatggtttaaagagctaaccttacataagaaaacaccattggatatcttattgaagaaaatgagtattgacaagaaaaacgagggttccaaaaagaaggtggtcattttagaaagtattggtaagtgctatggtgactccgctcaatttgttagcgatgaagacctgagatttattctaacagatgaaaccctcgtttaccccttcaaggacatccctgctgatcaacagaaagttgttatcccccctggttctaagtccatctccaatcgtgctttaattcttgctgccctcggtgaaggtcaatgtaaaatcaagaacttattacattctgatgatactaaacatatgttaaccgctgttcatgaattgaaaggtgctacgatatcatgggaagataatggtgagacggtagtggtggaaggacatggtggttccacattgtcagcttgtgctgaccccttatatctaggtaatgcaggtactgcatctagatttttgacttccttggctgccttggtcaattctactccaagccaaaagtatatcgttttaactggtaacgcaagaatgcaacaaagaccaattgctcctttggtcgattctttgcgtgctaatggtactaaaattgagtacttgaataatgaaggttccctgccaatcaaagtttatactgattcggtattcaaaggtggtagaattgaattagctgctacagtttcttctcagtacgtatcctctatcttgatgtgtgccccatacgctgaagaacctgtaactttggctcttgttggtggtaagccaatctctaaattgtacgtcgatatgacaataaaaatgatggaaaaattcggtatcaatgttgaaacttctactacagaaccttacacttattatattccaaagggacattatattaacccatcagaatacgtcattgaaagtgatgcctcaagtgctacatacccattggccttcgccgcaatgactggtactaccgtaacggttccaaacattggttttgagtcgttacaaggtgatgccagatttgcaagagatgtcttgaaacctatgggttgtaaaataactcaaacggcaacttcaactactgtttcgggtcctcctgtaggtactttaaagccattaaaacatgttgatatggagccaatgactgatgcgttcttaactgcatgtgttgttgccgctatttcgcacgacagtgatccaaattctgcaaatacaaccaccattgaaggtattgcaaaccagcgtgtcaaagagtgtaacagaattttggccatggctacagagctcgccaaatttggcgtcaaaactacagaattaccagatggtattcaagtccatggtttaaactcgataaaagatttgaaggttccttccgactcttctggacctgtcggtgtatgcacatatgatgatcatcgtgtggccatgagtttctcgcttcttgcaggaatggtaaattctcaaaatgaacgtgacgaagttgctaatcctgtaagaatacttgaaagacattgtactggtaaaacctggcctggctggtgggatgtgttacattccgaactaggtgccaaattagatggtgcagaacctttagagtgcacatccaaaaagaactcaaagaaaagcgttgtcattattggcatgagagcagctggcaaaactactataagtaaatggtgcgcatccgctctgggttacaaattagttgacctagacgagctgtttgagcaacagcataacaatcaaagtgttaaacaatttgttgtggagaacggttgggagaagttccgtgaggaagaaacaagaattttcaaggaagttattcaaaattacggcgatgatggatatgttttctcaacaggtggcggtattgttgaaagcgctgagtctagaaaagccttaaaagattttgcctcatcaggtggatacgttttacacttacatagggatattgaggagacaattgtctttttacaaagtgatccttcaagacctgcctatgtggaagaaattcgtgaagtttggaacagaagggaggggtggtataaagaatgctcaaatttctctttctttgctcctcattgctccgcagaagctgagttccaagctctaagaagatcgtttagtaagtacattgcaaccattacaggtgtcagagaaatagaaattccaagcggaagatctgcctttgtgtgtttaacctttgatgacttaactgaacaaactgagaatttgactccaatctgttatggttgtgaggctgtagaggtcagagtagaccatttggctaattactctgctgatttcgtgagtaaacagttatctatattgcgtaaagccactgacagtattcctatcatttttactgtgcgaaccatgaagcaaggtggcaactttcctgatgaagagttcaaaaccttgagagagctacacgatattgccttgaagaatggtgttgaattccttgacttagaactaactttacctactgatatccaatatgaggttattaacaaaaggggcaacaccaagatcattggttcccatcatgacttccaaggattatactcctgggacgacgctgaatgggaaaacaga

SEQ ID NO: 79571 - DNA, 1938 bp, Saccharomyces pastorianus
atgagtaagagacaagaaatactttccaatttagcaacaattggtcaaaagtatactgactcaaatctttactgcctggagccatgtatacgatttgttttaggtgagaaggttagcctggaggacatcgaagaagggcaagaacccttattaaattttgatattgcagatcacatagattttgaagaattatcgtcactggatagttcatattccgattctcaaaacccggaaaacctttcttcgcaatcagatacagagtcatacaaggaagcactggtattcccagatacttcgaatcaaggtttggattttggaagaaatttagctcttgatacgacacctgttccaaatgggtgtggatcttgttggactgcaacaggtgaactcttctgcttctttgcaaatgagaaaaaacccgagaaaaagcaaaatgcaataattaaactctctcaaaaagaagcaggggtagagaagcatccttttaaaattgagcctcaagttttatatgataaggaagttgacagcagtgtaatcaccgctgctgatgaattgaaagctcgccctaagcggtacgtggacaccttggggctgggaggcggtactaatggggattcaagaacatactttgacgacgagacatcttccgacgattcatttgatagtgtcgcggacgattgggacgatatattgagaaatgatataatagtgagaacaaaaattccaatactaagaggtaattttaaagctttcagctcagtacattcggaatccgggaaaacagtagaatctaccaaaaaaaataagaatttagtgatttccaaaaatttcagcagtttattaagcgaccgcaaagaactagcattagaatacttatttatggatgccacaccggaaggatttgctagaaataacgctttggtggcagaaaagtttgaccttgatgaaattagtcattgttggcaaatattatgtgatatgttgatagaccaaagtgattacgatccttatactactatatggaataaccatcccatggggataaagtggttcataaaggaagcgattgtctactttgagaggcaacaaaatttacagatgctggccatgttatgctgtgtcatattaagcgccaggagaaaaaagattccagccggatattatgggcaagaattagagaatatggaaggaaccattgtgtttaatgacaacgaaagtcaaaacacatcattttggaaaggatctgatgctttttccaccaggtctaggagtagcactgttacaccaaatttttatggtaatcatttgagaggaaaaaacattcatggaggagacaactcctcaataaggtccgacgaccaccacgctaggttaaggacgcacaacactcttaatggtagtagtaaatttacggagccggcccaaaagcagggcagccgtgccatttcatccagcccttttcatagtagaatgcctgacatcaaagtcgagcttttacatgacgatattatagaagcttatgaacaagaagacctcttacatttagaggtatcagacataccaaagttccaaacttatatttatcaatattcaaagttactttttagatggggactgcctttagaaagggtcaaaattctaaaagttagtactgatttcagaagttcttatagttcccaaggcatcccccctaacaataacaagaaaagtccttacaatggtgtacttacgcactggatcgagaacaacgagtttggagaagaaaaattcctagcccgaaattgtaattactgtgatttaagagtgacaagaagtagcttcatatgtggaaattgtcaacatgttttacactcttcatgcgcgaggttatggtgggagattggtgatgagtgcccatctggatgtgggtgcaattgtccggaaatgttcgatgcctaa

SEQ ID NO: 79572 - DNA, 1431 bp, Saccharomyces pastorianus
atgtgcagtagtataaatgaaggtccgtataattcgcccacttttggaaaatcattatcgttgaaagtagatggtgggttcaatgccgtatctatcaatccctctggtagggatattgttttggccagtcggcaaggtctttatattatcgacctggatgatccgtttacacctccaaggtggttgcatcatattacgccctggcaagttgctgatgtacaatggtcgccacatcccgcaaaaccatattggatagtctcgacatcgaatcaaaaggcaatcatatggaacttagcaaaaccttcatcaaatgccattgagtttgtacttcatgggcactcaagagcaattacagatataaacttcaatccgcaacatccggatgttttagctacctgttcagtcgatacgtatgtacatgcttgggatatgagaagtccacatagaccattttattcgacaagttcatggagatctgctgcttctcaagtgaagtggaattacaaggatcctaacgtcttggcatcttcacatggaaatgatatatttgtgtgggatttgagaaaaggctccactcccctttgttctttgaaaggccatgtaagctccgtaaatagcatagattttaaccggttcaaatattctgaaattatgtcgagttcgaacgatgggacggtgaagttttgggattattcaaaaagtacgacagaatcaaagagaactgtaacaacaaattttccaatctggagaggacgttaccttccttttggagaaggttattgtattatgccaatggttggaggcaataacgcagtttatctggttaatctatgcgacgatgatgacagtgaacaaaataagaagacgaaactccagccaatatatgcatttaaagggcatagtgaccgagtaattgactttctttggagatcaagacatacgtgcgatggggattacgacgatcgtgaatttcaattggttacttggtccaaagactgcgatttaaaactatggccaatttctgatagtatttatgggaaagttaactttgacagaggcaagagacttgaggagaaactaccagattatgattattgctcatacaataaggaacctgaaaatagggaaaatgttcaaaagaatgagtttaggcgtttacgagaaaactttgtgacaacttctggattgaagaaaaacaagacaaaccacataacatggctctcaggaattagaatgaatagcgcaacttcacaagaggatttattcaatgagacaaaaatccaaaatttaggagaggaagtaagcgccattggtcacaagttcccaaaagtcgtttttgaaaagatatccgtgtccacaagggaattgtgcctgacgctaatggcccctggtcagaggaaaatcctgatgattatatattcttacgaataa

SEQ ID NO: 79573 - DNA, 579 bp, Saccharomyces pastorianus
atgcccggtgctgttgattttaaacatgtcaacaaaagaccggcctcgggtgcagagatatccagattcaaagccttagaaaacaccaactatgcagttgacttgggcagagccaaaggattttctttggttggtatcgaaggatctgatattgtagatggtaacaaattactgaccttagggttagtgtggcaattgatgcgtagaaatatttcgataaccatgaagacattatcctcaagtggtagagacatgagtgattctcaaatattaaagtgggcccaagaccaggtaactaaaggtggtaaaaactctaccattagatcatttaaggaccaagctttatcaaacgcccacttcttattggatgttctgaatggtatcgcgccgggctatgttgattatgatctagtcacccctggtaacactgaggaagaaaggtacgcaaacgcaagattggctatttctattgctagaaagttgggtgctttgatttggttggtgccagaagatatcaacgaagttcgtgcaagattaattattacttttatcgcttcgttaatgactttgaacaaatga

SEQ ID NO: 79574 - DNA, 144 bp, Saccharomyces pastorianus
gtcgttgttaatgttcattccgaggacattattgaaggtagagagcatttgatcctgggtttgatttggcaaattattaggagaggtttgttaagtaaaattgatattaagctgcatcctgagttatacctgtctacttggtag

SEQ ID NO: 79575 - DNA, 72 bp, Saccharomyces pastorianus
atgctgatagctattaaagccatagcatttaacggaactaaggaatactacaagggatatgaatatctgtag

SEQ ID NO: 79576 - DNA, 774 bp, Saccharomyces pastorianus
atgggggtacagttcggaaaggatgaggattcttcggatcctgaacccaacgactcacacttttcgaacgaaatggtgacgtctgcagagtctagcctgagaagcgatgctgtaactaagaggagaaaaagttattcggtacgcgataacatttctaacctcgagcaaaagatgtggaacgattgttctctcgttaagtcagatgagaattctaatcttctacctcagctaattaatttacagaacgcatatcaaattaacagaaataatgagactatggcaaaagtatccttatcagcacctttttataagacaactgatgatataaatttagtcattgaattagatccgataacgacgcctttacttaaagtgacttcgttgactgtatccttagaatcgtttgaaattataaatccaaaatataagactgaaggaaaaggaatagggagcaaaccaaaaggaaactcggtgtatgagaaacattttatttgtttcgatgagtgcaagtccgtatcggtgaaattacttcctccaagatcgcctacaaaccagattaccggacaattcaagacagatgtttttcaacataagtggatgataggactaaaatttgtaataattgcaaagacagaaagtatcactttggatcaattttatgaggataaaaagggcatcctattccattcaaaagagaatttagaaggtgaagagtttacatgttacgttcccattccaatactgtgtacatccgaagatttcatgggatggtaa

SEQ ID NO: 79577 - DNA, 1392 bp, Saccharomyces pastorianus
atgttaaaaagattaagcggggaatcgattattgcatttttgtttaactacgtggattctgtagaaaactctgcaatggaggagttttatggggatttcctgctatttttcagagaagtagcaaccaattataacctttattctgatgtttcgttgtctatattaaaacttgttgcccttatttctggaaaagtaagtaaaacgcagtttggagaacaaaaacgagttaggagggagatatctgatgtgtttttcaaatacctacctaatgcatttataaactttacgaacttatatcgtggccaccctgattcatttaaagatttagaatttgtagtatggcgtgttcaatatatcgtcaacgatcaaattggaggagacaagtttaatacaacgttagcgacaattgtaaatcaatgcctaaccccttatatcaaacccaaaagtgaaaaaactattccaggttatgtcttagaattggccgcggtcgtatcccatttaggttcaaaagttaaaagttggaggcttttaattgcggaattgttccaaaatgacaaaaaactttcggtaattggcagcgatcaaacttgggaaaagattatttacgaatggtccatttatccagaaaataagtcaaaaatcttgaacgatttactattagaaattggctccaagcgttcaagtgtgactccgactttaatcacgtttaacttaggaagcgattctgaagtcgagtacaagtgccaaaaccttttgaaaatatcgtacttgttgatggtatcgccaaatgacgcatatttgttgcacttttcctctttaataagttgcattttccactatttggtgtccaaagatatcaagctcaagggaagctgctggatcttactaagggttttacttttaagattttcagagtcccatttcaatgactactggtctatgatcagttactgtttacaaactaatttgcaagaattttatgaatcacttcaaatacagtcagaagtcgatccacaaacaatattgcaagtatgtaaaactttggatttgctactcttactcaacatggaaggcttcacctctacgaatgagtggatctttgttattgatacaataaattgcgtatataaaacgaactcattcgtcgcgctggtagatgaaatcgcagaattcaaagattacgaaataaccaaaactgatgatcttgaattaccgacaactttaaaagatggtctcccattattacgaggcattcacaaaatcgagagacacacgcaactaagaagcttcttccagaatttgagttatctacattatgagaaagtttacggactagggtcagttgatttatatggttgtggtgaagatctcaaaaaagatattctgtcatga

SEQ ID NO: 79578 - DNA, 510 bp, Saccharomyces pastorianus
  modified_base (489)..(489): a, c, g, t, unknown, or other
atgctcacatatgagttccaaatgcttgcttatgttttgaaaacaaacaatggacgcactaggaaagttttttccactgagcttacctcaataaaatcttcgaccatatggaagaatgaagacgtttccacatataaaagtttgctgttggttacattgatgagatttctaaatataaagagcaatacacatgcgaaaagtatcaggagtgctctgattcttttggatatcttactcgatggaactgagcaaaatttcaaggacattgtcatatttttgctgcaaatgtcgtctaaatatattgcagaagaaggaattgagcccgagttaatagcagtttccttgttagatattgtatcgaaggttctcagactatcacacgatagtggtattaaactagacatttttgatgacaatgctgcccatttaaaatatatcgatttccttgtaccagcgtttcaaatatgggatcctctagagtgcctgcanggcatgcagctgcactgccgt

SEQ ID NO: 79579 - DNA, 1539 bp, Saccharomyces pastorianus
atgactgcaaataaaggcagaagactgggcggactcacgtggttgactagaaagtttccgtcgttgaatgctgtacctcatctagtaaataaaataaaaatggaagcggaagagaacccaagtgaaactgaaaccaacgattctcatctagacaggaaaaaaagaaaagaagaagctttcaaggtcttattgcctgctgccaaagatttagtaacccctgaaccaggtctacttatccgatgccttgtcggttgtttagaagatgaaaatgatattcttattaaaaggagcgttttggaccttttattacagaggttgaggctagactctcctgttttgaatgttcttattacttctgaggataaaaagttattgataatgagttgttgtagaactactttgagcaaggatatgtctttgaacagaagaatatggaactggcttctcggtcctactgctgggggcatgctaaacaataacggcgggaactccatggaatatactacctcggttaagtcagcaaacgaggaaagtaatgtatattttacaaaatatggattaagcgcccttttagaaggtttaagcgaccttctttcagaagaagaatccgtgttaactgcattcaggataagtatggcagtaatggatagatgggaaattggctcacttgtaattcctgaattgttcatcccacttctctattcctcggaaaaattcaaacaaaacgaacaaataatgaaaacggcacgtactttctttgacaatactgaaacaaatattatatggggaaagctatttcaagaacttgaagacatcaaaaacctaaaaattttggatttcgtattaacaaattttaatattggaaacgacgaagagattatcgtacgccaccttcctttgatattattaactttactggcccttccatctaatgataaagatttcgacaatatttataagctccaaaaattttctttgtacaacaaattgttaaactatatccccgagagagcccttctccctctcagtcactcaaaactaaagcacgatgatgaagtaagctgcgaagaacttttggccaaaatacgtgggttttataccaatgtttctaatccatctagcattttagagaaagaaaatatagctgagcgtttgccaccctttacaacagaagatctaacttttttaatagcagacctgattcagaagaagcttctttcaagtttatgggacttggaaaatatcaatgaaagctccaaattatttatagctattttcgaaaagatacctgagtctgaagaacttaaaggacgatctcacataagctggtcggataaaaaaataactcagagcatatttgaggctattcccaggctttgtgaatctaataatgatgcaaaatcagaagaaatcgttggaattgtggaaatttttggtaactacttatattcacgcatggaattcattgaatcgatgaaattattgaaagtagtcatgatggccgtatggataatctttaaaagatccacgccatcaaat

SEQ ID NO: 79580 - DNA, 492 bp, Saccharomyces pastorianus
atgtccttaccactaaagccccttacaattgactcaaataataaacaactagactccaaacagaagaagtttcgtgctaatgtcgagcgagcattagaaagatttgactctgtaacagaatgggcggactatattgctagtttgggaacactattaaaggcgttgcaaagctggtcacctaaatttcagaatgtaaggtactatgttccttctccatatcaagtaagtcgaagattgacatcctcattatcgccggcgttaccagcaggtgttcatcagaaaactttagaagtatatacgtatatctttgaacatattggccttgaaactctggctacagaatgtaacatttggatcccgggaattttacctttgatgacttatgcctctatgtctgttaggtcacatttgatagagctttacgataactatatccttctgttgcctcaaacaacgttaagactgctcatcggggatcctctagagtcgacc

SEQ ID NO: 79581 - DNA, 594 bp, Saccharomyces pastorianus
atgttgaataatataagttcgagcaaatcggcaatattcaaacaaacagagcctgccatacccatatcggaaaatatatctaccaaaacaccagcaccggtagcttatagatccaacagacctacaataactggaggttctgctatgaatgcaagtgctttgaatacaccagcaacaactaaattaccaccctatgaaatggatactcagagagttatgtcaaagcgtaaattaagagagttagtgaagactgtcggaattgatgagggtgacggtgaaactgtcattgatggtgatgttgaggaattactattggatcttgccgacgattttgttactaatgttacagctttttcttgtagattggcaaaacacagaaaatcggacaatttggaggcaagagacattcagttacatttggagagaaattggaatattaggattcctggttattccgcagacgaaataagaagtacaagaaaatggaatccctctcaaaattataaccagaaattgcagagtatcacatcagataaggtagcagctgcaaaaaacaatggaaacaatgttgcaagcttgaatacaaaaaaataa

SEQ ID NO: 79582 - DNA, 456 bp, Saccharomyces pastorianus
atgtcttccaatccagaaaattctggtgttaatgcgaataataatacgggcactggtaacgctgatgcgatcacaggagctcagcaaaatatggtactgcaaccgagacagttgcaagaaatggccgctaagttcaggacattactgactgaagcaagaaatgtaggtgaaactactcctaggggcaaggaattgatgttccaagccgcaaagatcaaacaggtatatgatgcccttacactgaataggagaagacaacaggctgcgcaagcctacaataatacttcaaatccaaattcaagcaacccagcttctattcctactgaaaatgtccctaattcatcacagcaacaacaacaacaacaacaacaacaacaacaacagacaagaaacaacagtaacaaatttagcaatatgataaaacaggctcaccccggaagagaaccaagaatatga

SEQ ID NO: 79583 - DNA, 75 bp, Saccharomyces pastorianus
atattcgaacgtctcgtggaaagccttgaccgttgcgtcgttactcgtctctattcaaccctgtggtcctattag

SEQ ID NO: 79584 - DNA, 3087 bp, Saccharomyces pastorianus
  modified_base (30)..(30): a, c, g, t, unknown, or other
atgaaacaaatgagtgattcaccagatatngactacatgcaagaaaaggctgcccgcaatgaaatggtgttgttgaggaacgaggagaaggaagcattgcaaaagaaaatagaatatccctctttaacatttttaatcgaaaaggctgctggaatgaacaaaatacttgttgaccaaatcgagtatgatgaaactataagaaaatgcaatcatcccactcggatggagctagaggaatcctgtcatcacttgaacttggttttgctcgaccaaaacgagtactcaactctaagagaacctttggaaaatcgaaatgttgaagacttaattaacaccttgagcaaactaaactacattgcaattcctaatactatctaccaagatttaattggaaagtatgagaatccaaactttgattatctaaaggattctttgaacaaaatggattacgtcgcaatctctagacaagattatgaattgatggttgctaaatacgaaaagccacaactggattatttgaaaatttcttcagagaaaatcgaccacactgtagtgcctctgtctgagtacaatttgatggttacaaactatagaaatcccagcttgagctacttaaaagagaaagccgttttgaataatcatattttaataaaagaagatgactatagaaaaattttagcagtatcagaacatccgacagtgatccacctctccgaaaaggcatctttattaaataaagtcttggtagacaaggatgattttgcgaccatgtcacgctcgattgagaaaccaactatcgatttcttatccactaaggcgctatcaatggggaaaatactagttaatgaatctacgcataaaagaaacgagaaactattatctgaaccagattctgaatttttgacaatgaaagccaaggagcaagggctaattatcatttcagaaaaggaatattctgaactgcgggatcaaatagatcgtcctagcctagatgttttgaaagaaaaggccgccatttttgatagcatcatagtagaaaacatagaataccaacaactggtaaacactacaagtccctgccctcccattacttatgaagatttgaaagtatatgcccaccaattcggtatggaattatgcctccaaaaacccaacaaactttctggagctgagcgtgcagagcgcattgatgaacaatcaataaatacgaccagcagtaactcgaccacaacatcgagcatgtttacagatgcactagatgataatatcgaagagcttaatcgtgtcgaattgcagaataatgaagattatactgacataatctcgaaatcatccacagtgaaagatgctaccattttcattcccgcctatgaaaacatcaagaattctgctgaaaaattaggctacaaattagttccgttcgaaaaatcaaatatcaatctgaaaaacattgaagctccattattttcgaaggacaacgatgacactagcgttgccagtagcatagatcttgatcacttatctagaaaagcagaaaaatatggtatgaccctcatttctgatcaggaatttgaagaatatcatatactaaaagataacgcggttaatctgaatggtggcatggaagaaatgaataatcccttgtcagaaaatcaaaacttagcagcaaaaaccacaaacacagcgcaagaaggtgccttccaaaacaccgttccccacaatgatatggacaacgaagaagtcgaatatgggccggatgatccaacattcacagtaaggcaactcaagaaacccgctggcgatcgtaatttgattttgactagtagggagaaaacactgttatcaagagatgataatataatgagtcaaaatgaggcggtttatggtgacgatatatctgatagctttgtagatgaaagccaagaaatcaaaaatgatgtagacattattaaaactcaagctatgaaatatggtatgttgtgtattcctgaaagtaattttgtgggtgcatcatatgcaagtgctcaagatatgagcgatatagttgtgctttccgcgtcctattaccataatctaatgtcacctgaagacatgaaatggaactgtgtaagtaatgaagaattacaagcggaagttaaaaagcgtgggctccagattgcactaacaacaaaggaagataagaaaggtcaagccacggcatccaaacatgagtatgtgtcgcataagctaaacaataaaacatctactgcgtccacaaagtctggagcaaaaaagggacttgcagaagctgcagcaacaactgcttatgaagattccgaaagtcatccacaaatagaagagcagtctcatcgtactaatcatcataagcaccataaacgtcaacagagtctgaattctaattcaacctcaaaaaccacacgttcatcgaggaatacgccagcatctagacgagatatagtagcatcatttatgtcacgtgcaggatctgccagtaggacggcatctttacaaactttagcatcattgaacgaaccaagcataatacccgcgttaacccaaaccgtcattggggaatatttgtttaagtattatccacgcttgggaccttttggattcgaatcacgtcatgaaagattcttctgggttcatccatataccttaactttgtactggtccgcttctaatcccatcctagagaatcctgccaataccaaaacaaaaggtgttgccattctaggagtagaaagtgtcacagacccaaacccatatccaacaggattgtatcacaaaagtattgttgttaccacagaaactaggactattaagtttacttgtcctacaaggcaaagacacaatatttggtataattccttacgttatttacttcaaaggaacatgcaagggataagtttagaggacatcgctgatgatccaacagataatatgtattcaggaaagattttcccattgcccggcgaaaatacaaagagctccagtaaaagacttagcgcatcgagaaggtccgtatctacaaggtctctaagacatagagtaccacaaagccgatcatttggcaatttacgatag

SEQ ID NO: 79585 - DNA, 147 bp, Saccharomyces pastorianus
  modified_base (112)..(112): a, c, g, t, unknown, or other
atgaaggctcatcatgggaagctaaccggtaagcaaatgtttgaacaaggcgtggtgggcacaggcgacgagtatatggaagaggatgacgcgagtgtagatgacgtagccnagggacttgccaagaccgaaatagcaaatcaataa

SEQ ID NO: 79586 - DNA, 198 bp, Saccharomyces pastorianus
atggccaacgccggtccatactcctacggttctcaattcttcatcaccaccgttccatgcccatggttggacggtaagcatgttgtctttggtgaagttgttgacggttacgacatcgttaagaaggttgagtccttgggttctccttccggtgccaccaaggctagaattgttgttgccaagtccggtgaattataa

SEQ ID NO: 79587 - DNA, 456 bp, Saccharomyces pastorianus
atggaatgggagaccaagaaaatcttggctccattagcagaagacaagacacacgtcaaattattgactccagaagaaatcaaagtctctgctcaatgtaacagagtcgctgtttccgatgggcacaccgaatgtatctctttgaggttcaagaacagacctgctccatccgtcgagcaagtcaagacatgcctaaaagaatacgtctgcgacgcctacaaattaggctgtcattctgctccaaagcaaactattcatgttttggaacaaccagacagacctcaaccaaggttggacaggaacagagacagcggttacggtgtttccgttggtagaatcagagaagacccattgttagatttcaaaatggttgtcctttcccacaacaccattattggtgccgctggttctggtgtcttgattgccgaaatcttactagcaagaaacttgatttaa

SEQ ID NO: 79588 - DNA, 585 bp, Saccharomyces pastorianus
atggctggaaagaaaattgctggtgttttgggtgctactggttccgttggtcaacgtttcattctgttgttggcaaatcaccctcatttcgaactgaaagttcttggtgcctcttctagatcagctggcaagaaatacgttgacgctgtgaactggaagcaaaccgatttgctaccggaatctgctaccgatattattgtttccgaatgtaaatctgaattctttaaagagtgtgacatcgtcttttccggattggatgctgactatgctggcgctatcgaaaaggaattcatggaagctggtatcgccattgtttccaatgccaaaaattatagaagagaacaagatgtgccattgattgttcctgttgtcaatcctgagcatttggatattgtagctcaaaagcttgacaccgccaaggctcaaggtaagccaagaccagggttcattatctgtatttccaattgttccactgcaggtttggttgcaccattgaagcctttgattgacaaattcggtcctattgatgctttgaccactactactttgcaagcaatctcaggtgctggtttctccccaggtgta

SEQ ID NO: 79589 - DNA, 309 bp, Saccharomyces pastorianus
ggggatcttgcactaaagcaaattataacttttccatataatgttatctcattatccgcccataatgatgaattccaagtcaccctagataataaggaatcatctggtgtgcaaaaaaattttgccaaatttattgaatataacttaaatgagaatagttttgtcgtgaataatgaaaaatcaaacgaatttgacagtgccatcatacaatcagtacaaggggattctaacctggtgaccaagaaagaagaaatttacccgttatacaatgtttcctcgttaagaaaacatggagaacattactcgtga

SEQ ID NO: 79590 - DNA, 939 bp, Saccharomyces pastorianus
atgagcgtcattcatcctttgcagaatttactcacctctcgtgatggctcattagttttcgccatcattaagaattgtatcttaagcttcaaatatcaatcgccaaatcattgggaatttgctggaaaatggtctgatgatttcgacaaaattcaagaatcgagaaacaccactgctaaggagcaacaaggacaatccagcgagaacgaaaacgagaacaaaaaattgaaaagtaataaaggcgattccattaaaaggacagcagccaaggtaccatctccaggtattggcgccccaccgatatattcgtacataagaaatctgagattaacttcggatgaatcaagactaattgtgtgcgcagattctgacaagtccctcctagttttcgatgtcgacaaaacttccaaaaatgtcttaaagttgagaaaaaggttctgcttctcaaagagaccgaatgctatttctatagccgaagatgatactacagtcataatagctgacaaatttggtgatgtatattctattgatattaattctatcccggaagaaaagtttactcaagaacctatcctcggtcatgtctctatgttgactgatgtacacttgattaaagactctgacggtcatcaattcataattacaagtgatagagatgagcatattaaaatttcgcattatccccaatgtttcattgtggacaaatggctctttggtcataagcattttgtttcttccatatgctgtggcaaagactatttattattaagtgcaggtggtgacgataaaatcttcgcttgggattggaaaactggtaagaacttgtctaccttcgattatagtagtttgattaaaccttatttgaatgatcagcatttagcaccaacaagatttcagaatgaactcatgatctcattgaatttgcagttggtaaaatta

SEQ ID NO: 79591 - DNA, 4626 bp, Saccharomyces pastorianus
atggataagttgaatgacgatgaggaaagactaatggacgctcaacagcctgattctatcgccataactaaccaagatctagctgttaaagatgcgttcttagtgtttagagtcatggcgaaaatatgtgctaaacctttggaaacagaactcgacatgaggtcacatgccgtcaggtcaaagcttttatctcttcacatcatttactctattatcaaagatcatattgacgtattcctttcccacaacatttttctaccaggaaaggagcgtgtgtgctttatcgattcaattagacaatatttacgtcttgttttatcaaggaatgctgcctcgcctctagctccagttttcgaggttactttagaaattatgtggctattgattgctaatttgagagcagatttcgtgaaggaaattccagtttttttaacagaaatctacttccccatttcagaattaaccacttccacctctcaacaaaagagatattttttaagtgttattcaacgaatttgtaacgacccaagaactttagttgaattttacttgaattatgattgtaaccctggaatgccaaatgtaatggaaataactgttgattatttgacaagattggctttaactagggtggaaattactcagactcaaagatcatactacgatgaacaaatatcaaaatccctgtccacctacaatttctcacaattgccccttttgacttcttccaacttgtcttctagtcctgatgttggtcaagtcaatttactttttccacttgattttgctctcaaaatggtgtcgctaaattgcattgtgtcagttttgcgttccttaagctcatgggctcacaaagctttaaatccaaacacacacactgctaataaggtattactaaacacaacatcttcagctcgtcaagaatctagatcatctttgagtaacgacgtaaggtcttctattatgacaagtaatgatgacttcaaaccaacatatgaagacgaagaaagcagatcattgagcagtcaaaacattgacgcagacgaccccacacaatttgaaaatttgaaactaaggaaaactgctttatcggaatgtattgctattttcaacaataaacccaagaaagctattccagtacttattaaaaaaggatttttgaaagatgattctccaatttccattgccaagtggttattagaaacagaaggcctcgacatggccgctgttggggattatctaggcgaaggagacgacaagaacatcgctataatgcacgcatttgttgatgagtttgacttcactggtatgtccattgttgacgcattaaggtcatttttacaaagtttcagattgcctggagaaggtcaaaaaattgacagattcatgctgaaatttgcggaaagatttgtggaccaaaaccccggagtcttttcaaaggcggatactgcatatgtgctttcgtattctttgatcatgttgaatactgatttacattcgtcacaaatcaaaaataaaatgtctttacaagagtttttagaaaacaacgaaggtattgacaacggaagagatttaccaagagacttcttggaaggtttgttcaacgaaattgctaacaatgaaatcaagttaatttctgaacagcatcaggcaatgctttcaggtgataccaatcttgtccaacaacagcaatctgctttcaacttctttaattctcgtgatttgacaagagaggcatataatcaagtctcaaaagaaatttcatctaaaacggaattagtctttaagaatttaaacaaaaataaaggaggcccagacgtctattatgctgcttcccacgttgagcatgttaaatcaatcttcgagacactatggatgtcctttttagcagctctaacccccccatttaaggattatgatgacattgacacaaccaataagtgtttagaaggcttgaaaatatcaattaaaattgcttctacttttagaatcaatgatgctagaacctcctttgtaggtgcgttagtccaattttgtaaccttcaaaaccttgaagaaatcaaagttaaaaatgtcaatgcaatggtaattcttcttgaagtcgcgttatcagaaggaaattacttggagggatcgtggaaggacattttgctggtcgtgtctcaaatggaaagactacaattgatatccaaaggtatcgacagagatacggttccagatgttgcacaagctcgtgttgcaaaccctagagtttcttacgaatcatcaagatccaataatacatctttctttgatgtttggggcaagaaggcaactcccacagaattggctcaagaaaaacaccataatcaaaccttatcacccgaaatctctaaattcatttcctccagtgaattagtcgttttgatggacaatatatttaccaaaagttccgagttatcaggtaatgctatcgttgattttatcaaagctttaaccgctgtatctttagaagaaattgaatcatctgaaaatgcttccacaccaagaatgttttccttgcaaaaaatggtcgatgtatgttactacaatatggatcgtatcaaactagaatggacgccgctttgggctgttatgggaaaagctttcaacaagattgctacaaactctaacttagcagtagtatttttcgctatcgattccctgcgtcaattgtctatgagatttttagatattgaggaattatcaggttttgaatttcaacatgattttttaaaaccttttgaatacacggttcaaaatagtggcaacactgaagctcaagaaatgattattgagtgttttaggaacttcatattgacaaaatcggaaagtatcaaatctggctggaagcctattcttgaatccttacaatatacggctcgctcaagcactgaatccattgtattaaagacgcaattgctggttagcaatgatattgtgaccaatcacttcgaaaacgtattctctcaagaagatgccttttctgagttagttggtgtcttcagagaaatcaccaaaaataagagattccaaaagctatctctacatgctttggagtctctaagaaagatgactcagaacgtcgcagacatctgtttttacaatgaaaataagactgaagaagaaaaaaaacataacgatgctttacttcgtgggaaagacatattccaggatgtgtggttccctatgttattctgcttcaatgatacgatcatgacagctgaagacttagaagttagatcacgtgcattaaactatatgttcgatgccctagtggcatatggtggtaaattcaatgatgatttctgggaaaagatttgtaagaagttactatttcctattttcggtgtattatccaaacattgggaagtcaaccaattcaatagtcatgatgatttaagtgtttggctttcgaccacgttaattcaagccttaaggaacttgattgccctttttacgcattactttgaatcgttgaacagaatgctcgatggatttttgggtctgctggtatcctgtatttgtcaagaaaatgacactattgctagaattgggagatcctgcctgcaacaattgatattgcaaaacgtatctaaattcaatgagtaccattggaatcaaataggtgacgtattcgataaattgtttgatttaaccactgctaatgaattgttcgattatgatccgttacagcaaggaagaaaatcatctgtatctcatcaccaaacaactgatgataccagccaacactcagatgatgatagcaacgacagaagggagaacgattctaatatcagtgagacggtcgaaagagcgcatcaagaagaatccagcgaagacgttggtggtgacatggttgaaacactcaatgggcaaactaagcttaataatggcaattccgttccgacggtaaaggacgaattgaatccaaagcccgctagtctaagtatccccaagaaaactaagcacatgaaacgaaacgaaagtaacgaagatatacgtaggagaataaacatcaagaattctattgttgtcaaatgtgttttacagcttttgatgatagagctgctcaacgaattattcgagaacgaagattttgcccactgtatcccttacaaggaagccattagaattacaagattgttggagaaatcgtacgaattttctcgtgactttaatgaagattatgggttaagaacaagactagtagaggctcgtgtagttgataaaataccaaacctgttgaaacaagaaacgagtgctgctgcagttctccttgacattatgtttcagttgtatctgaacgatgatgagaagaaggctgatttaataactcgtctgatcaccatttgcatccaggtcgtagagggttatgtttctttggatgatagaaccatggaacgtagtatcaatgcctggcgttcagtgatagttgaaatattacaaggttactacgaatttgatgatgaagactttagactatactgtcctgctatgtatgctctggtgattcaaatattagataagagcgttccaacggagttgagacatgctataaaacaatttctaagcagagttggtgaattatacctttctactgattaa

SEQ ID NO: 79592 - DNA, 1113 bp, Saccharomyces pastorianus
atgtctgaacagaattcagtagtaaatgctgaaaaaggggatggcgaaatatcttcaaatgtagagactgcttcttcagtcaatccgtctgtgaaaccacagaatgctattaaagaagaagctaaagagacaaatggtgaagatcaaaaatgcaaagggccagaaaacgctggcagtacggcagaaacaaaagaaacaagtaacgacgctaccaacggaatgaaaacgcccgaagaaacggaagatacaaatgacaaacgccatgacgatgaaggtgaagatggagatgaagatgaagatgaagatgaagatgaagacaatggggacgaggatgatgaggacgtggatagcagtagttccgaaaccagttccgaagacggggaagattctgaatcagtctcaggggaaagtactgagagtagctctggagaagatgaagaatctgatgaaagcgatggaaatacatcaaacagctcctctggtgatgaaagcgggtcagaagaagaagaagaagaagaagaagaagaagaagaagaagaggaaaatgctggcgaaccagctatcgctcatcaagatagtgttcccaccaacgattctactgccccaaggtctacccatacgaggaacatatcaccatcttcaaatggttcgaacacaaactcaaccataattttagtgaaaactacgttggagacaattttaaatgataaggacattaaaaagaattcgaatgctcagaaggctatcgaaaggacattacaaaaatttaaggaatttgatccgcaaaccacgaataacccacattacgtggattcaatactagtattcgaagcactaagggcaagctgtcgtaccaaatcctccaaagttcaaagtttggctttagattgcctgtcaaaattgttttcttttagatcgctagacgagaccctgttagtgaatccacccgattctttagcctctaatgatcaacgacaagatgctgccgatggaataacgccgcctccaaaacaaaaaattatagacgctgcaattgatactatttcagactgttttcaaggtgaaggcactgatgaccgtgtggaactacaaatcgttagagctttatctagt

SEQ ID NO: 79593 - DNA, 534 bp, Saccharomyces pastorianus
atgaatttgcctaaggatgagaacaatcctaactcagatgaccccgattgggtcaccggtagagaagacgacgaaataagcgcagagttaagagaattgcaaggcactttaaaacaagtgaccaagaaaaaccaaaagaggaaagcccaattgattccactagtggaaagacaactagcatggcaggaatactcatctattttagaagatttagacaaacaaatcgaccaggcttatgtcaaacgtattcgcgtacccaagaaaagaaagaagcatcatacagcagcttcaaataatgtgagcacaggaaccacgtctcaaatagcacaacaaaaggctgcaaactcaagtttaaaatcgcttctggataagaggcaaaggtggattaataagattggtccattgtttgataaacctgaaattatgaagagaatccccaatgaaagcgtattcaaggacatggaccaggaagaagatgaggatgaagccgatgtatttgcacaaaacactaataaggacgtggaactaaattaa

SEQ ID NO: 79594 - DNA, 1515 bp, Saccharomyces pastorianus
  modified_base (1494)..(1494): a, c, g, t, unknown, or other
atgcctagacatggaagaagaggaaaactgccaaaaggcgagaaacttcctaaaaaggagggaggcgacaatactccgtcaaagcttttatcgtcaatgcttaaaactttagatttgaccttcgagcgtgatatcggaatgctcaatggcaaaagtgttaggtccatacccaataaaaaaactttacttgaattgcaaagtcaattggatagtctcaatgaaatactgggtacaattgcccgaggtgatcaagagaccattgaagcgcttcggaaaataagagacagtaaaaatgagaagcaagcaaacgatgaaaagcaggaaacttcaaatgcagacgggcagcacgaaagttctactgctactgaagaaacgaatataattgataaaggggtacaaagcccaccaaaacctcctccttctaatgaaatctccggcacaattgagaacgatgtagaaagcatcaaacaagcggctgataatatggctaaagaagaaattaatgaagacaaagatttacaagttcatagagatcaacccagagaaaagaggccgttcgattctgaaactgaaaatagggccactgaaaatgaaaacacacagaggccagacaataagaagcaaaaaattgacgttgacaaaatggaaaacgatccaactgttaaaaatccaaaatcagaatttgtagtatcgcaaacgttaccacgagcagcagcagcactcggcttattcaatgaagagggactagaaagtacaggagaagacttcctaaaaaaaaaatacaatgtagctagttatccaacaaatgatttgaaagatctgttaccaggtgaattaccggatatggacttttcgcatcctaaaccaaccaaccaaattcaattcaatacctttctagcatttgtggaaaattttttcaaagatcttagtgatgacaacttaaagtttttgaagatgaaatatattatacccgatagcttgcaatttgacaaaacttatgaccctgaggtaaacccgtttattataccgaaactaggccctttgtacacagatgtttggttcaaagatgaaaacgacaaaaattctgcctataaaaaaccttcaccatattcaaacgatgcatctactatactaccaaaaaaaagtgccaacgaacttgatgataatgctttggaatcggacagtatatcgtgtgggcccttattatctaggctattgagtgctgtattaaaagatgacaatgacaaatcagaattgcaatcttctaaaataatacgggatggcggactaccgagaaccggaggggaagacgatatacaatcgtttagaaacaacaacaatgatagtgtagacatgacattatctcaggagaacgggcccagtgttcaaacacctgacagtgacattgatgaggaagcatctttccaaacaaaactggcagaaaataaaggcagtaatggcggtactacaagtacgttaccccaacaaattggngtggataacaaatggaattaa

SEQ ID NO: 79595 - DNA, 138 bp, Saccharomyces pastorianus
gcatgctgcaggtcgtttgaatctcaaggttttgaaaaggacaagattgtcgaagtgttgagacgattaggcgtcaagtccttagaccccaatgacaacaacacagccaaccgtatcatcgaggaattgttgaagtga

SEQ ID NO: 79596 - DNA, 516 bp, Saccharomyces pastorianus
atgtctagggctaagagaattatgaaagaaatccaagctgtgaaggatgatcctgcagctcacattactcttgaatttgtgagtgaatctgatatccaccatttaaaaggcacatttttgggcccacctggaacaccttacgagggtggcaaatttgtcgtggatatcgaagtacctatggagtatccattcaaaccaccaaagatgcagttcgacacaaaagtataccatccaaatatatcatcagtgacaggtgccatttgtttagatattcttaagaatgcatggtcgccagtgataacactaaagtctgcattgatttcgctacaggcgctactacaatctccagagcctaacgatcctcaagatgcagaagtagcacaacactatttacgggatagagaatcttttaataagactgctgcactatggacgagattataccacacaggaacttcctatgatcaaaaaggcaatgtagaggagtctgatttatatgggatgaccacgatctga

SEQ ID NO: 79597 - DNA, 1392 bp, Saccharomyces pastorianus
atgcctaccattttatacaacaccaattccagtttaattaccaagtaccgaaggccaaatgcctcaaatcaatataaaggctttctgtcaaaaaaaggacatacacgactgaattctaaatcgagtggagatatttgggagaaagattgtagtcatacgaaaaattctggtaatgatgtttcgtttgagagtgaatttgaaaaagattcggttgagtatctaagggatttatgtttctctatatacccaaattcattacatcagaaaatcagaagcatagaagctttgccagacctacaggtaaatacctttattgccttaattttccaaaatttcgttaagtcttggtatggtatcaaaatacccactgatgattccaagtttttaaccgaactatataacttagttcaagatttaataacatatttgaagagttccaaaatcaattaccatgcccttttactcgattatattccctgcttgctttcgtctcacttgaaagcattaaatgactcatctcaaaataacgatttagtttatgaacagtactgtaagctaactttgtatgattcgaaacgatatccaatgctattcactgaaatcatacaaagtaaaatgagcaccaaatctctactacagagaagctttttggatagctttttaaatgaacttgtgttcgggcatatttttaattcaatagcggaaccatattatcttctggagggcttgaataaaatttgcataagaataaagctaaattctgcaggaaataccagaaacgaggtgactcatggaaagcctaaatgcgatccctggttgtttgtttccaatgtaaagcacaaaatattgcaaatgaccaggcttttagcttattcaacttcaacagaagcagcaaatatgaacactgccgaaattcaagaaacagcatttctacaaagatatatttttacttttttcaccgatgattttttcaaattatctatgaggaagccattcctattctcaatatgcagaacgcttcagcattggatctctaaatcaaatgcgttaaacagggtcatgtatagaacatttgacaatattgttcaaactaaaattaccagccctgtgacaattggcaacttattctcattattacgacattctttgtttcctaatgacaatatgatggggccaccaagagtattaccagtgggtgatgcttttctagagttcagagaagagtgtatttccaatttatgggatgtttgtatgacttataaacttgatcatatcctcgctatcaaaaggtctgacatagcggatcttattatctgcatatcgaagaatagggattgcaataaactgctaatttatagaattattgactgtgttattgcgcagttgccgtag

SEQ ID NO: 79598 - DNA, 3960 bp, Saccharomyces pastorianus
atgacacaagcgaatttagcggaacaatatttgaatgatcttaaaaatattttagatattgttggatttgaccaaaactctgctgaaattggaaatatcgagtactggctccagttgccaaataaaaaattcgttttaactacaaactgcttaaccaaattacaaatgacaattaaaaatattaccgataacccacagctatcgaactcaatcgaaataacatggcttttgagattgcttgatgtgatggtttgtaatataaagttcagtaaaagctctttaaagatgggtttagatgattctatgttacgatatattgctttgctttctacaattgtactattcaatatttttttactgggtaagaatgacagcaacttacatcgggaatcatacatcatggaaccggtgaattttttaagcgacttgatagaatctctaaaaatattaacaattgaatatggttctttgaagatagaatttgacactttccaggaggccctagaattgctaccgaaatacatacgtaacggcccttttctggatgataatgtcacggcaaagcttgtgtacatctttagcgacttgctgatgaataatgacattgaagcaactacgaatatccaatttcaaagtttttgggataatgtgaagagaatcagctctgatattttagtttcattattcggtagttttgatcaacagagaggatttattatagaagaactactatctcatatcgaaaagcttcccacaaagagaatacaaaaaaaactaagaaaagttggtaaccaaaacatttatataactgattttacctttactttaatgtcaatgttagagaatattaattgctactccttctgtaatcagatgaaggatattgcaccagagaatattgatctattaaagaacgaatacaaaaagcaagaagaatttctttttaacattgttgagcatataaatgacacaatactggaaaggtttttcaagaacccgtccgctttaaggtatgtaattgacaactttgtccaagatctattattgctaatttcctcccctcagtggcctgtaacagaaaaaatactaagctctttgttaaagagacttctaagtgtatacagcccatccatgcaagtttctgcaaacattgaaacaatatgtttacaacttatagggaatattggttctacaatttttgatattaaatgctcaactagagaccatgaagataacaacttgattaaaatgattaattaccccgaaactttgccgcatttttttaaatcatttgaagaatgcattgcatataatgaaacgatcaaatgccgtcgttctgcaacaagattcctttggaatttaaggctcggtacgatcttgagattagaagagtatacaaaggatgccaaagaacaaactataaccgttgacaatgaattgaaaaaaatattggagcagataaaagatggtggacttggacccgaattagagaacagagaagcagattttagtacgattaaattggattatttttctattttgcacgcctttgaactactgaatctatacgatccatacttgaagttgatattatcacttctagccaaggataaaatcaaactgagatcgactgctattaaatgtctctcgatgttggcttcaaaagacaaagtgatactttcaaacccaatggttaaagaaactattcaccggcgtgtaaacgactcgtctgcatctgtcaaggatgccattctagatttggtcagtattaattcttcatacttcgaattttatcaacaaattaacaacaactataacgatgatagcataatggtaagaaaacatgtgttaagaattaatgaaaaaatgtacgacgagacgaacgacatcgtcacgaaggtatacgtaatagcaagaatcctaatgaaaatagaagacgaggaggacaatataattgatatggctaggctgattttattaaatagatggatattaaaggtacatgaagtattggaccagcccgaaaagttgaaagaaatttcttcttcagtcctactagtaatgtcccgtgtggctataatgaatgagaaatgctcccaacttttcgacttgtttctcaacttttatctcctaaacaaagaagcgcattcaaaagaagcatacgataaaatcactcacgttctaaccattcttaccgactttttggtacaaaaaattgtcgagctcaactcagatgacacaaatgaaaagaattcgattgttgataaacaaaattttttaaaccttttggcgaagtttgctgattctactgtgtcatttttgactaaagaccacattacagcattgtatccttatatggtatcggacgaaaaatctgacttccactattatatcttgcaagtctttagatgcacttttgaaaaattggccaactttaaacagaaatttttgtatgacttagagacgacccttttgagtaggctaccaaagatgaatgtaagagagatagatgaagctatgcctcttatctggtctgttgccactcatcgtcatgatactgctagagtagctaaagcatgttcatcctgtctttcccatttacatccatatataaataaggcaaataacgaggaagctgccattgtagttgacggaaaattgcaaaggctgatatatttatccaccggttttgccaggttctgctttcctaaaccctccaatgataaaattgcatttttacaagaaggtgaaaccctgtatgaacatattaccaaatgcctacttgtactatctaaagacaaaattacacacgtaataagaagggttgctgtgaaaaatctcactaaattatgtggaaatcatccaaaactattcaattcaagacacgttctacatttactggacaaagaatttcagagcgatcagctagatattaaactagtaattctagaaagtttatatgatctttttctactggaagaaaggaagtcagtgagaaacactggcgttaatagcactttgtcttcgaactccattttgaaaaagaaattactgaaaacgaatagggtagagtttgcaaatgatggagtatgttcagcgttggctactagatttttagacaatattctccaactatgtctcctacgtgatctaaagaattctctcgtagctattcgattattaaagttgattttgaaatttggttacacaaatccctctcattcaattccaactgtaattgctttatttgcctctactagccagtatattcgtcatgtcgcctatgagttgttagaagatctttttgagaaatacgaaacgctagtattcagtagtttatctcgaggggttacaaaagctatacattattctattcatacagatgagaagtattattacaagcacgatcattttttgtctttacttgaaaaattatgtggaactggaaaaaaaaatggcccaaagttctttaaagttctgaagagaatcatgcaatcctatttagatgatatcaccgatttaacatcaacaaatagtagtgttcaaaagtccattttcgttctctgcactaacatttcgaatatcacatttgtttctcagtacgatttggtgtccctactcaaaaccattgatttaactacagatagattaaaagaggttatcatggatgaaataggtgacaatgtttcatcgctatccgtatcagaagaaaagctcagtggaataattttaatacagttaagcttacaggatttgggtacttatctactgcacttatacgggttaagggatgatgtgcttttattagatattgtagaagaatcagaattgaagaacaaacaactccctgcaaagaagccggatatcagtaagttttccgcacagttggagaatattgaacagtattcatcaaatggcaagcttcttacatattttagaaaacacgtgaaggatacgtaa

SEQ ID NO: 79599 - DNA, 168 bp, Saccharomyces pastorianus
gatgtgcttttattagatattgtagaagaatcagaattgaagtacgtacaactccctgcgaagaagccggatatcagtaagttttccgcacagttggagaatattgaacagtattcatcaaatggcaagcttcttacatattttagaaaacacgtgaaggatacgtaa

SEQ ID NO: 79600 - DNA, 264 bp, Saccharomyces pastorianus
attttggttaataaactgaatattaaagtacttccgtttgtagttggatacaagaatggcctagaaaaagttcgctacgtaggatttagtaaactgggaaatgaccctaatgggtttgatattaggaggttagagcaatctttagcccattcaggtgttatagaagacacattcgaaataagaaagcattcatctgtgaatacggaacgcttcgcttctacaaatcatgatagaagtgaaagtgatagtgatttagatatataa

SEQ ID NO: 79601 - DNA, 261 bp, Saccharomyces pastorianus
atggaagataaattagacagatactacacaaatgtgctttcaaatgctgaaaaggataaacacacaactgtcgatagcgatgacaaaagtagtggcgaggaaaatttagatgaactacttaatgaattggatagagaattagacgaggatcatgaatttttgagtgcttatcggtcggagaggctaccacaaatatcagatcatttaaaacaggtcaagaagaatgttgaggatgacggatacggtagattgcagtgcatt

SEQ ID NO: 79602 - DNA, 1605 bp, Saccharomyces pastorianus
atgttcaaaacgaacgaatccatcacaactatcccatcaacgtcaatcaacaatcttattggtcaggaatccaacctacgcaagcagccttcgggaactgcactgcatttacaatcgcatctgcatccacattcccgttcacagtcctattctagttctaatatgtccagatcgccttctcccttcccctacggaaagacaccatcaaacgacgaactagtgtatgacgagttaaacaaccaaatcaacgaggtgcaagaccgtgctaagaatgaggaaattgtcctgtacaacaataataattatgacgattatacaaaagaacgaggggaacaagagcaggatagaacatcatacgcagatgaatacggttttaattacgatgatgaagaaggtggaaatgaagacaactatgatgatgatgatgacgatgatgacgatgatgacgatgacgatgagagtgacgatgaaggtttgagcttttacgctccaagcattttgtcccgctctggttcgagcacagacgtgttatcctccggaatagattctatggcaaaaaattcgaaggaaacaaggggtaggtttaggtccttgagtttaatggaccctgctctgcaaaagccgttcaaccagaaatttccaaacagccaacaacccgattctgcaggggcttcatcacctaaaagatcgaactcttcaaaccattttactaacgtctacgtgcacgatggcgactttgacgggacagacactatcaacaacaaaaagaacctatcgtctgcaacgcttattaaaaggaaatctttgatgaacagaaacttggctccttctattagtaatggattgatacctccggaatttatttcccgaatatctacgccctctacaagcgcaagtagttcaaactcctcgttgaatgacatgtctacagtatcaaacgcattttccaaattattaaatgacacaagtaagaagcaaaaattcttgaattcaccaattccacagcatacacaacaggcatctccattactaatgagaaataattcaaacagtaacttgctatttgagaagaatttgatcaacaagtcatttgaagaactgagaagacaaccatcagttaacctttttagcaccttgatgaatggtaacatggaaaagaatggtttggcactaaacttcaagtccagaacgcctacagatgcgttgatggcgaatagcattaaaaatagtaacaattccagtcacaggttactaaatctcgaggaagaagaccaaatcatgtctggatctatccccaaagaacgcgaggacgataacgattcgactaatagcacaatagtaccgaatcacccagacaatgataactataatgataatgataacgacaataatactggtataaattccaataatttcaatctaaatctctatgatgacaatgatagtgcaggctttacagatgtaacaactgaaggagtgaaatactcaaactcgaattctacagtcaccaaacccgtttataaaaaagccgtcaccctggatttatacggcgaagatgatatggataacatgggaggatgggtattaggaggtaatgcccggtaa

SEQ ID NO: 79603 - DNA, 234 bp, Saccharomyces pastorianus
atgcaagaccagactgtcttggattccatagttattgtcacgaatagcacgggggtaaaagcactgctgactttgttgtcagaccaccctctcaccagccttatctcccaggaatcaataaaagcgctacatgaatattcagatgctgttaacgaagataagggcgacgaccagagcaacacaagtttgaaaagaaactcttcgtcgttgttgaattttcaaactcggttttaa

SEQ ID NO: 79604 - DNA, 192 bp, Saccharomyces pastorianus
atgaatgctactaatgtcaacgctaatacggccaccggaaaaattagatttgttcaagtgttatcttctgaaaaggacggtattctagaattggccgatctcgcagaggaaacactgaaaatattcagagcaaacaagtttgaactaggccttgtccctgatatacctccaccacctgcattggttgcatag

SEQ ID NO: 79605 - DNA, 474 bp, Saccharomyces pastorianus
  modified_base (449)..(449): a, c, g, t, unknown, or other
atgtcagctttcggtaacccattcacgtcgggtgctaagcctaatctttctaatacaagtggtatcaaccctttcacaaataatgctgctagtaccaataacatgggaggaagtgcatttggaagacctagttttggaacagcaaacacaatgacaggaggaaccaccacttcagcatttggaatgccccagtttggtaccaatacaggcaatactggcaatacgtcaattagcgcttttgggaacaccagtaatgcggctaaaccgtcagcatttggagcaccagcatttggctctagcgcccccatcaatgttaatccgccttctactacgtcagcatttggagcaccgtcatttggatcaacaggttttggtgctatggcggcgacaagtaatccttttggtaaaagtcctggctcaatgggctctgcattgggtcaatccagctntttggagcgaacaaaactgctatcc

SEQ ID NO: 79606 - DNA, 342 bp, Saccharomyces pastorianus
atgtcaatcaaattaaaacctcttgatttgatgtttctgaagaacacaaacagtgatgactatatggatatatccgagactaaaggtggcccaatacattgtgaaacaaggaccccgttgatctatagaaaaaatttcaaccatttcaacccggacttgaataaaaggccgccaagagaacccatagaattcgacttaaatggaaatacgaactcaaccccgactatagcaaaggctttcggtaaaaatagtttattactaaggaaggacagaggtggtttgccatacaagcatgtccccatagtgaaaagaaataaatatcctccaagaccagtacactaa

SEQ ID NO: 79607 - DNA, 408 bp, Saccharomyces pastorianus
atgaaaactaaattaaaaccttctcctttgctcaataacgatgacaaaaattcttctccatcgcctactgcatctacctcttcaatgaagaaattgaagtcgggtttattcaataaaaatgaagttaagtcttctacagaatctctacctacttcttccaagaaaaaactatcattttctaaatatctgaacaaggatgacgcagatatggccaagcttgggactaaacggtcaatagatgtggatttcaaagtcaaccccgaagcatccacggtggcttctaatattatatcttcgtcaacgtcaggatcgtcaaccacaacggtagcgactcctgcttcttcagaagaacccttaaaaaaaaaaccaaaatatccgtgcaagactctaatgtacaatcgattttga

SEQ ID NO: 79608 - DNA, 657 bp, Saccharomyces pastorianus
atgtcagcacctgttcctcaattagtaaatatttctcatgccttgcaagcttccactatccagcaaattcgtttggatatggtagattttaataaagattgcaaattatcttccattcaactggcaagaattgacaagtatatcgattctttgcaagcggctttgaatcagtttaccaaagataacttgtacatagaacggaaggaaaagaacgtgactgaagcagatatacagctgtattctggcttaaaatcaatgtatctagattatttgaaccagctaattaaactaaagcatgagaaacaacaccactctacaccgcccatcgctaatgatgtctcactggacttcttcgttaaccaattgcctaagttttctgccgaggaaaggaaaaattacattgacaatttaatcctgaataaaaatagccataatcgattatctaaaatggatggtctggtagatgcagtcatcaatttatgcgtcttggatacttccgttgctgaaaatgtacgatcctatatgaaattattagatacattgggtttccaaaagggttcgaatagtactggtacaaggccaacctcaaaaagaaattggctagttcgaaagcaagataaaggattcagaaaaagaaaaggagaaggagaaggataa

SEQ ID NO: 79609 - DNA, 141 bp, Saccharomyces pastorianus
atggaatgtgaaaagttaatagtatctacaagtgatccaactttgatcagtataagcgccaaattgaacagtctcaaagcttcgatggcgaaccatcaagcaaatttggtagctagcaaacagttaagtacatataagtaa

SEQ ID NO: 79610 - DNA, 1467 bp, Saccharomyces pastorianus
atgactatagttaacaagacttacaatatccagttattaatggtatttgtgttttttggatgtctgtccattttctttttatcgttaaaagatttgttcacagaggatggaaatcaaaagaagggaggccaggaggatgaatattgtcgtatgtttgacataaagtacatgatttcctatttatggctgacaaggttcaccattttattgacaggcataatggctattgtagtacattttttatcgtttaatgaaattacttcttccatcaaaactgatttgttaagtttacttttcgtcgtagtggcagaatatgtttccagtttctctaacaaacaacctgattcgcactcccataatcatgcacatcaccattcccatctaaccgattcattgcctctcgaaaatgaaagtatgttcaaacaaatggcattgaataaggacaccaggtccattttttcgtttttattgttgaataccgctttcatgtttgtacaacttttatattcctttcgttccaaatcattgggcttattatctgattcgttgcatatggccttagattgcacatctttgctcttaggtctaattgctggtgtattgaccaagaaaccagcaagtgataaattccctttcggtctaaattatcttggtaccgtggcaggtttcaccaatggtgttctgttactcggcatagtgtgcggtatcttcgtggaggcaattgagagaattttcaaccccattcatcttcatgcaacaaatgagttgttggttgttgctacgttaggcttattagtgaaccttgtaggtttgtttgccttcgaccatggtgcacatgatcatggtggtactgataatgaaaacatgaaggggatttttttacatatattggcagatacattaggttctgttggcgttgttatttcgacgttattaatcaagttaacacactggccaatttttgatccgatcgcctctttattaattggttccttgattttacttagcgctctgcccctgctaaaatctacttccgcaaatattttactaagactggatgacaagaagcataatctagtaaagagtgcgctaaaccagatttcaacgacgccaggaatcacaggttatacaactcctagattttggcccacagagtcaggcagttccgggcattcacatgcacacacgcattctcatgcagaggatcatagccatgagcatcatcatgatcagaaaaatggttcacaagaacacccgagcttggtgggctatattcatgtacagtatgtagacggcgagaattcgacaattatcaagaaaagagttgaaaaaatattcgaaaatgtgtcgattaaagcgtgggtacaagttgagcctcaaaattccacttgttggtgccgggctacttctatgaacacaatttcagctaacccgaattctttaccgctacagcctatagcaaattga

SEQ ID NO: 79611 - DNA, 1290 bp, Saccharomyces pastorianus
atggttcttcaatattcacaaagttatctagagtttattaatgccttggcatacttgataaatgatattgtgaaaaaaaaaccaagtccttcttttagtataacagaacatattcctaaaaggacatactggttcggagaagacttaatggtgaagggtttatcattcgttaactttcaactatctgattttgacgattatgaaaaaattcttgaaatggatcatagtctcgatagattaattggcaatccgccattatgcgacaaattatcggcatcatctgaaatgctgttaaggttgcaggctgttgtgaatataagttcgcaattattgcagaacaacaactgcggagtagaatggtcagataataaatcacgttatatctttaataagaaaattggatttaaggagaccgttaaaaataatatgaagacatcgaagcaatccaatgaaaaggccaagttacaaagaaaaaacaaaccttcgaccactaatggctcaatatccatggcggatttggagagacaaatgagaagtagctctttggattctttttctccaactatgggttatagtggttcgtctgtacctatggccccagatacgttcaatgttaagcccagcggtacaataacggggaacaaagtaaatgtagaactgttaaaaatcgaactaagcggtcaaaacgccgatggcgctattacgaatatatctcctggttacagtaacgcagcgatctcttcttcaaattcgacagatgaatcatccttcgatttgaacaacatcctatcttcaatgcaacaaaaacacgcggaaaaatcatttgccaaatccatgcaaggggtgaatgaacaaattccagcgaatgacgtctgccatcaagcccagaggccaatgcaaggtggtctgtattcatcacagcaaccttcatcgatgtcttcattaaactccgcgtatcagaatgcctcgatgcctccatctgcctccatggtatcctatccctatccttttttgaaccagcaggggcaaggggtctttccgccttataatgcacaaaatttacaatggcagagcgaagcttactcattaaagtcaatgaattttgcaaatccaacgtggctaggtgaccagcaccagacatctgcgccgtcgtcagcatatgcgcaagcgcaacggcaaatgtttcaacaacatatgcagcaagatgtggggaagtacatgcaatttccttttgacgcccaaagcaacactgacagcatgaggggaagcagtcggaataatatgttttaa

SEQ ID NO: 79612 - DNA, 1317 bp, Saccharomyces pastorianus
atggaaccatcgaatacccaaaaagaagatcttcctaccgcttttaatggtataaaaagtcaattaaacagcatattaaaatcgaatcaattatttcaagattatgcgctattaaatgggttcttggcatttgttcattccaaattgaatgccgcaatccttacatctatagaatcacaatgtgggaaatcctttgcggctgatcttgattcttttgatcagagcagtatctcttcgattttagatttttcttgggaaagcgttcactatccaatattcaaatggtttcagatgtggaggaattatattctttttgagaaggagaataaaaaacagcagaccaaatttatcgactttagaaagatgaattcgaagatgttaaaattcttcaaaacggtgcaaaacttctatgtcaacgttatcaacacggtttataagaaatatgatatatctgtacttttgccgaaaaggattatccaagacttaaagttaagtgacatcgaaaataccactaatgttggagacagtcttgcggtgaagacatttaacagtagtagcccactcgcacatctcatcccaacgcttttccatcgctgtctcttattcttaggaacagcgtatcgttataaaactctcctcgaagaaatttccaataaatacagcatatccaattttaaaaaatctctggacttctttcgtttagcttcgttggtgttaccaagtgctggtgagacgtattcgcaagcaggagcgatattccttcaaacaggaaatttggggattgcagtattcaattttgtcaaaggtatgatgacgaagatgccaagccctgtttcaatcaaaaattttggggcattaatggtggacaataaaagttcattaaatcgtagcttgcatactactatcatgaacacttacttacaagaatctaaaggacccaggacacctgctaaagagatactagaattttattttctgggcctttttgggtctgtttggtcacctaccagttggagagatgatacaaaacctaaccaattaaataacggtatcaagttaaggcatttggaaaatgcactctacgagacgatgtcagcaagatacctgaataatattaagaccatctttcacaatttgatcattacaattggtgggttccatctattattaaaaaggcgttccgatgtaagtgcaaaaaccttgaaggatttacgtagcaatgaattggattacctaaattttgcattcaagtatattgctcacattttaaatgatatcgttaaggaatcatggagcgaaaatcctgaggttcagaaa

SEQ ID NO: 79613 - DNA, 555 bp, Saccharomyces pastorianus
atgaaagatttaaattggcttgaagaaggtcagaaaattaaattcggtccattgaagaagaagacttttttgacacagctgaaaaaagatgtggaattgcttgctaaattgaatacaatggactattccttgttaattggcattcatgacatcaataaagctaaagaagacgacttacaattggcggataccgcatctattgaggagcaaccacagactcaaggacccataagaaccggtaccggaacggtagtacgacatttttttagagagtttgaaggtggaattcgagcatctgatcaattcaacaatgatgtggatttgatttattacgtggggataatcgatttcttgactaattactcagttatgaagaaattagaaacgttttggagaagtctacgccatgataccaagttggtgagtgccatacctccaagagactacgccaataggttttacgaattcatagaagattctgtagatcctctgccccagaaaaaaactcaatcgtcgtatagagacgaccctaaccagaaaaattataaagactga

SEQ ID NO: 79614 - DNA, 1749 bp, Saccharomyces pastorianus
atgtcagtcttgcgatcacaacctccttcagttgtaccgctacatctgacaacatccaccagtcgcaaaacagaacaggaaccatcgctattgcactctgcaataattgagcgacatcaagacctttcggtgccgaattcgaattcgaatccggattcgaaccatcgaataaaaaaggatcgcaataatcacactagctaccattcttcatcgaattcggagtcaaacatggaaagtcctcgcttgtcagatggtgagtcttccactccgacctctattgaagagtcaaacccaacaataaataattcgaggctggtgaagagaaactactcaatatcaattgatcctttgcgtaacaacagcaataataatacggatgatgatcatccaaacaccataacttctccccgaccaaatagcactagtaacaaggaaatgcagaaatatagttttcccgaaggtaaggagtcgaagaaaataacaacaccctcgttaaactcgaataattgtttggatttggacaattccagtcttgttcacacagattcgtatatacaagacttaaatgacgatcatattttactaaacaagcgtgtttcgaggcgatcttccagaatatcggcagtaacagcaacttccacgacaattaagcaaagaagaaatactcaggattcaaacctgcccaatattccatttcacgcttccaagcattctcaaattctacctatggatgattcagatgtaataaaattggccaatggagataccagcatgaaaccaaattctgctactaaaattagtcactcaatgacttctttgcctcttcacccacttccacaaccttctcaaaagtcaaagcaatatcatatgatatccaaatcaaccacttctttgccgccagagaatgaccactactatcaacacagtcgtggcaccaaccataatcacgctgctaatgctgctgctgttaataataatactactactactaccgctgctacgggtctgaaaagatcagagtctgcaacggcagaaattaagaagatgagacaatctttgctgcataaaagagaaatgaaaaggaaaagaaaaacatttttggtggatgacgatcgtgttttgatcggtaataaagtcagtgaaggccatgtcaactttattatagcttataacatgctaactggtattcgtgtcgcagtgtcacgttgttctggcataatgaaacctttaactccggcagactttagatttacgaagaagcttgcctttgattatcacggaaatgaattgaccccttcttctcagtatgcatttaagtttaaggactactgtcccgaagtctttagggaacttcgtgcattattcggcttagaccctgctgattatttggtttcgttaacttccaagtacattttgagtgagttgaactcgccaggtaaaagtggttcatttttttattattcgagagattacaaatatattatcaagaccatacatcattctgagcatattcatctgagaaagcacatacaagaatactataaccatgtaagagacaatccaaacactttgatttgtcaattttatggtttgcatagagtgaaaatgcctatatcgtttcaaaataaaattaagcatcggaaaatttacttcctagtcatgaataacttatttccaccacacttagacattcacattacttatgatttaaaaggttccacatggtggccgtttcaccaatttggataa

SEQ ID NO: 79615 - DNA, 1764 bp, Saccharomyces pastorianus
atgagtagaagaattctacattcttttttggagactaaaagaaggtgtcgcagtacaacagtaaatgacaattatcagaacatttggttgatgcaatccctaatattgagcttcatgttcgctctagttgctgattatttggagaaaattgactcctctttgatgaaaaggcaattgtccgcattatgttcaacgatcagatcaaactgtttaccgacaatttctgcaaattctgagaagagtatcaataataacaatgaacctttaacatttggttctcctcttcaatacatcatttttgagtcaaaaattagatgcaccttaatggcttatgatttttgtcagttcttgaaatgtttcttccatattaaattcgatttgtctataaaggaaaaagatgttgaaaccatttatattcccgacaatgagtcaaaatgggccagtgaatcgataatatgtaatgggcatgttgtgcaaaagcaaaatttttatgattttagaaacttttattacagtttcacgtatggacacttacactcaataccagaatttttagggtcatctatgatttattatgaatacgatttaagaaaaggaaccaaatcacatgtgtttttggatcgaatcgatacgaaaaggctagagaggagtcttgacacttcttcctatggcaatgataatatggcagcaaccaataaaaatattgcgatcttaattgatgacaccataattttgaaaaataatttaatgtcaatgagattcatcaaacagattgatcgctcgtttactgagaaggttagaaaaggacaaatagcaaagatatatgattcctttttgaactctgcgaggttgaattttttgaagaattattcagttgaagtattgtgtgaatttttagtagcgttgaacttttcaatccgtaatatttcgtctttatacgtagaagaagaaagtgattgctcccaaagaatgaattctccagagctgccaaggatccacctgaataatcaagcgctttctgtcttcaatttacaaggctattactattgcttcatcctaattatcaaatttttattggattttgaagcaactccaaattttaagttactgagaatttttattgagttgagaagccttgcgaattctattttacttcccacactttcaagattgtatccgcaagagttttctggatttcctgatgttgtatttacgcaacaatttataaataaagataatggtatgcttgtccctggtttatccgcaaatgaacaccataatggtgcaagtgcagctgttaagactaagttagccaaaaagatcaatgttgaagggcttgcaatgtttattaatgaaatcctagttaactcttttaacgatacctcttttttgaatatggaggatcctattcgaaatgaattttcctttgataatggggacagggcagtgacagacttgcctcgttcagcacatttcctatcggataccggcctagaaggtattaacttcagcggcttaaatgattcgcatcaaactgtttctactttgaatcttttacgttacggggaaaatcattcatcaaaacataaaaatggtggaaaggggcaaggatttgccgaaaagtaccaattatctctgaaatatgttactattgccaagttatttttcaccaatgttaaagaaaactacattcattgtcacatgttagataagatggcaagtgattttcacactttggaaaatcatctaaagggaaacagttga

SEQ ID NO: 79616 - DNA, 390 bp, Saccharomyces pastorianus
atgttgatttctttcggactcgatcatccttccaatcgcgaagatgatctggataagctatgtaatatgaccagagatgttcaagccatattcagtcaatatttgaaaggagaagagtctaaacgatccctggaagactttttatcaacgtcaaacaggaaagaaaagccagatagcggcaactatactttttatgggttagattgtttaacgttatcgaaaatatcaagagctctgccggcctccactgtgaacaacaagcagccatcgcattccatagaatcaaagctatttaatgaaccaatgagaactatgtgcattaaagtgcttagatactatgaaaagttcagtcatgatagtagtgagagtgtcatggactctaatccaaac

SEQ ID NO: 79617 - DNA, 1869 bp, Saccharomyces pastorianus
atgaatacgataataactcacccgggaaaaatggagctggtatacgtgtccgactcagacgattctccttcagataatgatagcctaactgccttggaaagtttaagctctggtgaatcaaatgaaatcaaagtaactaatgatttagatacaagtgctgaaaaggaccaaattcaggcaggcaaatggtttgatcctgtattggattggcgaaaatctgatcgtgaattgacggaaaacattctttggaggatagctgataaaacgacatacgataaagaaacaataactgaccttattgaacaagggatcccaaaacatagttatttaagtggcaatccattaactagtgtgactaacgacatttgctctgttgaaaactatgaaacatcaagtgctttcttttaccaacaagtgcacaagaaggacagattacaatatttgccattatatgcagtttctacatttgaaaacacaaataacactgaaaaaaatgatgtgaccaataaaaatatcaatatagggaaacatagccaagaacaaaattcttcttccgctaaaccatcccaaattccaaccgtgtcttctccattaggattcgaagaaacaaagcaaagtaccacgcctactaaaagcaatagaagagtgtcgcatagtgatactaattctagcaaacccaaaaacacgaaggagaacctttcaaaaagctcttggaggcaagaatggcttgcaaatttgaaacttatttccgtttcgttggttgatgagttcccttcggagctttccaacagtgatagacaaataattaacgaaaaaatgcagttacttaaagatatatttgctaacaactttaaatcagcaatttccaataattttagagagagtgacatcattatactgaaaggtgaaatagaagattacccaatgagttctgaaattaagatttactacaacgaattacagaacaagcctgatgcaaaaaaagccagattttggtcatttatgaagactcagagatttgtttccaacatgggatttgatattcagaagtcctgtgaacctgtttctatatccacgtcggtcaaaccacatgtggtcgagcccgagcatatggcagatgccaaaattatgcctaaggatatactgcaaattacaaaaaaaccgttaatggttaaaaatgtgaagccttcttctccgccagatgtgaagtctttggtgcagctgagcacaatggaaacgaaaaccctaccagaaaagaagcaattcgacagtatttttaattctaacaaagcaaaaataatccctggaaatgggaagcacgcatcagaaaacatctcactctctttctcaagacctgcatcctacggctatttttctgttggaaaaagggttccaatcgttgaagatcgtcgagtgaaacaactcgacgatataacagacagtaatacaacagaaattttaactagtgttgacgttttaggaacacattcacaaactggtactcaacaatcaaatatgtacacatcaacccaaaaaacagaacttgaaattgataataaggatagtgtcaccgaatgttcgaaggacatgaaagaagatggtctttcctttgtggatatcgttttgtcgaaagcagcatcggcgctggatgaaaaggaaaaacaattggctgttgcaaatgaaattattcggtctttgtcagatgaagttatgaggaatgaaattagaataacttcacttcaaggtgatttaacttttacaaagaaatgtcttgaaaatgcgagaagtcaaatatctgaaaaagatgctaaaattaacaaattgatggaaaaagattttcaagtgaataaggagataaaaccgtattga

SEQ ID NO: 79618 - DNA, 810 bp, Saccharomyces pastorianus
atgaagaacctgccaaagatacccttattaaatgatattctttctgactgcaaagcttattttgccacggttaacatcgacgttttgaataacccatccctgcagctgtccgaacaaactcttcttcaagaaaatcccatcgtccaaaataatcttattcacttattataccgatccaagccaaataaatgtagcgtgtgtggtaagagatttggcaactcagaaagtgaaaaactactacaaaatgagcatttggactggcatttcagaataaatacaagaattaagggatcacaaaacacagcaaatacaggcataagcaactctaacttaaatacaactaccacaaggaaaaatattcaatcaagaaactggtatttgagtgactctcaatgggcagccttcaaagatgatgaaattacctccacaaagcataaaaatgattatactgatccgcataccaataaaaatatcgataaaagtgccctaaatattcacgctgatgaaaatgacgaaggctctgtagacaacactttaggaagtgatagaagtaacgagttgaaaatacggggaaaatatgttgttgtaccagaaacttcacaagatatggccttcaaatgtccaatttgtaaggaaaccgttactggcgtttatgatgaagaatctggtgaatgggtttggaaaaatactattgaagtgaatggcaaatatttccactcgacatgttatcatgaaacgtcgcaaaattcaagcaaatctaatagtggcaaggtcggtttggatgacttaaagaaattggtcacaaaataa

SEQ ID NO: 79619 - DNA, 981 bp, Saccharomyces pastorianus
atggatcacgacacagaagttatagtcaaggatttcaacagtattcttgaagaattaacttttaactcgagacccattattaccactctcacgaagttagcagaagaaaacatttcgtgtgctcaatattttgttgacgccattgagagtagaattgaaaaatgtatgcctaagcagaagctatacgctttttatgccttggactccatttgtaagaatgttggcagcccatacacaatctacttcagtagaaatttgtttaacttgtacaaaagaacatacttattggtggacaacaccacaagaacaaaactcatcaatatgtttaagctttggttgaatcctaatgacaccggcctgcctctgtttgaaggctcagcactggagaaaattgaacagtttttaataaaggccagtgctctccaccagaaaaacctgcaagcaatgttaccaactccgactgttcccctcctattaagagacattgataaattaacttgtttaactagtgaaaggctaaagaatcaaccaaatgatgaaaaattaaaaatgaaactgttggttttatctcagttgaaacaagaactgaaaagagaaaaactaactctcaatgctctgaaacaagttcaaatgcaactaaggcaggtcttctcacaggaccaacaagttttgcaggaaagaatgaggtatcacgaacttcagcagcaacagcaacaacagcagcagcagcagcagtatcacgaaactaaggatatggtcggttcttacacacaaaactctaattcagcgattccattgtttggaaataattcagatacaacgaaccaacagaattctttatcttcctctctttttggtaatatttctggcgttgaatcttttcaagaaattgagaaaaaaaagtccctaaacaaaatcaataacctctatgcatctcttaaggctgaggggctcatatatactccaccaaaagaatcatcg

SEQ ID NO: 79620 - DNA, 588 bp, Saccharomyces pastorianus
atggattcatacgaacttgtggaaaatacatgcaacaaagtactcagcaaagttgccacggtatctagggcacaagtggaaatttctgaaaatattgcaaggaaaggttgctctggaggcgggctagacgaactactttgtgatgcagacgaccccttcagcaaaaaagcagatgggccatacgggaccatcggtggtgatggagagactgctggagaagcatacaacagcgatgaggaaacgggtgggaatgacgtggtgctcaatgaactactagaaggaaccagccaaccttccacatcaaaaacatctttacctaaatccaaggggtcctcaacggtatccacaccgaatcattcacagtcaagttcaaacaaggacggggtacgaaacaatgacggcggcaaaaatggcgaagatgaggatacagacaatttgatgggaacagaaaattcattttctttaccgcctacgagaaactctgccgaggaaaccacacaaacgtttaaacaattgtccattagagaagataatgacaatcacagcagcgatacggacggcatgcaagaccagtcaagtaatatataa

SEQ ID NO: 79621 - DNA, 801 bp, Saccharomyces pastorianus
atgcctgacaataatacggagcaattgcagggatctccttcaagtgaccagagactgagggttgactgggacaacggtaaccattttgacgtctctcccgacagatacgcgcctcatctatctgaattttacccaattgtaaatagtaaaagaccagtggctagcagtgctggctcagaaaataacgaccatctggacgacatgaaccatttacgttcatccaaagtgtattcaaaggcccgtcgggcatcgagcataacttctggtacgagcacaataaacgacttgcaaacgctaatcacaaagagagatgtgaaagagacccaggaagccctatcgacattactcaggaactcgaatgcttattcggattcgttattaaagacatctcagaatggggcagaaattgcccattccttagaaaacattgccaagttgaagggttgcaatgatgaaacggcggagaaactattgagtgccagtgggttattctaccttttatctaatcatcagcttataatgtcaaagtatttcaatgacttgttgggagataatttaattgatgatattgatgaattcgaattacagaccaagataatggagaacaaattcaaagcacaaagcaaagagcaaagtttaaaattgaaattgcaggaaagacataacttcgatatctcgaaaagaaaaataaggaatttaatctcataccgagagagcctttctagcttgcaagcaaggttagatcaactggagacactaaaccgatttttacatggattcatacgaacttgtggaaataca

SEQ ID NO: 79622 - DNA, 1242 bp, Saccharomyces pastorianus
atgcataaaactatcgacaagtatggttgtggtgccggtggtacaagaaacattgctggccataacatccccactttgaatctggaagccgaattggccactttacacaagaaggaaggtgccttagttttttcgtcatgttacgtagccaacgatgccgtcttatccctactgggtcaaaagatgaaggacttggtgattttctccgacgaactcaaccatgcgtccatgattgtcggtattaagcatgctaacgttaaaaaacacattttcaaacataatgacttgaacgaattggaacaactgctccagtcataccccaaatccgttcctaaactaattgctttcgaatcagtatattctatggccggttcagtggccgacatagaaaaaatttgcgacttggccgacaaatacggtgccttgaccttcttggatgaagtacatgcggtcggcctgtacggccctcacggtgcaggtgttgcagaacattgtgattttgaaagtcaccgtgcaagtggtattgctaccccaaagaccaatgacaagggcggcgcgaagactgtgatggaccgtgtcgacatgatcaccggcactttaggtaagtctttcggtagcgtaggtggctacgtcgcagcctctaggaaattgatcgattggttcagatcgtttgcacctggtttcattttcaccacgactttaccaccttcagttatggcaggcgctaccgcagcaattagataccaacgttgccacatcgacctaagaacctcgcaacaaaaacataccatgtacgtaaagaaagctttccatgagttgggcattccagttattccaaatccttctcatatcgtcccagtgttgattggtaatgctgatttggctaagcaagcttctgatatcttaatcaataagcatcaaatctacgtacaagctatcaacttccctacggttgctcgcggtaccgaaagattgagaattaccccaacgccaggtcacaccaacgatttatctgacatcttaatcaatgcagttgatgatgtgttcaatgagctacagttaccacgtgtcagagactgggaaagccaaggtggcttattgggtgttggagagagcggatttgtggaagagcctaacttatggacatcaagccaactatctttaactaatgacgacttgaaccctaatgttagagaccccatcgttaaacaactagaggtttctagtggtatcaagcagtaa

SEQ ID NO: 79623 - DNA, 315 bp, Saccharomyces pastorianus
atgcaacgctccattttggcaaggttcggtaactcctctgccgctgtttccacactgaataggctgtccacgacagccgcaccacatgcgaaaaatggctatgccaccgctactggtgctggtgccgctgctgccactgccacagcgtcatcaacaaatgcagcagcagcagcagccgctgctgccaaccattctacccaggagtcgggtttcgattacgaaggcctgatagattccgaactgcagaagaaagacttgacaaatcgtacagatatttcaacaatatcaaccgattggccaaggagttccccctag

SEQ ID NO: 79624 - DNA, 918 bp, Saccharomyces pastorianus
atgtacatggttgtacaatatcaagtacttgaaatctattccatttttgaatcaaaaatgtatatcaactattatacatcgccagaaaccttggtttcttcagatgaaatagaaacatggataaaatacttggattataccatcaccttacaaacagattctttaacacatttaaattttcaaagagctttacttcctctggcccattatgatcttgtatggataaaatacagtaaatggttgataaattcaaaaaatgaccttttgggggcaaaaaacgttctattgatgggtcttaaattttctttgaagaagaccgaaataataaaactactgtattcagttatttgcaagttaaatgagtacgtacttttgcgagatctattggaaaaaattgagtcctcatattccgacaatgttgaaaacgttgatgattttgagatattttgggactatcttcagttcaaaacgttctgccagaattctctgtattccagtcgatattctgattcacaatcaaacgggcttttgaataaggagctgtttgataaagtatggaaacgtttgagttgtaaagaaaaaaaaagtggtcaagaaattttattgaataacttagtacagttttattcgaaggataccgtagaatttgtagaaaagaacatatttcaaaagataatagaatctggttgggaatactacctacagaacggtatgttctggaactgttattgccgtttaatttatttcgacacttctaggtcatatttggacaagaggcaatatattgtcaggaaaatatggccccaaatagacaaaaaatttgcacagagcgtcttgccgtctttaacagaattctgtcagtcatacttcccagaggagatggatacattagaggaaatgtttactgaagaaccttaa

SEQ ID NO: 79625 - DNA, 1887 bp, Saccharomyces pastorianus
atggacttggccacatccagaaatgctgaagacgttgttcagcttttgaagaaagagctgcaaacaaccgtaaataacccagatcaagacaaggcaatgcagtacagacaattgttaataaaaactattcgtaccgtggctgtaaactttgtagaaatggcagcaagtgttgtttcgctattattagatttcatcggtgatttaaactcggttgccgccagtggtatcattgcctttatcaaagaagtgatcgaaaaatacccacaacttagagccaatatccttgaaaacatggttcaaacgctagacaaagtgagatctgctaaagcttaccgcggtgcattatggattatgggtgagtatgctgaaggagaaagtgagatacaacattgttggaagcacattcgtaacagcgtaggtgaagttcctatccttcaatcagaaatcaaaaagttaacacaaaaccaagaacacaccgaagaaaatgaggttgacgctaccgccaagccaactggtccagttattctaccagacggtacgtatgccactgaaagtgctttcgatgtgaagacttctcaaaagtcagttaccgatgaagaacgtgattctagacctccaattcgccggtttgttttaagtggtgatttctacacagctgccattctggccaacaccatcattaaacttgttttaaaattcgaaaacgtttccaagaacaaaactgtcatcaatgctctaaaggcggaagctttactaattttagttagtattgtaagagtgggtcaaagctctttggtggagaaaaaaattgatgaagattctttagagagagttatgacatctatttctattttattggatgaagttaatcctgaggaaaagaaggaagaagttaaacttctggaggttgcattcctggacaccaccaaatcctcattcaagagacaaattgaaattgcaaagaagaacaagcataagagagcattaaaagacagttgcaaaaacatcgaaccaattgatacgccgatttctttcaggcaatttgctggtgtggattctactaatgtgcaaaaagatagtattgaagaagatttacaactggcaatgaaaggagatgcaatccacgctactagcagctctagtatttcgaagctgaagaagatagtacctttatgtggcttttctgatccggtttacgccgaggcttgtattacaaacaatcaatttgacgtcgtattagatgttcttcttgttaatcaaacgaaagaaacattgaaaaacctacatgtgcaatttgcaactcttggtgatttgaagattattgacacaccacagaagaccaacgtgattcctcatggcttccacaaattcactgttactgtcaaagtttcctctgctgacacaggtgtcattttcggtaatattatttatgatggtgcgcatggtgaagatgctcgttatgttattttaaacgacgttcatgttgacattatggattatatcaaaccagccactgctgacgatgaacatttccgtaccatgtggaatgcatttgagtgggagaacaaaatatcggtcaaatcacaactaccaacattgcatgcttatttgagagaactggtcaagggaactaacatgggtattctaacaccatcagagtcgttgggagaagatgattgtaggttcttaagttgtaatctgtatgcgaagtcgtcctttggtgaagatgccctagccaacttgtgtatcgaaaaggattccaaaaccaatgaagtcataggttatgttcgtatccgatcaaagggacaaggtttggctctgtccctaggtgacagagtggcattgattgctaagaagaccaataaacttgctctcactcatgtttga

SEQ ID NO: 79626 - DNA, 918 bp, Saccharomyces pastorianus
atgttagttacaatgctggaaggaaatccaatgcctgaattgttgatgcacataataagatttgtcatgccttctaaaaataaggaattaaaaaagcttttgtacttctactgggaaattgttcccaaactagctgaagatggaaaattgagacatgaaatgattcttgtctgtaatgccattcaacacgatttgcaacatcctaatgaatatattagaggtaacacattaaggtttttaacgaaattgagagaggccgaactcttagaacagatggttccctctgtcttagcgtgcttggaataccgtcatgcatatgttcgtaagtatgcaatcctagcagttttctccattttcaaggtcagcgaacatttacttcccgatgctaaagaaatcatcaattcgttcatagtagctgaaactgatccaatatgtaaaagaaatgcatttattgggttagccgaattagatcgtgagaatgccttacactatttagagaacaatattgctgatatagaaaacctagaccctttattacaagctgtctttgttcaatttatcagacaagatgcaaacaggacccctgctttgaaagcccaatatatcgaactattgatggaactgctttcgaccacgacttccgatgaagtcatcttcgagaccgcattagccctaactgtgttgtctgccaatccaaatgtcttggttcctgcggttaacaaattgattgacttggccgtcaaggtttctgataataacattaagttaattgttctagaccgtattcaagacatcaatgctaataacgtaggtgctttggaagagttaaccctggatattttgagagtcttgaatgcagaagatttagacgttcgttcaaaggcgcttgatatttcaatgggacctgcaggcatcaag

SEQ ID NO: 79627 - DNA, 279 bp, Saccharomyces pastorianus
tgtgcgaaatgttcgtcggaattttcaagatcatcagatttgagaaggcacgaaaagacacacttcgccatattgcctaacatttgtcctcaatgtggcaaaggttttgcaaggaaagatgcattgaaaagacattatgatacactgacatgtaggagaaacaggactaaattactaactgcgggtggtgagggtatcaatgaattactgaaaaaagtcaagcaatccaacatcgttcatcgtcaagataacaaccacaatggtagcagtaatggctga

SEQ ID NO: 79628 - DNA, 345 bp, Saccharomyces pastorianus
atggaggatcaggatgctgcatttatcaaacaggctacagaagcaatagtggatgtatcattaaatatagataacatagatcctataataaaagagttattagaaagggtaaggaataggcaaaacaggttacaaaataaaaaaccagcactcataccggcagaaaatggtgttgatataaatagtcaaggcggtaacataaaggttaaaaaggaaaacgcattaccaaaaccaccgaagtccagcaaaagcaaaccccaagatcgtagaaatagtactggtgaaaaaagatttaaatgtgcgaaatgttcgttggaattttcagtcatcagatttgagaaggca

SEQ ID NO: 79629 - DNA, 873 bp, Saccharomyces pastorianus
atggaaaatgttaatgaagccatcggttaccatattttgaggtatagtatagacaacatgccattaggaaataaaaatgaggctttccagtatctaaaagatgtctacggaattactaataaagaatctactgaatttattgagatgggccaaatcgtacatgatcttaaaaagggtgacacagaaagctgtctgaaatggtgctccaatgaaatggaaagcttatcatctaaccatacggctttatcgtccctaaaatttgatttatacactttgtcagcaatgcagatagtgaagcatggaaatccggtagagttgtactaccaaataacacagaacgcacccctggattgctttagacatagggagaaggaattaatgcaaaacgtcgtaccattattaactaaatcgctaataggtcaacctattgaagatattgattctaaagtaaataaggaattaaaagaatgcacgtccctatttataaaagaatattgtgctgcaaaacatattttctttgactctcccttgtttttgatagtattgagtggtttaatttctttccaatttttcatcaaatacaaaaccatcagggagttagcgcacgttgactggactacgaaagatgagttgccatttgatgtcaagttaccagattttctgactcatttccatccgatcttcatctgtcccgtcttaaaggaggaaaccactacagaaaatcctccttattcactggcatgccatcacatcatttctaaaaaggcgctagacagattatcgaagaacggaacaattactttcaagtgcccatactgccccgtaaatacttcaatgagcagtacaaaaaaggttcgttttgttatgctttga

SEQ ID NO: 79630 - DNA, 366 bp, Saccharomyces pastorianus
atggaaaggcaagtggagagaattgtaaagaagtgtttacaattgatagaaggtgcccgcgccactacaaactgtagtgccacatggaaacgttgtattatgaagcgtctagccgattaccccataaaaaagtgcgtttctatcgaaaaaccttcgaaaggaaactcactaacaagggaagaactaagagatgttatggctcggagagttttgaaaagcgaaatagattcgctgcaagtttgtgaagaaaccatcgacaagaattacaaggttattcctgatgaaaagctgctaactaatattttaaagagaaagttgacagaggaagaaaaaagctctgtcaaacgtccttgcgtgaagaagtga

SEQ ID NO: 79631 - DNA, 984 bp, Saccharomyces pastorianus
atggatgatttttcaagagataccgaaaactttgtttgctggttaaaaactaccgctgaaattgaagtatcccctaagatagaaatcaaagatctttgttgtgataatcaaggccgcgcagtagttgccactcaaaagattaagaaggatgaaacattgtttaaaatacctcgtagttctgttttaagcgttacaacatctcaactgataaaggattatccttctctcaaggataagttcctgaacgaaaccggatcgtgggaaggtttaattatctgtatactttatgagatggaagttttgcaagaaagaagccgatgggcgccttactttaaagtttggaacaaaccaagcgatatgaacgcgttaattttttgggatgatattgaactgcaacttttaaaaccatcacttgtccttgaaagaataggaaaaaaggaagccaaagagatgcatgaaagaattattaaatcaatcaaacaaattggtggagaattttcacgtgtagcgacgtccttcgagtttgataattttgcctatattgcaagcattatattgagttactcctttgatttggaaatgcaagatagtagtgtaaatgaaaatgaagaagaagaaaccagtgaagaagaacttgaaaatgagcgctacttgaaatcgatgattccacttgctgatatgttgaatgcagataccagtaaatgcaacgctaatttaacttacgactctaactgtttaaagatggttgctttgagggatattgaaaagaatgaacaagtgtacaacatatacggagaacatccaaattcggaactactaagaagatatggatatgttgaatgggacggttcgaagtatgatttcggagaagtgttacttgaaaatattgtcgaggcgttaaagagacttttgagacgaatactgaatttttggacaggtgtattgatatcttacgcaataacgccaatattcaagaattcttag

SEQ ID NO: 79632 - DNA, 132 bp, Saccharomyces pastorianus
atggcaactttcttattaaaaggtcaaattagaaatggcgaaactgttagagtggtggttaaagatgctaagcttgtcgtgctaccaaatcatgaagaaggcgaagttgttgaagaggaagctgaaaagtaa

SEQ ID NO: 79633 - DNA, 2022 bp, Saccharomyces pastorianus
atgttaagacaagctacaaaagcaccaatacaaaaatatttacagagaacgcaactattaaggcgaagtactccacgaatatacactattgtacagtgtaaaagatctatttgcagttttaatgcaagacctcgagtagccaataaacttctatcagatataaaaacaaatgcattaaatgaagtcgctatttcaacctgcgccctcaagagctcatatggattgcccaatttcaaaagaacgtacgtccaaatgaggatggatcccaatcagcaaccggaaatgccagctttagaacaatttggtacaaacttgacaaaattagcgcgcgacggtaaattagaccctgtcattggcagagacgaagaaatcgcaagagctattcaaattttatcaagaagaacaaaaaataatccatgtttgatcggtcgagctggtgtcggtaaaaccgcccttattgatgggttagctcaaagaattgttgctggggaggtccctgactcgttgaaagataaagatctagtagctttggatttgggatctttgattgctggcgccaaatatagaggtgaattcgaagaacgtttaaaaaaggttttagaagaaattgacaaggccaatggtaaggttattgttttcattgatgaagttcatatgctgcttggcttaggtaaaactgatggtagtatggatgcttctaacatcttaaagccaaaactggcccgtgggctacgttgtatctctgcaaccactcttgatgaattcaaaatcattgaaaaagatccggctttatcgagaaggtttcagcctatcttattgaatgagccgagcgtctccgatacgatttctatactaagaggtttaaaagaaaggtacgaggttcatcatggtgtaaggatcactgatacagctttagtgtctgctgcagttctttcaaatcgttatataacagacaggtttctacctgataaagccattgatctagttgacgaagcttgtgctgtactacgtttacaacatgaatccaaaccggatgaaatacagaaactggatcgtgctattatgaaaatacaaatagaactggaatctttaaagaaagagaccgaccctgtttccgtggaaagaagagaagcgttggaaaaggacctagaaatgaaaaatgatgaattaaacagattaacaaaaatatgggacgctgaaagagctgaaattgaatctatcaaaaatgctaaggcaaatttggaacaagcaagaattgagttggaaaagtgtcagagagagggtgattacactaaagcatccgagttgcgatattccagaattcctgacttggagaagaaggtagctttaagcgagaagagtaaggacggagataaagtaaatttacttcatgattcagttacttctgacgatatttctaaggttgttgccaaaatgactggtattcctacagaaacggtgatgaaaggcgacaaggaccgcctactgtatatggaaaattctttaaaagaaagagtcgttggccaagacgaggccattgctgctatttctgatgctgtacgtcttcaaagggctggtttgaccagtgaaaagagacctattgccagctttatgttcttaggtcctactggtactggtaaaacagaattgaccaaggctttagctgaattcctatttgatgacgaatcaaatgtgattcgtttcgacatgtcagaatttcaagagaagcatactgtctctcgtttaatcggtgcacctccaggttacgtcttaagcgagtctggtggccaattaactgaggctgtcagaagaaagccttatgctgtcgttttatttgatgaatttgaaaaagcgcaccccgatgtttccaaactactgttgcaagtgttggatgaaggtaagctgaccgattccctaggccatcatgttgatttccgtaacacgatcattgtgatgacctcaaacattggacaagatattttattaaacgacacaaagttgggcgatgatggtaagaattga

SEQ ID NO: 79634 - DNA, 600 bp, Saccharomyces pastorianus
atgtggaaagtgggtgtagtcactgctatgaagattgtgaaacggtattctgaaatgaaagacatccttatacaaatagaacggacagaaaaactttgtttcagtaaggcgttcaagcagcaggttgagttcgccaattatgcgtttcaataccaaagagtgttttgtcctctatcaaatcagattacaactttaaataatattcctaaagcagtcacaaattcccacgctgaaattattaaaattatgaaatgtattggttccgttgttgaaaggggatcaggggtacgaaaagatgtcattaatactaaaaatattgatcacaaagttcatgaaatgatagcaaaaggggagttgcaccctgtagatatggcttctaaacttattaatagagaaagaaaattaaaagcaagaaagctgtttaaagtaagtctacttgggggtgaatccaactcattcaataagaaagtggagcaaccgctagtggatacgcaggacgtgttatcggagagggagaattctcttgataacaaaaacgcatcctctatttatatgacctcaccagcagcgatctcaggcaccgtaccatcaattttctaa

SEQ ID NO: 79635 - DNA, 513 bp, Saccharomyces pastorianus
atgtcaataggcaggggccattggggtggaacaaacgatgggggcagcgctggtgcagcattaggcgttaggaatatcaaaaatcttccaaccctgaaaagtccttcagcgtcgtatgatccctttgcaaccaccgtaaaaaaaaacactctgagacccgtgcaaaacattaaaagaactacacctcaatcagttagttatcgaacttccactaatacagtcgccttctctccaacctatttggaaagtaaaaagggttcctcttctacttctctaaataatagcaaagataaattgaaaagtctcaacctacctcaactacctccaccaaagccaaaggtgcaaattccaggtctgaacagaccccaaattgctgatcctaagcagtggggtaaaaagtcaagcacacaagatactaacgtgcacgataatttgagggaattgaacacaactagtggaggaaataaaaagaaaggcaaacaaaagcagctgttattccacattggtgtatag

SEQ ID NO: 79636 - DNA, 933 bp, Saccharomyces pastorianus
atgagcgaatcagtgaaagaaaacgttactccgacacgtaacttccgtcgtactcaagggccccaaaataatacaaaacctcacaacgacagggagaatttcagaagaaagcaaaagaaaaataacctttctgctgaacccaacctcaccacttcaagcgcagatgatactgatgaagaaaatgaattatgtgtaatttgtgcgcgcaagttaacatacgtatctctaacaccatgccatcataagacatgccatatctgtggtttcagacaacgagctttgtacaacaagaaaagctgtttgatttgcagaacggagaatgaagaagtcatgtttaccgatcgcatagatggtgatatttcagataaatataacttttgcgaaaaaaatgaaaaatatggaataaatttcactagcgaagaggttgctaccgaaacactaaatcttttaaaatttttttgtcccctatcgaaggatgaacaagtttgtgactttggtagtttcaagaaatataatgaacacttgaaatctgaacataacagaatgatctgtttaatatgtgcaacccataagcatgcattcccttgtgagcttgaaatattcacccaaaatcaattacgcaaccatcaaactaagggtaattcagaaggattcaaaggccaccctatgtgtgccttctgttccggaaaacgattttattcagacgacgaattgtacattcacatgagaaatcagcatgaaaagtgccatatttgtgataagatgaaccccgcttctcctcaatactttaaggattataatcagccgtttgaccactttaaacattcgcattacgtttgcaccgtccaaacttgcttagatacaagtttgtcgtatttaaagacgagttggagttacaagcccacattttgcaggagcatggtaatatcctga

SEQ ID NO: 79637 - DNA, 870 bp, Saccharomyces pastorianus
atgtttagaaaatttcgccatgaggcagtagcaagtatactggctgtcggtgtagatccagaaaaggcttcggtgatctaccaatccgccatccctcaacacagtgaattacactggttgctttctactcttgcctcgatgggattacttaaccgcatgacgcaatggaaatcaaaatcgaatatcaaacaatcaactaatggggattatctggttaacgattctgacgtgggaaaagttagactgggcttattttcgtatcctgttttacaggcagcggatattctactttataaatctacacacgttcctgttggcgatgatcaatcgcagcatttggaactaacaagacaccttgctgaaaagtttaacaaaatgtacaagaaaaatttttttcctaaacctgtaactatgttggcacaaacgaaaaaagttttgagcttaagcacgcctgaaaagaaaatgtccaagagtgatccgaatcacgactctgtaatttttttgaatgatgagcctaaggcaattcagaaaaagattagaaaagctttaacagattccatttctgataggttctactacgaccctgtagaaagaccaggcgtatcgaatttaattaacattgtcagtggcattcaaagaaaatcgattgaagatgtcgtagaagatgtatctcgtttcaataactatagggatttcaaagattatgtttcagaagtgataattgaggaattgaaaggcccaagaacagaatttgagaaatatatcaacgaaccaacctatttgcatagtgtcgttgaatctggcatgcgcaaagcgagagaaaaagcagcaaaaaacctggccgacattcataaaataatgggcttctga

SEQ ID NO: 79638 - DNA, 174 bp, Saccharomyces pastorianus
atgtcgaataagcaggcggttctgaagttaatcagtaaaaggtggataagcacagtgcaacgtgccgattttaagctgaattccgaagcgcttcatagtaatgctacggtatttagtatgattcagccaactgggtgtttccaccttggtaattatctaggtgctacacgtgtt

SEQ ID NO: 79639 - DNA, 252 bp, Saccharomyces pastorianus
atgtcttgctcacctgcaatagcccgcgtagaaaaaagccttgaccaaaaattcccaatcgaaaatttggacttgaaatctgaaatcccatgtgattcaatatccggtggagtccacttcttcaacatcaatgaacttagaacgacactggccgagctgaatgccatcgctaaaccggcgagcattggaggaagagttatgccccaaggaatgagcacacccatagcaatcggaatcatgaatatattatag

SEQ ID NO: 79640 - DNA, 108 bp, Saccharomyces pastorianus
atgagattagaagatccaaaggtccaaaaagctgccggagatacgaataattcatgggacagagctcaaattatggataaattgagagctatgaaaaaccgtatgtag

SEQ ID NO: 79641 - DNA, 591 bp, Saccharomyces pastorianus
atgcaggttaaatcgattaaaatgagatgggagtctggtggtgttaattactgctatctattgtccgacagtaaaaataaaaaatcgtggctaatcgatccagcagagcctcctgaagttctgcctgagttgaatgaggatgagaaaataagtattgaagcaattgttaatacacatcaccattatgaccatgcagatggtaacgctgatatcttgaagtatttaaaagagaaaaatccaacttcaaaagttgaggttataggagggtcaaaggactgcccaaaggttacgataattccggagaacttgaaaaagttacacctgggtgacttagagattacttgtattaggacgccctgccataccagagactctatctgttattatgtgaaagatccaacaacagatgagcgctgcatttttactggcgatacactatttaccgctggttgcggtaggttttttgagggtacaggcgaagaaatggatatagctctgaacaattctatcttagaaactgtgggcaggcagaactggagtaaaacgagggtttatccaggacacgaatacacagtgatatgtaacgttgtc

SEQ ID NO: 79642 - DNA, 993 bp, Saccharomyces pastorianus
atgcattcagcgagcaggagatcaagcgtggctgaaagtgggagtttactttcggataatgcctcgtcttatcaatcaagtatattttctgctccctctactgtgcacacgcaactaactaatgactcttcgttctccgaatttcctaaccacaagttaatcacgagagtgagcctggatgaagcattacccaaaacgttttatgacatgtattcgccagatattctattagcagacccatccaacattctctgtaacgggcgtcccaagtttaccaagagagagttattggattgggatttaaacgatataagatcgttattgatagtcgagaagttaaggcccgaatggggtaatcaactaccggaagtaataacggtgggtgataatatgccccagtttaggttacaattattaccactatattctagcgatgagaccataatcgcaacgttagtccattcagatctgtacatggaggctaacttagattatgaattcaaactaaccagcgccaaatatacagtagctaccgctagaaaaagacatgagcatataactggtagaaatgaagccgtcatgaatttgtcgaaaccggaatggagaaatatcatcgaaaattacctcttaaatatagcagtagaggcacaatgcaggtttgatttcaaacaaagatgctcagaatataagaaatggaagttacaacagtccaacttaaaaagaccggacatgcccccaccaagcataataccgcggaaaaacagcacagaaacaaaatcgcttctgaaaaaggctttattgaagaacattcagttgaaaaaccccaataataaccttgatgaattgatgatgagatcaagcgccgcaacaaatcaacagggaaaaaacaaagtcagcttatctaaagaagaaaaggctacgatatggtcgcaatgtcaggcacaagtttaccaaagattaggattggattggcagccagattcagtatcctga

SEQ ID NO: 79643 - DNA, 882 bp, Saccharomyces pastorianus
atgaaattgcttactatgcaaggattacaaccgacaaatttgatacctgatgaaatcgtgtcatttagttatcaggataatggcaataaaggtgacgtaatgattttaggtcaaaatggatctattgtaagctggggcttcagtgaatctagtgttcgaaactgcatagtgcctatagttaaagcagcgagtttaaatccactgaacggagaagactttgagactgaggacatggattatgtggaaatagaaggggaacaagattttgataagctttccagtttggataataaggtaacaccgaggattgcatgcgaaagctttctttctggagatttgataataattaactccttggattctgatcaaggaatgctagataaggcggcattctcaagtgggctatcgagaagcaccaacttggcagtcctagaagaagcaatggaaaaacatatatcaaagaccagaacaataacagaaaatatttctaagggaacaaagttaaatctaaggtcaagtgatgcattaaagtcaataggccgcctttttctaattagaggaaagttgaacctctattcagaactaattgagacccctgatctttattggagtgaacctcaattggaagagatttttaaaaatgtttcgaggtatttggacataggcccaagaataaatattctgaacagcaagctggactattctacggacgagtgtcgagccctcatctctcttttaaacgagagaaacagcacttttttggaatggataattatatacctgattgctttcgaactgtgctttgaaatttatcatttctaccagaaatattcttcctactgctcagaacccacgaatgatgatctagatgctacaaagtaa

SEQ ID NO: 79644 - DNA, 3411 bp, Saccharomyces pastorianus
atgaaattcttaaggaccaatattgactctacaatcaatcgatttaacttagtttccgaaagtgtcaattctaattccttggagttaactcctggagacaccataaccgttcggggcaatggaggtagaacactttcacaatcgagtatacgaagaagatcatttaatgttggttccagattctcttctataaatcctgcaacgcgatcacgatatgcttctgactttgaagagattgcagttttaggccagggcgcatttggacaagttgtcaaggcacgtaatgctctcgatagcagatactatgcgatcaagaagattaggcatacagaagaaaagttatctactatattgagtgaagtaatgctgttagcaagcttaaatcatcaatatgttgtgcgttactatgctgcatggttagaagaagacagtatggatgaaaacgtttttgaatcaactgatgaagaaagtgacttgagcgaatcttcctctgattttgaggaaaatgatttattagatcaaagcagtatttttaaaaatagaacaaatcacgatttggataatagtaactgggatttcatatcggggtcaggatatccggatattgtctttgaaaatagttctcgtgatgatgaaaatgaagatttagaccatgatacttcctcgacttcctcgagcgaaagtcaagatgatactgataaagaatcaaagagtatccagaacgttccaagaaggaggaattttgtaaaaccgatgactgctgttaagaagaaaagtacgctttttattcaaatggagtactgtgaaaatagaacgctatatgatttgatccattctgaaaatttaaatcaacaacgtgatgaatattggaggttatttcgacaaattttggaagcactgagttatatacattcccagggtatcattcatagggatctaaagccaatgaatatttttatagatgaatcgagaaatgttaaaatcggtgattttgggttagctaagaacgtccatagatctctggatatacttaagctagattcacagaatttgccaggcagctcagataatttaacatccgccattggtacagcaatgtatgttgctactgaagttttagatggtacaggtcactataatgaaaagattgatatgtattcacttggaatcattttttttgaaatgatctatcctttcagtacaggtatggagagagttaatattttgaaaaagttacgatcagtgtcgatagaatttcctcctgatttcgacgataataagatgaaagttgaaaagaaaattataaggttactcatagaccatgatcccaataaaaggcctggtgctaggacattattaaatagtggttggcttcctgtgaagcatcaggatgaagtaatcaaagaggctttaaaaagtttgtcgaatccttcatccccttggcaacagcaagttcgagaaagtttatttaaccaatcttacagtctaacaaatgatattctatttgataactcagttccaacatccactcctttcgcaaacattctcaggtcccaaatgacagaagaggtagttaaaattttcaggaaacatggaggaattgaaaataatgctcctccgaggatttttccaaaggcccccatatacggtacgcagaatgtatatgaagtgcttgacaagggcggtaccgtcttgcagttacaatatgatttaacttatcctatggctaggtatctatctaaaaatccaagtctgatttctaagcaatataggatgcagcacgtttaccgacctcctgatcattcaaggtcaagtttggaacctagaaagtttggtgagattgacttcgacataatttcaaaatcttcctcagagtcaggtttttatgatgcagaaagcttgaaaattatcgatgaaatattaaccgtatttcctgtatttgagaaaacaaacacttttttcatattaaatcatgctgatattttggagagtgttttcaactttacaaatattgataaagcccaaaggcctctagtttcacgaatgttgtcgcaagtaggctttgcaaggtccttcaaggaagtaaagaatgaactaaaggcgcaactgaacatatcttctacggcattgaatgatttggagttatttgattttagactggacttcgaagcagccaaaaaacgcctgtataaattgatgattgatagtccgcatctaaaaaaaattgaggactctttgtcccatatatcaaaggttctcagttacctaaaacccttagaagttgcaagaaatgttgtgatatctcctttgagtaactacaatagcgctttttacaaaggaggtatcatgtttcatgcagtttatgacgatggatcctcacgtaatatgatagctgctggagggaggtatgacactttgatatccttttttgccagaccatcaggaaaaaagagcagcaatactcgtaaggctgtaggtttcaacttagcgtgggaaacaatattcggtatagcccaaaactatttcaaactcgcttctggaaataggataaagaagagaaataggtttttgaaagatacagctgttgattggaagccaagcaggtgtgatgtattgatatcgagtttttcgaactctttgttggacacaatcggggttacaatactgaatacattgtggaagcaaaacattaaagcggatatgttaagggattgttcctcggtggatgatgtcgttactggcgctcaacaggatggtatagactggattttgctgattaagcaacaagcgtatccactaaccaatcacaagagaaagtacaagccattaaaaataaaaaaattgagcactaatgttgacatagatttagatcttgatgagtttttaaccttgtaccaacaagaaactggtaataaatctttgatcaacgatagtctcactttgggcgataaggctgatgaatttaaaagatgggatgaaaacagcagtgccggtagtagtcaagaaggtgacatagatgatgttgttgctggttcgactaataatcaaaaggtaatttatgttccaaacatggctacaagatctaagaaagctaataaaagggaaaagtgggtttatgaggatgcagccagaaattcttcgaatatgatattacacaatttatccaatgcaccaattatcactgttgatgccttaagagatgaaactttagaaataatctcaattacttctttggctcagaaggaagaatggctgagaaaagtttttgggtcaggtaataactcgactcctagaagctttgccacgagcatttataataacctctccaaagaggctcataaagggaataggtgggcaatattatactgccacaaaaccggaaaatcatctgttatcgatttacagaggtag

SEQ ID NO: 79645 - DNA, 1452 bp, Saccharomyces pastorianus
atgtcattgagtcatctcactttagatcaatattatgaaatacagtgcaacgaacttgaagcgatacgttccatttatatggatgactttactgacttaactaaaagaaagtctagctgggataagcagccacagattatattcgaaattacgcttcgatctgttgacaaagagccggttgaatcttctataacattacattttgcgatgaccccaatgtatccttataccgctccagaaatagaattcaaaaatgtacaaaatgtaatggatagtcaattgcaaatgctgaaaagtgaatttaagaaaatccacaacacctcccgaggccaagagattatatttgaaattacatcttttactcaagaaaaactggacgaatttcaaaatgtggtaaatacacagtccttggaagatgatcgattacaaagaatcaaagaaactaaagaacaattagaaaaggaagaaagagaaaaacaacaggaaacaataaaaaaaagatcagatgagcagcgaaggatagatgaaattgttcaaagagagttggagaaaagacaagatgatgatgatgatttgctattcaacagaacaacccagttagatttacaaccaccttcagaatgggttgcatcaggtgaagctattgtgttttcaaaaactataaaggcaaaattgcctaataactcaatgttcaagtttaaagcagttgtaaatcctaagccaataaaactgacatcagatatatttagtttttccaaacaatttcttgtgaagccttatataccaccagaatctccgttggcagattttttaatgtcttctgaaatgatggaaaatttctactatttgctatctgaaattgaattggataatagctatttcaacacaagtaatggaaaaaaagaaatagcaaatttagagaaagagttagagacggtgttgaaagctaagcatgacaatgtgaatcgattgttcggttatacggtggagcgcatggggagaaataatgcaacgtttgtttggaaaataagactcttgacagagtactgtaactactatccattgggagatttgatacaatctgttggatttgttaacttagcaacagcgcgtatttggatgattagattgcttgaaggattggaggccatacacaaattgggaattgttcataaatgtatcaacttagaaaccgtgatcctggtgaaggatgcagattttggaagcactattcccaagttagttcactccacttatggctacactgttttgaatatgctatcgagatatccaaataaaaatggttcttcggttgagttatctccaagtacatggatagcccctgagttgttgaaattcaataacgccaaacctcaaagattaactgatatttggcaacttgacgcccgatctcaagatttcgtggtaataaattacagtcttgcgccttag

SEQ ID NO: 79646 - DNA, 288 bp, Saccharomyces pastorianus
atgcctttatggagaaaaatggtggcctttctaccactgttaggagctgcactaattgctctatccagaactcaagattacagacatcatttcgtcgatgtaattttagggtctatgttgggttatataatggcacactttttctacagaagaatcttcccacccattgatgatcctcttccgttcaaaccattgatggacgattcagatgtcaccctggaggaagcagtgacccatcagaggatcccggatgaggaattacatcctttgtccgatgaaggtatgtaa

SEQ ID NO: 79647 - DNA, 186 bp, Saccharomyces pastorianus
atgatacttcttaactacccagtgtattaccaacaaccgatcgaacgtcagttttacattaacgatctcactatatcgcatccttatgcgacaactgaacgtgtaaataacaacatgttgtttgtttatagttttgtctgtgccatctttaaccatattgataattggttccatttcggccgatag

SEQ ID NO: 79648 - DNA, 93 bp, Saccharomyces pastorianus
atgaaacctccaatttcttcaagaaaaaaattactactagtagaagacgaagaccagtcattaaaaataagcaagaaaaggagaaggaaatag

SEQ ID NO: 79649 - DNA, 690 bp, Saccharomyces pastorianus
atggccaagtatcccagtttcaaatttatcggagaagaaacttatgtaaaaggtgtcacgaaaataactaacggccctacatttattgttgatcccatcgatggtactactaattttattcacggttacccctatagttgtacatctctaggtttagctgaaatggggaagccggttgttggtgtggttttcaatcctcacttaaaccaactattccatgcttccaaaggcaatggagctttcttaaatgatcaggagataaaggtttcaaaaaggccattgattttgcaaaaatccttaattgctttagaaggaggttcggaaagaactgaaggttcccaaggaaactttgataagaaaatgaatacttataaaaacttactaaatgagtccggcgcctttgttcacgggttcagaagtgcaggaagtgctgccatgaacatatgctacgtagcgagcggcatgcttgatgcttattgggaaggtggctgctgggcttgggatgtttgtgccggttggtgtattcttgaggaagcaggaggaataatggttggcggaaattgtggagaatggaacattccattagacagaagatgttacttggctattagaggtggatgtgagtcgatggagcagaagcgatttgcagaatcgttttggcctcacgttgcgggtgagttagaatactaa

SEQ ID NO: 79650 - DNA, 78 bp, Saccharomyces pastorianus
atgggccttgaaaaggagcagactaaaagtttgcacgatgatataataaaaagcattggcgattcatattctatatag

SEQ ID NO: 79651 - DNA, 477 bp, Saccharomyces pastorianus
atgagttctacagataatgacagcgatgtggatttaacagaagatttagccgtggccaagatcgttaaagagaatcctgtagctagaaaaatggttaggtatattttatcgagaggagaatctcaaaattcgatcataacaagaaacaagttgcaatctgttatacatgaagctgctcgcgaggaaaacatagcaaaaccgtcttttagtaaaatgtttatggacataaatgctatactgtataacgtatatgggtttgaattacaaggattgccgtcaaaaaataatatgaacgctggcggtaatggaagcaatagcaatacaaataaatcaatgcctgagccactgggacatagagcccagaaatttatcttgctaaacaatgtcccgcactcaaaaaattttgacgatttcaagattttacaaagcgctcacacttatgaagagctaatagttaccgggagagtatattggtga

SEQ ID NO: 79652 - DNA, 2700 bp, Saccharomyces pastorianus
atggatatcaatgacgacgatgatgaggaaatggacgatttatacgccgatgaagctcctgaaaatggactaacgactaatgattccaaaggcactgtggaaactgttcaacctttcgatatcgaactgttatcatctctaaggaatgttggtcccatcacatcgttaactgtaggtaaggtatcttccattgatgatgtggtaaaaggactaccaaatccaaacaaaaacgagtattcgctagttgccacatcgggaaatggttcaggttctcatttgaccgtcatacagactagtgttcaaccggaaattgaattagcattgaaatttatcagtataacacaaatctggaatcttaagatcaaaggaagagataggtacttaataactactgattccacaaaatcccggagtgagatatatgaaagtgacaataacttcaaacttcataagggcggccgtttaagaagagatgctactacagtttacatttcaatgtttggtgaagaaaaaaggataatacaagtcaccaccaatcacttatatttatatgatacacattttagacgtctcaccacaattaaatttgactacgaagttattcatgtttccgtcatggatccgtatatactagttaccgtatcaaggggtgatattaagatatttgaattggaggaaaagaataaaagaaaattgttaaaagttgatttgccagaaattttgaatgaaatggttattacatctggtttgattttgaaaagcaatatgtgtaatgaatttttgattgggttgagtaagtctcaagaagaacagttattgtttacatttgttactgcagataaccaaattatcttttttactaaagaccataatgacagaatctttcaactaaatggtgttgaccaattaaatgaatctttatacattagcacttatcaactgggcgatgagatcgtccctgatccgtcgattaaacaagtaatgataaacaaactgggccatgacaataaagaagaatacctgacaatattaaccttcggaggagagatttaccaatatagaaaattaccacaaagacgtagtagattttatagaaacgttacaagaaatgatctagctattactggtgctcctgacaatgcatacgccaagggtgttagttccatcgaaagaatcatgcattactttcccgattacaacggttattcggtaatatttgtaaccggtagcgttccatacatattaataaaagaagatgattccacaccgaagattttcaaattcggaaacataccattggtttcagtcactccctggagcgagcgttcagtcatgtgtgtagatgatattaaaaacgccagagtttacacactaactactgacaatatgtactatggtaacaaattaccattgaaacagataaagatcagcaacgtgcttgatgactacaaaactctgcaaaagttagtctatcatgaaagggctcaattgtttcttgtatcttattgcaagcgggttccttacgaagcattaggagaagatggcgaaaaagtaattggttatgacgagaatgttcctcatgcggaaggatttcaaagtggaattttactcattaatccaaaaagttggaaggtcattgataaaattgactttccaaagaattctgtcgtcaatgaaatgagatcctctatgattcaaattaattcaaaaactaagaggaaaagagaatacattatagccggtgttgccaatgccaccactgaagacactccaccaactggcgctttccatatttatgatgtgatagaagttgttcccgaacctggtaaacctgataccaattataagctcaaggaaatttttcaagaagaggtcagtggtactgtatctactgtttgtgaggttagtggaagattcatgattagtcaaagccaaaaagttctagtaagagatatccaagaagataattccgtcataccagtggcatttttggatattcctgttttcgttacggattctaaaagctttggtaatcttttgataattggtgacgctatgcaggggttccaatttattggttttgacgcagaaccatacaggatgatttcattgggtagaagtatgtcgaaatttcaaacaatgtcgctagagtttttagtgaacggaggggatatgtattttgcggcaacagatgctgacagaaatgttcatgttttaaaatatgcgccagatgaacccaactctctttcgggtcaacgtttagtccactgctccagtttcacgttgcattccaccaatagttgtatgatgcttttaccaagaaacgaggaatttggctctcctcaagtgccatcgtttcaaaacgttggtggccaagtggatgggtcagtcttcaagatagttcctttaagtgaggagaaatacagaagactttatgtgattcaacaacaaatcatcgatcgagaattacagctaggtggtttaaaccctcgcatggaaagattggccaacgacttttatcagatgggtcactctatgaggcctatgcttgatttcaacgttatacggaggttctgtggattagctattgatagacggaaaagcattgcgcagaaagcaggaagacatgcgcattttgaagcatggagagatatcataaatattgaattttcaatgagatctttatgccagggtaagtga

SEQ ID NO: 79653 - DNA, 111 bp, Saccharomyces pastorianus
atgttcagggagaaaaacactacgtcaatttggataccttcgtccaagagcaaaaacggaggaagtaataatgacgaaacactactacttatggaacttgaaatccaatat

SEQ ID NO: 79654 - DNA, 942 bp, Saccharomyces pastorianus
atgaatgtatatgatgatgtgcttgacgctactgttgtgtctcattcattagcaacacattttactacttcagattatgaggagctcttagtggtgcgaacaaatatcctttctgtctacaggcctactagggatggtaaactgtatttgactgatgagtttaagtttcatggcttgatcaccgatataggcctcattccccaaaaagacagtccgttaagttgcctgcttttatgcacaggcgtcgctaaaatctctattttaaagttcaacacgctaacaaactcaatcgataccctaagcctgcattactacgaaggaaagttcaagggtaaatcgttggtagagctggccaaaatttccaccttgagaatggatcctggaagttcttgtgccttactgttcaataatgacattatcgcttttctacccttccatgtcaataaaaatgacgacgatgaggaggaagaagatgaggacgagaacatagacgatagtgaattaatccatagcatgaatcaaaaatcccaagggacgaatactttcaataagaggaagagaaccaagttaggtgacaagttcacggctccaagcgtggtattggtagcgagtgagttgtacgaaggcgccaaaaatatcatagatattcagttcttgaaaaattttactaaaccaacgatagcgctcttataccaaccaaagcttgtttgggcaggaaacaccaccatttcaaaactccctacacaatacgttatactcacattaaatatccagcctgcagaaagtgccaccaagattgaatcaaccacaatagcatttgtgaaggaactgccttgggatctacacaccattgtacctgtttcgaatggtgctatcattgtgggaaccaatgaactggcatttctagatatactggcgttttacaatcgacaatattattaa

SEQ ID NO: 79655 - DNA, 663 bp, Saccharomyces pastorianus
atgcttatatgcgtgaagtgcgctttagtaagaacatgtggctgtttctgtagaagccttgtctttctctgtattcctttaaaggccaaccgtacgtgcttaattacaagctttgttcgcattgcaagaaagttagaaaaaaaatcaattctgaaagataattataattcaaacggtaaaccattggttaaaaaggaacataacatttcactagttcaatacattatatgccctttaacaatgacagatagattaacacaattgcagatatgtttagaccaaatgacggagcaattctgtgctactttaaactacatagataagaaccatggttttgaacgattgaccgtaaatgaacctcagatgtccgataaacatgccacagtagtacctcctgaggaattttctagcacgatagatgagctatccacggacattatacttaaaacaagacagataaacaagcttattgactcgttacctggtgttgacgtttcagctgaagagcaattaaggaagattgatatgttgcagaaaaagctagttgaagtggaagacgaaaaaattgaggccatcaaaaagaaggagaaacttttaaggcacgttgattctttaattgaagattttgtagatggcattgcaaactcaaaaaagagcacataa

SEQ ID NO: 79656 - DNA, 1296 bp, Saccharomyces pastorianus
atggattgtttcgtgtctggtatatattattgctactgctcaagagagcttctttttttatgctatcgaactcgatctttcgctccgaaacacctaacactaacaaaaggatacctgacagaatacgctatcaaaagaacgaatatgactagtgcaagtgttaccaatactggaaacgaaaccatgaaccttccacagatgcggtcgatttggctggatgaagatgaagaagctgaaaaactctacagtctgcaggcccagcaattcatgggatctgatgatgaagaaaacctaggcattactttcatcaacagcgataaacctgtgctgagtaacaagaaaaacattgagttgcctccactttcaccaaattcacatccgtcttgccaccacaggagaagtaattctaactctgcaaagtctaaagaatcatcgtcatcatcgtccagcgccaacaagacaaatcacaaaaaggttttccttaagctcaatttgttgaagaaaaagttgcttggtgcccaaccggacataagaggtaaaggtatctccacgccatttgattttcaacatatttcacatgctgacactagaaatggattccaagatgagcaattgcaggaaccttcatcgctgtccacagagattaaggacgactatacctcctcctcaagcaagcgggattcgaaatcactaaataaagcttttgtcactgaaaggatccctgctaatcgtgaaagcaaactcatttcaagatcgcacgaaaataagacatcaagactatcagtcgcgcgttcgatctcagtaacgtcctccaattactctaaaaacacacaaggaaacaatcattccattaatgggagagtcgtatctacgtcaactatggctacatctatttttgagtattccccaaacgcatctccaaaacaatttaacaataagtcacacgctctgggtcatagatacactaattccacggattctagtgagtcttcgctggattttttgaagaactacaacttccccacactacttgaagataagcctattttagacttcttgcctcgttctcaaaggtcaagcgcttatcgtagccttttagagaccccaaactcaaataaggattcagcaaaagccttctttccttcacgccaaagtcctcttcccaagagaagaaactctatagctacgccttctccacaatctaaattttcctactctgactcccctgtaaaccatagaaaatctttcgatgatgttctttattctttcaaccagctcgagcccctgcaaacttaa

SEQ ID NO: 79657 - DNA, 1026 bp, Saccharomyces pastorianus
atgcaaaatgatagaggtgacgtaatcattgacaggtacttgacattggatcaagagttcgacagaaaagatgatgacatgctattgcatcctgtgaaaaaaattatagatttagatggtaacatacaggacgacccagttgtacgaggcaacaggcccgacttcactatgcagccaggtgtggatattaatggtaatagcgatggtaccgtggacatcttaaagggtatgaatagattgagtgaaaaaatgattatggctttgaagaatgagtattcaaggacaaatctacagaacaaatctaatattacaaacgatgaggaagatgaagataatgatgaaagaaatgaactgaaaatcgatgacttaaacgaaagctacaagacaaactatgcaatcatacacctgaaaaggaacgcacatgaaaagacaaccgacaacgatgcgaaaagctcggcagactcgataaagaatgcagatttgaaggtttctaatcaacaaatgttacaacagttgtcattggtcatggataatttaattaataggctagacttgaaccaagtagttcctaacaacgaagtcagcaacaagatcaataaaagagtcataactgcaatcaagattaacgccaaacaggctaagcataacaatgttaattcagcactcggctcttttgtcgacaacacttctcaagcaaatgaattagaggtgaaaagtaccctaccaatagacctattagaaagttgtagaatgctacacacaacgtgctgtgaatttctaaagcacttttatattcattttcagagcggtgaacaaaagcaagccagtaccgtcaaaaaactttataatcatttgaaggactgtattgaaaagctgaatgagctatttcaagacgtccttaatggtgatggtgaatctatgtcaaacacatgtaccgcctatttgaagccagttttgaactccattactttggctactcataagtacgatgagtacttcaacgaatataacaacaattcgaactag

SEQ ID NO: 79658 - DNA, 441 bp, Saccharomyces pastorianus
atggaggaacctaagccttcagaaaattcgcaaccaactccacgtaagaaggctatcaaactgactgaattaggaccaagattaactctaaaactggtcaaaatagaagatggtatttgttcaggtaaagtattacatcatgaatttgttcaaaaatcaagcgaagaaatcaaagccttagaaaagagacacgctgcaaaaatgaggctgaaggaacaaagaagaaaggaacaagaagaaaacattgctaaaaaaaaggctgttaaagatgctaaaaagcaacgtaaattggaaagaagaaaagctagagcagaagaacagggtgaaggtcaagggaaagatggtgcaatgagcgatgatggatcttcatcgagtgaagatgagcattatagtgatgtaccagaggatttggatagtgacttattcagtgaagtagaataa

SEQ ID NO: 79659 - DNA, 873 bp, Saccharomyces pastorianus
atggctaaaagaaggcagaaaaagagaacgcatgcgcagatcacacccgagcaggaacgagatattcctaaatccatggtaatcagagtgggacaaacttcattggctaaccattctctaaaccaattagtaaaggattttcgccagatcatgcaaccgcatacggccgtaaaactaaaagagcgcaagtccaataaactgaaggattttgttgttatgtgtggcccattaggtgttacgcatcttttcatgttcactcaatctgaaaaaacaggaaatgtctcgctaaagatagctagaactccacaaggtcctactgttacttttcaagtattggactattcactgggtagagatatcaaaaaaattttgaagagacctaaatcgttaaataatgatgatgtattaaatcctccattgctagtgttaaatgggttttccacatcgaaaagatctgatgaagacgatcaggatgtaaacgtggagaaggttattgtttccatgttccagaatattttcccacctctgaatcctgcaagaacttcgttgaattctatcaaacgtatatttatgatcaataaagacagagaaacgggggaaatttctatgcgccactattttattgacattcgagaagtagagatctctagaaatctaaaaaggctttataaagccaaaaataatctaagtaaaacagtgccgaatttgcatcgaaaagaagatatttcttctttgatattagatcatgacttaggcgcctatacatcagaatctgaaattgaagatgacgctattgtgagagtggttgataatcaggacgtgaaggcaaaacattctcaaacttcgctgtcgcaaaaaacacccgttaaatga

SEQ ID NO: 79660 - DNA, 240 bp, Saccharomyces pastorianus
atgttagtgtacaagatatcgcctaatacaacagataatgcaattaaggagtgcccgatttgttttgagaatatggaacccggtgagaaagttgggagactagaatgcttgtgtgttttccattataagtgtattaagaactggtttcacaaaagggcgcaaatgactgcagcccagaagggaaatggacatgcttttgttaaaaggaacttttgtcctttccatgatgccgtattttaa

SEQ ID NO: 79661 - DNA, 1104 bp, Saccharomyces pastorianus
atgaccaagtacatgatcggtgcttatgtgatatttttaatctatggtctcttctttaccaaaaaactgtttgcgaaagacaaagaactggaaagattgttgaagaaacaagaagaagggaatgccaatgaatacgaagcattaaggattaaagaattgaaaggaaaactaaggaggagagatgaattgaaattagaagaatacaaaaaaatgcaagaagaaggcattgaaaacttcgatgatattcgggtacagaattttgatcaaaacaaattgaatgaacaaatattgccagcaagagacacaacaaacttttaccaagaaaaagctaacgaatatgataaggcaattaatatggaagagagagtaatatttctcggtaaaagaaggaaatggttaatgaaacattgtcaaggggatgttttggaagtttcatgcggtacaggaagaaatatcaagtaccttgatatgtcacgcatcaactctataacattcttagactcttctgaaaatatgatggaaattacacataaaaaattccgagaaaagtttcctaagtataaaaaagttgcatttgttgttggaaaggcggaaaatctagtagacttagcagagaaaggtaagccctctctagagaatgaaaaggaaaaccaagtaaaatatgatactatcgtggaggcgtttggtttgtgttcccatgaagatccggttaaggcacttaataattttggcaagttattaaagccagatggaagaattattttactggaacatggtagaggtcaatacgattttataaataagatattagacaacagagctgaaagaagactgaatacttggggctgtcgatggaatctcgacttaggcgaagtgttagatgattctgacctagaattggtggaagaaaaacggactcacttaggcactacttggtgtatcgttgcgaagagaaaaggtgatgtgaaaaagaaagacgagcttgggtttgtagaaaaatacttgcaatcaagtattagaaagagaatggaatcattcgaaaaaaaagacgatatggcatctaaaaaagaacttgagccagtacctcctgtaagtaaaagttaa

SEQ ID NO: 79662 - DNA, 444 bp, Saccharomyces pastorianus
atgatcgtatttcgtcgctttcctacgtgccttttacatcacattcgacaaccggcatccaggagtcttttgttggaatcacaaaggcgatcattatcttttacatcttataaatataacagcagccacattgatgatgataaaagtaaaaaaaagcttaaaaatgttttccaaatgaatagcaatagagtcattcgtaagcaaaaaacaaaagaagaattggccaaagagaggttcgaagaacaactgaggtcacctaatagatttgtgaggtgggggagctattgcgagatcagaaaagttttcaaagggaatgaccaagtacatgatcggtgcttatgtgatatttttaatctatggtctcttctttaccaaaaaactgtttgcgaaagacaaagaactggaaagattgttgaagaaacaagaagaagggaatgccaatga

SEQ ID NO: 79663 - DNA, 195 bp, Saccharomyces pastorianus
atggtttcgttttttgtgaaggatattaaggtcgagttgtttgtaaaacaaaatgaaatagtttcatgttcaatattggacgatattcatgattttagtcaaaataataaaagtaaatgggaaattgcattgctcggttctttggatgatttggaattaaagttaaaccattcttttgcgacaatattcaagtga

SEQ ID NO: 79664 - DNA, 516 bp, Saccharomyces pastorianus
atggttcagcaccaaatgtttgatcctggggtggcagatttattggatacagacattctaacgtcaccttcaaaaagaaagcgaaaactaaaaatagacgatattagtacaagtgatagaagtgagttggaagattatattgtcctggaaaatgtttatagaatgtttggtataacatttttccctcttgtggaccctattgaccttaaaataaaagatgctagcggtgaaatatttgttgatagagaaatgctgggaatacgactggaagtcttcagtgaacggacatcccaatttgaaaaacctcactatgtattgttgaaaaagaggatcaaatcgaatagttggttcctgttcaagcatacaatcccgagtttcattgatgtccaaggtatatttgatgacaccaatgggggactagtgatatctcatgatgacgcctatttatttgctaaaagagtcttcctgcaacttgtggaagtaacctgcagcatcaagctgcactgccgtccttta

SEQ ID NO: 79665 - DNA, 453 bp, Saccharomyces pastorianus
atggtagtgatttcaactgaatcgcttttcatgatacccttccaaaagtgcgatgagagtcctgttatccttcactgtcttcaaacacatttcttcaacaaagtcatcgtcatcatcttttttttttttttcatcgagtattttttcacacgaacggcacaagtagccttcaactgtaataaacaaaagcagatagggaggaaaagaagtgagtttaggagaagaaagcataacatggagaaccctcacgaacaagtgcaggctaacatactttcgcgaataattggtaatgtcaaaaggctcaatgagagcgtggcaattcttaaccaggagcttgtgaccattaataatcggaacaaaaatctagaaatcatgggcgcaatttgtgataactaccatagtagcgtccaattcaacctggaagcgaccaataacaagaagccacctctttaa

SEQ ID NO: 79666 - DNA, 1224 bp, Saccharomyces pastorianus
atgattaaacttaatctttccgcacagtatgaccccagaaacgggaaatggtacaattgctgccatgattgtttcgtcacaaaacctggctataacgattatggcgaagtaatagatttaacaccagaattctttaaggtacgaaatataaaaagggaggacaaaaacttaaggctattacaattagaaaatcggtttgtccgtctagttgatggtctgattacactctataacacatattctagatccattattcataatttgaagatgaatagtgaaatgtccaagttagaacgtacagttactccatggagagatgatagaagtgtactcttttgtaacatatgttccgaaccatttgggctattactaaggaagcatcactgcagattatgtggtatggttgtttgtgatgatgcaaacaggaactgctcaaacgaaataagcataggttatttaatgtctgcagcgtcagatctaccattcgaatacaatatacagaaggatgatttacttcatattcctatatccataagattgtgctcgcactgtatcgatatgctatttattggcaggaaatttaacaaggacattagaatgccgctaagtggaatatttgctaaatatgatagcatgcaaaatatatccaaagtaattgatagtctcctgcccatttttgatgactcattgaatagcctgaaggtggagactgccaaggattctgaaaatacacttgatccaaagaatctgaatgatctcgctcgattaagacataaattactcaattcttttaacttgtataatacactaacaagacagctcttaagtgtagaacctcaaagtcatctagagagacaacttcaaaattcgatcaagatagcttccgctgcatacataaacgaaaaaatcctaccgttgaagtcgcttccggcaattttgaacccagagggccataaaacgaatgaagatgggcaaaaagctgaaccagaggtaaagaaattatcgcaactaatgatcgaaaacttgaccataaaagaagtgaaagagctgagagaagaattgatggtcctaaaggaacaaagctaccttattgagtccacaattcaggactataagaagcagcgtagattggaggagatcgtcacacttaataagaacttagaagaattgcactcaagaatacataccgttcaatcgaagctgggtgaccatgggtttaattaa

SEQ ID NO: 79667 - DNA, 723 bp, Saccharomyces pastorianus
atgctaaagcctaacataatatttcaacagttgctattttggactgatccacgtaacttagttaaccagacaggttcaacaaaaaaagatacagtgcagcttacattcttgatcgatgtgctcaaaatatacgctcaaattgagaagaaagaaataaagaagatgatcatcactaatataaacgctatatttctttcttctgaacaagattattctactttgaaagaacttcttgagtattctgacgatattgcagaaaatgataatttagacaatgttagcaaaaatgctctggacaagctaaggaataatttgaattcgctgattgaagagatcaatgaaaggtcagaaactcagacaaaagatgagaacaacactgcgaatgaccaatactcgtctattttggggaattcattcaataaatcttcaaatgacaccatagaacacgctgctgatataactgatggaaataacacagaattgactaaaacaactgttaatatttcggcagttgacaatacaacagagcaaagtaactcaaggaaaagaacgagatcagaagcggagcaaattgacacatccaaaaacctggaaaacatgagtattcaagacacgtcaactgtagcaaaaaatgtaagttttgttttacctgacgagaaatcagatgcaatgtccatagatgaagaagataaggattcagagtctttcagcgaggtctgttaa

SEQ ID NO: 79668 - DNA, 2082 bp, Saccharomyces pastorianus
atgcaagatcctgatggtattgacattaatacgaaaatctttaactcagttgctgaagtatttcaaaaggcacagggttcatatgcaggacacaggaagcatatagcagttttgaagaaaattcagtcaaaggctgttgagcaaggctatgaagatgcttttaacttttggttcgataaattagttactaagatccttcctctgaaaaagaatgagattatcggagacaggatagtaaagttagtagctgcatttatagcttctttagaaagggagttgatattggccaaaaaacaaaactataagctcacgaatgatgaagaagggatattctcaaggttcgtcgatcagttcataagacatgttttgcgtggtgtggaaagccctgacaagaacgtcagatttagagttttacagttattagccgttataatggataatataggggaaatcgatgaatcacttttcaatttattaatattgtctttaaataagaggatttatgatagagaaccaacggttaggatacaggctgtgttttgtttaactaaatttcaggatgaagagcaaactgaacatttaactgagctttctgataatgaagaaaattttgaagctacgagaactctagttgcttctatccagaacgatccgtcagctgaagtacggagggctgcaatgctgaatttgatcaatgataataatactagaccgtatatcttggagagggctagagatgtaaacatcgttaatagaaggctcgtgtattcgagaattttgaaatcaatgggaagaaagtgtttcgatgatattgagccgcatatttttgatcaattgattgagtggggtttagaagatagggaattatcagtgagaaatgcgtgtaagagactcattgctcatgattggttaaatgctctggatggcgatttgatagaattactagaaaaattggatgtctcaagatcctcagtgtgtgttaaggctatagaagcactttttcaatcaaggccagatatattatctaaaatcaaatttcctgaaagtatttggaaagactttaccgtagaaattgccttcctctttcgggctatttatttgtactgtttggataataatataacagaaatgctggaagaaaactttccagaagcctcaaaattatccgagcatttaaaccattatattcttctcagatatcatcacaacgacatttctaatgactctcagtcgcattttgattataacactttagagtttattattgagcaactatcgattgccgccgaaaggtatgattatagcgatgaggttggaaggagatcgatgcttacagtggtacgaaatatgctggccttaactacactctccgaacctcttattaaaattggtattcgtgtaatgaaaagtctgtccataaatgaaaaagattttgtaacaatggcaatagaaatcattaatgatattagagacgacgatattgaaaaacaagaacaagaagagaaaataaaaagcaagaagattaatcgcagaaatgagacttccgtcgatgaagaggacgaaaacggcacacataatgacgaagttaacgaggatgaagaagacgacaatatttcatccttccattctgctgtagaaaacttagtgcagggaaacggcaacgtatctgagagtgacataataaataatctcccacccgaaaaggaagcgtcctcagcaacaattgttctctgtcttacaaggtcatcatatatgctagaactagttaacacaccgttaacagaaaacattttaattgcgtcgttgatggacactttgatcacaccagcggttagaaataccgcgccaaatattagggagcttggtgtcaagaaccttggtttatgttgtctcttggatgtgaagttggctattgataacatgtacatcttaggtatgtgcgtttcgaaaggtaatgcatcattaaagtatattgcgttacaagtcattgtagatattttttccgtacatgggaacactgtggtagacggagaaggcaaagttgactcaatctcgttgcacaaaatattttacaagttttaa

SEQ ID NO: 79669 - DNA, 3675 bp, Saccharomyces pastorianus
atgtcagcacccaataatattaacaacaataacgacattgagaattcttcaaacagtctatttgatactattctatcaattgctcatagtgccatatctcatgtccctaaaatttcagccttaaatactgagatacaacgtgaattttcgcattcaggtgaaagtcatacaggttcaactcgccatccttatttccatatccaccacgcgcagcagcaacatcccttgtcacagcaacaagggcccttacctgtttccgaaaatgctaaccaaaatcctaatgacacagtgctcattcattccccctccgctaacacagcccaccgcagttcatcatttttgcgtcatttagattatttactatcccccacttctggtccagcctctgataaacatactcaagtagaggaaggggatgacgaggaagagttatcgcctctttccaaagcatttctttcaccatcaactcaactggtacctacaaatacatcgactacgcccctttcaggttctttgacacctaacaatagaaacgtaaatgcaaactctaactctgaaaccgagaacgacaatgatagggatgatagatcaaatgttggcaaagtgaaatttcagcccttgaaagtacacgagcctgcaatctcaacctttggtaaaggcaacttaactttagaggcagtggcaggatcctctgatattgataatacaactattgatctggacgagaataataccaataataatccaaatgcaagttcaacaaacttgagtcatattagcaaaagtaacgtaaacaataatctcggtccaaaagaattaaacacaagttatcgtaatagtagctatatcgacatggcaaggtttgaaaattcacaatcgaacctttctagccatagggcaagaagtaagacactgcccgcgaacaaagcattagagaatgccgttggtgatgaaggtaatagtaaaagaaattcaagatattcttcttattcaaacgatatggcctttgatgatgccgacgaaagaaaattcagaggtatgtccaaaaaattcttaaacaggagatctttttcaccttcgaacttaggcaataaagtgatccctggaattaatttaagaaattcattcaacaaaaataggaatagtagttctgatttctttagtacaaatcagggacagcaaatgccaagaacaagtactgcgggctcaggtaatatccatgcaataatgggtttggattctggcaatgatgatttcaagttagaaggtattgaatatgcttcagaaaagaaaaacagcgaatttcatacccttttcaaggactgcgatattaatcctaacgaaaagttaattgtcgatcatagttgtgcactatctcgtgatattcttttacaaggaaggatgtatatatctgatgcacacattggatttttctcaaacattttgggatgggtcagtacagttttcattccgtttaaggaaatcgttcagattgagaaaaagactaccgccggaattttccccaatggtattgtaattgatacgttgcatacaaagtacatcttcgcctcttttatgtcaagggatgctacctttgatttaattacagatgtatggaatcagatcatcttaggtaaaaaatataggaatggcttcggtaataatgacgacggtacgataagcgattcgagcagtgcattttttgatgattccgatgacaatgacgacgatggagacctggatgacgatgaccctgatattaatagcacagatatgacatctagtgacgatattgatgctgatgttttcaatgaatcaaatgatcttggtaaaaaccaaaaatctacgaactacttattgggtcccaataaacactctccaaccactgctgatttcaaaccttccaataatgatcatttggttattgaagcaaatattaatgcaccattaggaaaagtagtaaatcttttatacggtgaagacgtctcttactatgaaaggatccttaaagctcagaaaaattttgaaatatcgccaatccctaacaatttcctcacaaagaaaattcgtgactatgcatatacgaaaccgttatcaggcagcattggtccaagtaaaacaaaatgtttgatcacagatactttagagcattatgatttggaagactatgttaaagtgctcagtattaccaagaacccggatgttccttcagggaatatcttttcagtgaaaactgttttccttttctcttgggataaaaacaactccaccaaattaacagtttacaattctgttgattggactggtaaaagttggatcaaaagtatgattgaaaagggaacatttgatggtgttgcggacacgacaaagataatgatatctgaaattaagaaaatcttaagtgatgaagactcaaacataaactcaaagcatcaagccagcaataatgaatcagaagaagaaattattaatctgccaactattggacctccagttcatgatccgacggaacctgattttcaaaaaggaaaagacgatacagttatcgatgaaaaaattaatataccagttcctttaggaacagtgttttcactattgtatggtgatgacacatcatatattaagaaaatcatcgaaaaccagaataactttaatgtttgtgatattccaaagtttgtgaataacgcaagagagatcacctataccaaaaaattgaacaattcattcggtccgaagcaaactaaatgtatagtcacagagaccatcgagcatatggatttgaacagtttttttatggtaaaacaaatagtcagatctccggatgttccttacggtagttcattttcagtacatacgagatttttctattcctggggtgatcacaacacaacgaacatgaaagttgtcaccaatgttgtctggacaggtaaatcaatgctgaaaggaaccattgagaaaggttcaattgatggacaaagaagttcaacaaagcaactcgtagatgatctcaaaaaaataatttctaatgctagttcaacgaagaaaaaatcgaggagaagaggaaagacggtaaataaaaggaaatcatcaccatccactatcaagaatgagaagaatgaagaaaacttcgaagatacaagtaccaaaaattcatttttttccgctttctcaatgttacaacaagtaaacataacatccgttcaaggaattatgacaattatctctttttttatttgcttgattttcttctttagattattattccattctaagaatacttcgaacatccagattattactccaggaacaatcttaattaatggaaatgaatataattacgttcctaattttaaaacactctatcatgtttacgaagataatattataaaagatgcccgccgtaaagactcgaataaaaataacatagtcaccgatacggagggtctcatatgggactggttgatagatcgtggaaatggaaccgttcaaaatagtgtcttgtccaatcatattaaggagagtaataacaagaaggttaagctcgtaaatggagttagtgatcataaaatacagcagctagttgaatctataaaaatcaccgaattgcagctgcaagaaatgaaagaattattggcccaaacggataacacgtcggctactaaccaattactttga

SEQ ID NO: 79670 - DNA, 576 bp, Saccharomyces pastorianus
atggaatttgacggcatacacccaagagatactctaacgttagaagaatttagttctcgtctcacgaacatattccggaacacgaattcccaaatattccagcaaaataataataacctcacgtctattttgcttcctaaagattccagtggacaggagtttcttctgtcacagacgcttgacgcggatgctttaacaagttttcactctaacacactagtttttaatcaattggtgaatgaactgacccaatgtatcgaaagcacagcaacatccatagtgttagagtctctaataaatgaatcattccatttcataatgaacaaggtcggcataaagacaatagccaagaaaaaacctggccaagaagatcagcaacagtatcaaatggcagttttcgctatgtcgatgaaagactgttgccaagaaatgcttcaaacaactgccgggtcttcccatagcggcagcgtgaacgaatacctggccactctggattctgtgcagccgctcgatgatctgagcgccagcgtatacagcaactttggcgtctccagctcgttttccttcaagccttaa

SEQ ID NO: 79671 - DNA, 1113 bp, Saccharomyces pastorianus
atgtttgacgaaggaagacctgaaagcatttttaatcaacaattggatgacacaaatactaatacatacatcaatgacaactcttcagattccttggactccgaggaagaaaatgacgacgacgaatatgagtatgtggaagagccggtcatcgaacttgatgaagacggcaatatcaaggagtacaccaaattagtgagaaagcctaaaaccatttccaaggagcagaaattagctttgttatttaggcctccattttcaatcatgtccaaactcgacttagacgctgcaaagcaaaaggcaagggcaaagcaaaaatggataatgattaacattcaggattcaggaatcttccaatgccaagccctcaacagggatttgtggtcgtccagaccggtaaaaactataatcaaagagaacttcgttttcctacagtatcaatatgaatcacgtaatgcccaaccctatcttcagttctatcacttgaataataaggatgatttgccccatatcgcgatactggatccaattaccggtgaacgtgtcaagcaatggaatagggttgttcccattccggagcaattcatctcagaaatcaacgagtttttggcctcattttcgctagatccaaaggtccctaatcccacggttaatgaacctcttcctaaagtggatccaacaactttgaccgaagagcaacaaatggaattagccattaaagagtcattaaataataactcgagcaaatcaaaccaagaagaagtgccgagtactggcgaagaacagaaacgagtacaagaaccggatccattcagtaccattgaagccagggtgcatccagaaccgccaaataaaccagggatcactacaagaattcaaattcgtaccggtgatggctccagactagttcgtagattcaatgctctggaagacactgtgcgtactatttacgaggttatcaagacagaaatggatggttttgccgattcaagattcacactaaatgatcaccaaagagaggacttgattgataaattaaacatgaccatagcggacgccggcttaaaaaatagttctttactacttgagaagcttgaccctgaaatagaataa

SEQ ID NO: 79672 - DNA, 1074 bp, Saccharomyces pastorianus
atgaactgtggaatattcacagaaggaacggacatgccaaatattgattgtatactactgtgtaggcccacaaaatcgcgttcacttttgattcaaatgattggaagaggtttacggttacaccattcgaaagaccactgtcatatcatcgacttcattggagcttctagtgttggagtggtttcagcgcccactctactgggtataaggagtgatgatatcgaatttgatgatgctacagttgaagatttaaaagcaatccaaggagagataatagctaaacaacaaaaaatcgacgaaaggttaagggctttatttcagactgatgaagcagcaatggaaaatgtaactgaaagaaatagcgttgccgattggattcacagtgcaaattcggttgatttaaccttgtgctcctttgatagtttgaggaatttaacacagagcaataactcatatccatctggcaaggagtttgatgaagcttctgaagctgtaaaagaaatggagctgttgatgaactcacaatatccgtgggtgaaatttgcctcaaatgcgtggggcctccctttaaaaggtaagaatcatttgagaatatacaaagaaaaatccgaagacaaattgtcgatggtatatcatctaaaaatgtatcgacaattaccgtgttttataacaaataaatacgcggactatgttccaaaaagtataataaaagacgctaatctttggaatgtaatgtcaaaggtggaaaaaatcataaatactctaaattcggacttggaaggacaaacaatgcaataccaggcaatatctagtaaatactcgaaatggagacaaacagttcctacgtcaaaacaaagagactttgttttcagaaagctaaagaaagtatatggtgagtcctcaaaagattttattagattatctttggatgatgttactacttatgtcaatactaagatgacgaaaggagatgcttccaacttaatctttgccagcagtttggcacctgtctacccgttgaaatcattgttacgaatattagaatatcaaaaaagaagatcttttataaagtga

SEQ ID NO: 79673 - DNA, 786 bp, Saccharomyces pastorianus
atgacctcaacactagccactagactctcgacatattctatttcattaatactgcagcgcatcaaaattataaaacgttgttactcagctcccgtactcagagattaccaacaagatgctatagatgcatgtgtgatttctattcgacagggcaccaagagaattggtgtatcattagccactggtggtggtaagacagtgatattctcaaatcttatcaatcaattgcgccaaaactattttaaagaatgtcaaggaaattttaaatcgttgatcctggttcacaggagggagctggccttacaagcgacggccactcttaaaaaaatattccccgacttaaaggttcacatagaaatgggaaaatatgattgcgatattgaagattctgacgtgattgttgcatctgttcagacgttgattagaagactccataaatatgatactaattcagtgaatctcatcatcattgatgaagcacatcattctgtggctaattcttatagaagtatcttagatcatttcaaagcttcaactgcagaaaccaaaatccctgttattggctttagtgcgactttcgaaagagcagataaaagagctttgtcaatggtaatggataaaattgtgtaccaccggggaatactggaaatgatcgatgacaagtggctatgtgaggcaaaattcacgtcagtcaaaattgaagcagacttatcagatgtaaaaagcactgcagatgacttccagctggcaccgttatcgtctctaatgaatacgaagagaaattaa

SEQ ID NO: 79674 - DNA, 1152 bp, Saccharomyces pastorianus
atgatggacttctacttaagtgttattgttcaccctgatcatgaagcccttataaatttgatttcttctaaatttccgtatcatgtgcctggactgctacaagttgctttgatatttattaggcaaggtgatagatcaaacactaatggattgttacaaagagcactctttgtctttgatagagctttgaaagcaaatattattttcgattccttgaattgtcaactaccttatatatacttcttcaacagacagttttacttggcaatatttagatacatccaatctcttgctcaaagaggtgttataggaactgctattgaatggacaaaagttctctggtcactgagcccattggaagatcctttaggatgcaggtatttcctcgatcactattttctattgaataatgactatcagtacattatagaattatccaactctccattaatgaactgttataaacagtggaatactttaggattttccttggcggtagtactaagcttcctaagaataaatgagatgagttccgcccgcaatgcgcttctaaaagcctttaagcatcatcctttacaactgtcagaacttttcaaggagaaactcttgggcgatcatgcgctaactaaagatttatccattgatggccattcggcagaaaacttggaattaaaggcatatatggcccgcttcccgttactttggaatagaaacgaagaggtaacatttttgcatgatgaaatgtcgagtattttacaggattaccatagaggaaacgttacaatcgattcaaatgatgggcaagatcacaataacattaacaacttgcaatcacctttctttattgcgggaatcccaattaacttattaagattcgccatactatctgaggagtcttctgtaatggctgcaattccatcatttatctggtctgataatgaagtatatgagtttgacgtattaccaccaatgcctacgtcaaaagaatcaatcgaagtggttgaaaacatcaaaacctttattaatgaaaaggatttagctgtccttcaggcagaaagaatgcaagatgaggacctgttgaatcaaattagacaaatatctttgcaacagtacattcatgaaaatgaagagtcaaatgaaaatgagggttaa

SEQ ID NO: 79675 - DNA, 945 bp, Saccharomyces pastorianus
atgagctctagagcattaaggagattacaagatgataatgctctgctagagtcgctgctatcgaattcaaatgcgaataaaatgacgagtggtaaaagtactgccggtaatattcagaaacgggagaacatcttctctatgatgaataacgtacgtgattcagataatagcactgatgaaggacaaatgtctgagcaggatgaagaagctgctgctgctggggagcgtgatactcaaagtaatggtcaacctaaaagaattacactagcatccaagtcttctagaaggaaaaagaataaaaaggcaaaaaggaagcaaaaaaaccataccgccgaggctgcaaaagacaagggttccgatgatgatgatgatgatgaagaattcgacaagattatccaacagttcaaaaaaactgatatattgaagtacggtaagactaaaaatgatgacactaatgaggaaggtttcttcacggcatctgaaccagaggaagcatctagccaaccttggaagtcatttttaagcttagaaagtgatccgggcttcacaaagttccccatttcatgtttgaggcattcttgcaaattttttcaaaatgatttcaagaaattggacccccatacggaattcaaacttttatttgacgatatatctccagagtctcttgaagatattgattcgatgacatccacacctgtctcccctcagcagctgaaacagattcagagactgaaaagattaattagaaactggggcggaaaagatcatagattggcacctaatggccccggaatgcacccgcaacatttgaagtttaccaagatcagagatgattggatcccaactcaaagaggtgagctctctatgaaacttttaagttctgatgatcttttagattggcaattatgggaaaggccgttagattggaaggatgttatccaaaac

SEQ ID NO: 79676 - DNA, 498 bp, Saccharomyces pastorianus
atgaaatgctgcttaacctcagtccttaatcaaaacaacacggtggatgaatatttcacatttgaagtgatgaaaaatctgttgctaaatgtgctgtgtaatagtgcgtttaaggattctttccatgaggcactatatgttttcactgtgatttttttgactctgtgcaaagaatatccctctgctagagcgttcctttttgagatatctaatggttataatattgatgagttatacagaaatttaaggagcgtggacgaatacaaaacacaaagggcactcatgattgattttatagattgggttaaatccaccagtgggaaagaagatggtaatgtggaccatgcaggcgatgagagaaaaagacaagagaaaagggaaactatcctcaagaaggcaaatgagagattaattaagaagaataaagaaaacggagacatgctggatgatccgaacattgaagacggtgctgtgggtaatctctttgatgacaactga

SEQ ID NO: 79677 - DNA, 1320 bp, Saccharomyces pastorianus
atggactatccagaaattaatttggaagagagaggcgctgaatcagacgcagttagagatttgagatatgcttgtggtatcgagttgaataggatggctttattaatgcctgaatctctgaaaaaaatatacccagaccttgaaagtgtcattgccagaatcatgcccaacttatcttaccatgaaaaaatttccttcaaatccttcttattgatcattgtattgaagtcttcattagatatgaaagaggaaagatttgcggctattgtggatccagaacttttagcctggtctgataaaacaacagttgttggtctttctgatttgcattggtttatggaacgcttaggtattgttcagatcgcagaatatttccagaggcgtgatatcgacgaaaatagtgaccttttatcaattccaattgatgatgagggtaaagagctgaagtcggaattgaccaaacgttggcaaagcttgtttcctgttcgtgcaacaagaatgttcattcattattcaatgcaaagtataaagacagatgaagaattcaaaatgttacaagatctgtggagacctaggattgtcccaatattaccttacatcacgagactactgtaccaattgcaatcctaccacgatccagataattggaaaggattacctacggttgtgcaatccttcgtcaagtattccactattgaaagattttgggaggccggagcttcaaataaatcaaaggatgagtttattgatgaacatatgaaagcgatgcaaaccttacgagacttcgccgactccgtaggacacatcattaggtatacaagggaatacactctacttgttttaagtgccatatcatcacttggtagtgttttttaccttttggacgaatcgcccgacttactactgaactctattgccatatttaagccaggtagcaatgagataagccctggcgtttcaacacatggatggaaacacataatgaatatagccattcgtcctatattaaaaggttgtccaaaagattgtctggggaaattcatgcccgcatttttgcctaaattatttgaaatcctggacctgctgctatgtcagaaatggtcctcgcatatgaatgatatggacatgaacccagttccaactgacgatgatcaaatgactgaagaaattttggaagagaatttgttgagacaactaaccacagttgttgttagaatagtaattgattgtgttggtcaaggcaatgccaatccaaacagtgctaaaagcaggctaaataaccatcaaatggagatgagaaaaattatattaatgatttaa

SEQ ID NO: 79678 - DNA, 432 bp, Saccharomyces pastorianus
atgaggaactccgagaataaaaatgccattaaaatggctgtagaactcgcacgtaaggaatttgagaggttcccaggcgatactggctccagtgaagtccaagcagcttgcatgactgttcgtatccagaatatggcaaaccatattaaagagcatcgtaaggattttgctaacaccagaaatttgaggatattagtccagcaaaggcaggcaatattaagatatttgaaaagagataatcctgaaaaatactactggactattcaaaaactaggattgaatgatgcggccataacggatgaattcaatatggacaggcgttacatgcaagattatgaattttttggtgataaaatattgataagagattctaagaaagtggcaaatcaaaagcgtaaggagataagaaaacaaaaaagggctacattttag

SEQ ID NO: 79679 - DNA, 387 bp, Saccharomyces pastorianus
atgtcgattgttggaaggaatgctattctgaatctaagaatttcactatgtcctctgtttatgggcaaaagatcgtttgtatcctctccggttagcaatagtgcaaaagctgtgaaattcttaaaggctcaaagacgaaaacagaaaaatgaagccaaacaagccactttgaaagcgtcaaccgataaggttgatccagttctgggccgggcggacactccctttataacacgtattatggcagagttaaaagagcctttagttctatcgaaaggttataatattgaagaggtagacaagttccttgcagccattgagtctgctaagcgtgaaagagctgagttgtcaggtttaaatacagaagttgtgggtattgaagacatataa

SEQ ID NO: 79680 - DNA, 825 bp, Saccharomyces pastorianus
atgtttttcttactattgttttatgcattgtatattgatggaagaaaatgctggggtggattctcaaggaaggctttcacccattggaatgatttagggcatttagccttctcaggtattattatgttggaggcggaagagctgtcatatgaactattgacgttatttagtgcatattacggtgtcagttatctagcagctcagtcggcagtatctactatggctgcattgctctatatgatcccatttgcaataggtatatctacctctacgagaattgcgaacttcattggtgcaaaaagaaccgatttcgcgcacatctcttctcaagttgggttgtcattttcgtttattgcggggttcatcaattgctgcatactagtatttggacgtaatctaatcgccaacatttactcaaaagatcccgaagtcatcaaattaattgcgcaagtattgcccttggtgggtattgtgcaaaatttcgactcgcttaatgccgttgctgggtcttgcctcaggggtcaaggcatgcaatctctaggaagtatagtaaatttaatggcttactatctatttggaattcccctggctctcatcctaagttggttctttgacatgaaattgtatggtctttggattggtattggaagtgccatgcttttaattgggctagttgaggcttattacgtattatttcccgattgggacaaaattatgacctatgctgagattttgaaagaaaccgaagatgatgaagtagatagcgatgagtatttaacagactcagacgatcctgatgaaaacacagccctcttaggggcttaa

SEQ ID NO: 79681 - DNA, 732 bp, Saccharomyces pastorianus
atggctggaattttgtcaaagactctttcagaagtgcatccttccctccgaacaaatggtatgggtatcggtaacactcacaggaggatatcgctaggcttcctacctcccaacaagaagaatcctctggtacgaaaatttcgtgcaagaacgagaaatattgatcagaggagtttcagatctttaacagatgattttggaagtaacgtccatgaaccaaatccgtacttaggtaatattgatgaggaacctgacctttactatcatgatgaagaagatggcgaactgagcagaacgatttctctaccatcaagggtatcagaaactcctgagctttcgccacaagatgttgattggattctacatgaacatgaacgacgatactcatcggtatgcaactctgataatgaggaagcaagtcaaagcaacacaccagatagaatacaagaatattctggaagagaactagaatatgacgaatttatgaatagactccaagctcagaaacagaaattaactcgaagtgcggtaacagacgctaaaggcacctcacatcacagaagaccatcattcgtatctgtgactagccgaggctcagttcccacaatttaccaagagatcgacgagaacgattctgaggcactagcagaattggctcacagccacgtcaccttcaaatcagaagcaagagttttgggacctgcaggcatgcaagctggcactgccgtcgtt

SEQ ID NO: 79682 - DNA, 195 bp, Saccharomyces pastorianus
atggtgaaaatctatattttcttgattaggaataaaatcatggaaagaagtgttggaataaaaattcgctatcgtctgtcaactaatagttatagtatcaatatattatcatatacggtgttagatgatgacataagttatgagaagctgtcatcgaagttaggggaagctgaagtgcaaggattgataatgtaa

SEQ ID NO: 79683 - DNA, 1638 bp, Saccharomyces pastorianus
atggagagaggcgatttggtgattcctatcccaagatgtgagaatcaagaggtgccgatccaaaggatttgtcagtccaatgggcgtgagaaatttccatgtggagatttcttggagaaagttgaagcgaatggcccgttcatccagtttttcttcaaccctcaattgtttagcaaaacttgtcatcccagatatcttaaccagaaaggaggatatggttcttgcaaattggttgaaaacaagaaagttattattgaattctcctctcccaacattgccaagccatttcatgctggtcatttaagatccactattattggtggctttttggccaacctttatgaaaaattaggttgggaggttatcagaatgaactacctgggtgactggggtaaacaatttggtcttttagctgttggttttgaaagatacggtaatgaagaggctttagttaaagatccaattcaccacctgttcgatgtttacgttcgtatcaacaaggatattgaggaagaaggtgacagtattccattagaacaatccaccaatggaaaagctcgtgaatatttcaagagaatggaagatggtgacgaggaagctttaaaaatttggaagagattccgtgaattttctattgaaaaatatattgacacatatgcacgtttgaacatcaaatatgatgtttactctggtgaatctcaagtttctaaagaatccatgctcaaagctatcgacctgttcaaggaaaagggcttaacacatgaggataggggtgcagttttgatcgatttgacaaaatttaacaaaaagttaggaaaggctattgttcagaaatcggacggtactacgttatatctaactagagacgttggtgcagctatgggccgttatgaaaagtatcattttgacaagatgatttacgttatcgcttctcaacaagatttgcacgctgcccaattcttcgaaattttgaagcagatgggctttgagtgggctaaagatctacagcttgtcaactttggtatggtccaaggtatgtcaacaagaaaaggtactgttgtcttcttagataatatcttggaggaaactaaggaaaaaatgcacgaagttatgaaaaagaatgagaacaaatacgcgcaaattgagcatccagaagaagttgccgatttagttggtatctctgccgtcatgattcaagatatgcaaggtaagcgtatcaacaactacgagtttaaatgggaaagaatgctttcattcgaaggtgacactggtccataccttcaatatgctcactcaaggttaagatcagttgaaagaaatgcttctggtatcacccaagacaaatggataaatgccgatttttcgttattaaaagaacctgccgcaaaactgttgattagactgctaggccaataccccgatgttttgagaaatgcaatcaaaacccacgagccaacaaccgtggtcacatatttattcaaattgactcaccaggtttcttcttgttatgacgtcttatgggttgctggtcaaactgaagaattagcaactgcccgtctggctctatatggtgctgcaagacaagttttatacaacggtatgcgcttgttaggtttaactcccgtagaaagaatgtaa

SEQ ID NO: 79684 - DNA, 624 bp, Saccharomyces pastorianus
atggaacttcatgtttttccattccgaaaagtatccgcggtgttgatggagttcactacaccaaaatcatatgccaacactaaaatttctgctggtattattaccgatgataaagaagttttagcgatgacaactaacaatcttgttgagcacttaaactcagaaattgattctgttggttggaaagttccaaaagatattaagatcaccttcaaaggtatcaataccaaagtcaaggatgaacaattggaatccgagaatgggactgaacaagctttacaaggagaggatgaaaaggaagatgaaaaggaagatgaaaaggaagatgaagaggaagaagaatacaagaacgtcgcagaagaaaataagatctgtgctgttgtggagggtccgttgaacaacctagttgaaagaattgatgtgatgggcgaaattccaagttttgttaaaaacatcgtctctggtgttgctggtactaagccatttatataccaatatgctgatccaaaaagctcaactttacaaataaatggcggggagaaaattcacggtgtagcttggaccgaagtaacattcatttctgaatcagatgtgattagtgaggaatcttacaatgaagcatga

SEQ ID NO: 79685 - DNA, 339 bp, Saccharomyces pastorianus
atgagacacgttttctggccaaggaatgcttgtcacggtactatcaaagttaagaaagaagttattccagaatctgatgaagaagaatcctcagctgatgaggatgataatgaagacgaagatgaagagtctggtgattctgaggaggaatctggtagtgaagaagaaagcgacagtgaagaagtcgaaatcacctatgaagatcgtacgattacttttaaagaggaagaccctgcgatttcgacattaataatggccttccaaggcatgaagcctcatcacgcagctaaggcatggaacttcatgtttttccattccgaaaagtatccgcggtgttga

SEQ ID NO: 79686 - DNA, 687 bp, Saccharomyces pastorianus
atgtcttcccttcagggatgtatcaggactccgccagaggaatgccccaggctaggtccagaggcgctacttcagacccctgatttcaataggacaataagcaatgagccattgaccactggcaacgaacgtttgcaagcagctctaatttcttcatttgggtctttgatggagttcagaacattattaataaattcaaatcttgctatatcaggcgacgggtttacgtggttagtcgcaagacggcagctcgacaaacgtgccatgcgcaacgaaatgccaaacagggatattgaatatgataagctgtttatattgaatacgtacaatgcgggaactcccttcaacttctctacatctggagtaatgaatgagctcaataaccaatataccaacatggaaaaacaacgagccaaagaagccggtaatcttgaagattctgagatgactgccaagcaagccaagacaaaatttatttatgaaacccaacagaaaggtttttctgggaaagaggtttcatatatcccgcttttagccattgatgcgtcaccaaaaacatggttaaccgattatggcgtatttgggaaacgagaatatttagaaagggtatgggactctatagaatggaaaattgtagagtcaaggttacctcaacgtactaagatccaagcattcaacacgttatga

SEQ ID NO: 79687 - DNA, 156 bp, Saccharomyces pastorianus
atgcttcgctttactggtgctcgcgctattagaaagtactctactaggtatgcactcgagcacctgaaagaaggtgctcctctgaaagggctgttttctactgaaggattacagaaagcatggttcgaccgagtgaaatatctcgatgcaaattga

SEQ ID NO: 79688 - DNA, 492 bp, Saccharomyces pastorianus
atggatgccaaaaataagacagaattggttcatgggccagttactgcgggattaggttctagtacatttttagatggggcgccggcctcctcagctgccattagaaacgacataaaagcccattcctatcataatcgtaacggtggtttacaaagaaataagtcactttctcaacgattaggtctcggaggatccggtgatagcaatgcccccatgacaggcgttagaagaaacttgagtttaagtagagacaactatgatgttggtcacagcaatgaaggtgttagaaggtcgaaaaccgttaattctcctaacagaacgcataagtccaattatactactgatttcgacggccaagatgatcacaatgaagatgaggaagatgtttatttgggtgtgcgctacaatgagcccaatatgaaaaagaaatcgacgggcagcaaattactgagcagagtaaaaagtctaaaggtcggcaggaaaagtcagtaa

SEQ ID NO: 79689 - DNA, 549 bp, Saccharomyces pastorianus
atggagaatagaaacagtagtacctctagtaggccattttctgttaataacccgtttagaaatgccacagttgattcaagtattaatcagtataaaaatgactcccagtttcaggagtgggcgaaaaaccaatctcgtaccaattcatttgatatgccacaattgaacacaagaacttcttcacaattatcattcccaaacattccagaggatgaaccccagcgaaacgcagatcagcagggtgctttttattctggtttggagagctttagtagtggtagtttatcaccaccttcgagacctctttcctcaaagaatcctttcctagacgatgtgagttctgcaaccgattttagaaggtctcccccacctgtttcaaggaataaaaatcatccgactgctaaagaagaaaaagaacaactaaggcaaagatatttggaagaaagtgacgtaagtacagtaggtaacacaagagaaaacactgacctaccaccctcatacgaagagatcacttcaaccaatggatcaaggcgtgcatatccaaagtaa

SEQ ID NO: 79690 - DNA, 1824 bp, Saccharomyces pastorianus
atgagtaccgcaactatccaagaaccaaaactcatgccgatcacaaatacgccgtatgtgcattccaatagtacttctgcaatattaccatataaaacaacccaacttactccttctcaacgttaccgtttaaggaaagagcaaaatgaccaatctttgcgtaaagccataaaaatgaaagaaaaattttatgaagatcaagacgttaacttggaacttcaagagggcgatgtcgacggctcgttaatttggaacattccaatggcatctttatcgaccagttcttttttaacattatctaagtttaatagaaaagaaatgagtttagattcagcgcggggggatgaagagatattaatacaggagaacaattgcgaaggcaaacaacactcatcttcggctctctgtgtggacaaaactttccatcaggttcatagtactagaaaacatacatcaaattcaagtaacactttaaaagaatcatgtctggactataaggagcttccgccaacatgcattcctggtatatctcctgtgtctgattcacagtacatccaggatacaatgaaaaatctctcccaaatatacctgcatagttccgaaaaaatctccaaaagtattctttctggtcgttcaagatctgtacagagtttaccactggaatttaaagaagccagtagtcagggaatggaagacctaatgctagtttcagaggacaaactaaaggccgtaagtcatttccgtccgagttggctcccgcccaaggatttcaaagagaggaaattgcaagataaacaaatctacaaaaatatcgacttagcatcaatggaagagttgcaaaaaaataaagaacgtgacgaaaaagccaaaaagaatgagcagaataaggtcaaattccagcatttactggaccgaggcattactcgtaactcgtcattaagtgaattaaagaaaattatttgggaaacacctttgatatctaaagtacggcttcaaatatatagtcaacttctacaaagtgacaattgcttgataacaaaatgttttattgaatcatttgaggaagtaatgcagctactcaacaaaatggattttcccaaagataaagaatttgaaataagacagcttattgaacacgatgtacaggaaaaggttttttataaaaatggaacagataagcaagtggtttctgacttgatgctattactgcaactgaaatctatatctcaacaaggtttggttactggtgatgagatgctattctaccattttttaactgatcaatcttttgggactttgaaggaaacatgggaaatggtcaacttgatacagatgacgtgcttcagtgaaatttgcaaggaaaaatacgattcaagaatattaaatcccagaggaattgttgcccatcttttacgaaaagatgagttcaaaaatgaattcaatggcggatgtttgaatagcaatacatggtggaacatattgcaaagaatggaccataaactttttatgtgggtaatggatgtaattatcgttcataatggccaaaactttgcaaactaccccgtaaaaatggaaatattcaaagacaaagtatgggaatactatagatctaagaaggttattgtaaattataagattttggtttcactaacagttaacgtattgttaaactaccacttcggatatgataatctgaaacatttatcagatttggatgataagcatttttgtattccactgtatacggaggatagtatcgaagaggaaaacctcaataatattttcacaaagtggtggttgcactactaccgaaaattacgttag

SEQ ID NO: 79691 - DNA, 732 bp, Saccharomyces pastorianus
atgacagcacgtcgtttgattaatatagttcctaatacgtctaagctagaccctttaaaggaggaggactcaacgcatctgaaacaaaatcaacctaagaagttttccacaaaggagttgatgctttcagaatataccgaacgcaaaagttgcagccttccgttgtctaaatcccgatcaggcagtagtgcatccagtagcactacaggttcgaacggaaagaatattggaacaagacgccctagctccaacctagatttcaatttcgctagccaagatgttgttaaaaatgtattaggtaataataatccacacgtacccacagcgaagtgcattaggccaatatcagatgattctataggtacatcgagcacagagatattttcttcatcgcactcaaatacgacatctgattctttatgtacatcagatataagctcagaagagggtgaaatagcaaacagtaagatggaggataactgcttcttcaaaagtatgagagaagctgaccatagaagcaatattacgcccttaaagaaaagccgaccgggatcaagactacagaaaacacgtacagcaagtagcgctgataaaacaatctgctcaatgagtaccataactacatgcattccatctcgtcaaaattcggtgtcaactcctaaactctccaggacagtagggctgcctggatcgagcaatacaaccaacagtatagccgcatcacaaacttca

SEQ ID NO: 79692 - DNA, 576 bp, Saccharomyces pastorianus
atgatacaaggtggtagcagtgcagaaagccctagaagcagtagaagaaggtccgccattacagcagccttggctatagctcatactataagtacagctagcgcatatccgctaaatgtaggctccacccaatcacaagtggggcctcccggagatggtaaaaacagccagctgggtacaattttatcttggattggcgcttccttctacgtaggcgcacgtatcccacaactaatcaagaattacaatagaaagtctacagacggcttatctcccttcctatttgctactacactactctgcaatatcacgtataatttgagcatcttcacaagctgtagatttttagataatcagaacaagagggaattcatcgtgaatgagttgccctttatatttggaagtgctggaacaattgcgtttgatttgatatacttctaccaatactatatcctttatgcaactgatatgcaactacgtgaactggaaagagaactatacagtcctgaagaagacagtgcagcgcaactagtgacagaacgtacatcactgttgtctggtgaaacgcaaacatag

SEQ ID NO: 79693 - DNA, 273 bp, Saccharomyces pastorianus
atgtcgtgctcaaacggcatctggcctactgtatctaatttgtgcggatcattatccttcttcacctctgttatttcattgtttccacaaataattgagacttatcgagataaatctgtcgatgggctatcgccatattttttgctggcttggttatgtggggatattacctcgctgataggggcaaagctaacagggcaattgttattccagatacttttagcaatttattttctattgaatgatcttttgtatgtggtcgggatcctctag

SEQ ID NO: 79694 - DNA, 1203 bp, Saccharomyces pastorianus
atgaaagaaaactatgagaagcagttagaatcgctaaggaaagatattgaagagtacaaagaaagcgcaaaagattctgaagacaaaattgaggaactaaaaattaggattgctgaaaattctgctaaagtgtcggagaaaagattaaaggatataaaacaaaaagatgaacagatcagcgacctcactcagaatctaaaactacaagaagatgagataagctcattaaaatccataattgacaggtacaaaaaagatttcaatcaattgaaatctgaacagagtaatatccaacatgacctaaatttacaaatactaaatctggaaaataagttaatagagagcgaggatgaattaaagtcactaagagattctcaaaaaattgaaatagaaaactggaagagaaagtataacaatctttcactggaaaatgacagattgttgacagaaaaagaatccgcatcagacaaagagcgcgagatatccatcttgaacagaaaacttgatgaaatggataaagaaaaatggaacttacaggaatctaaagaaaaatataaacgcgaactacagaaggtgattactgctaatgatcgtttgagaagagagaaagaggagttgaatgaaaacagcaataatattcgtatcatggaagacaagatgactaggataaaaaaaaattatttgagtgaaatcacttctttacaagaggaaaataggagacttgaagaacgcctcatattaaatgagaggcgtaaagacaatgattcaactatgcaattaaatgacatcataagctattataagttgaagtatcactcagaagtaagacacaacaacgatcttaaggtgatcaatgattatttaaacaaggttcttgctttggggacccgtcgtttaagattggacacaaggaaaggtgagcacagtctaaacatttcacttccagacgatgatgaactagatcgtgattactacaatagccatgtttatacaaggtatcatgactatgaatacccgcttagattcaatttaaacagaagaggtccctatttcgaacgccgcttaagcttcaaaacagttgcccttttagtgcttgcttgtgtgaggatgaaaaggattgctttttacaggagatcagacgataacagattgcgaatactaagagatagaattgagagtagcagcgggcgtatatcttggtag

SEQ ID NO: 79695 - DNA, 1551 bp, Saccharomyces pastorianus
  modified_base (492)..(563): a, c, g, t, unknown, or other
atggacgaagcgtcacatctcccaaatgggagcttgaagaacatggaatttacgcctgtaggatttatcaaatccaagcgaaactccacgcaaacacaagttgtatcgcctactaaggttccaaatgccaataatggtgatgagaacgaaggccctgttaagaaaagacagagaagaagcattgatgatacaattgactccacaaggctatttagtgaagcttcacaattcgatgacagctttccagaaattaaggctaacattccgcctagtccaaggtcaggtaatgttgacaaaagtcgcaagagaaatttgattgatgatttgaagaaagatgtgccaatgtctcagcccttgaaagaacaagaagtaagagaacaccaaatgaagaaagagcgatttgaccgtgctttagagagtaaattactaggaaaaagacacataacatacgcaaattctgatatttctaataaggaactttacattaatgannnnnnnnnnnnnnnnnnnnnnnnnnnnnnnnnnnnnnnnnnnnnnnnnnnnnnnnnnnnnnnnnnnnnnnnacttgaagaagaaacggatgacttgaagaacagattacaagcgctggaaaaagagctggacgccaaaaataaaattgtgaattcaagaaaagtagatgatcattctggatgcatagaagaacgtgaacaaatggaaagaaaattggctgaattagaaagaaaactgaaaactgtgaaagaccaagtgctagaattagagaataatagtgacgtacaaagtttaaaattgagatctaaggaggatgaattgaagaatttaatgaatgagttgaatgaattgaagagcaatgcagaagaaaaggatacacagttggaattcaagaaaaatgaactgaggaaacgaacaaatgaattaaatgagttgaaaatcaagtctgatgagatggatttacaactaaaacaaaaacaaaatgaatcaaaaagattaaaagatgaattaaatgagcttgaaaccaaattcagcgaaaatggttctcagtcttctgcaaaagaaaatgaattgaaaatgctgaaaaataaaatagccgagctagaggaagagattagcacgaaaaattcacagttaatcgcaaaagaaggtaagttagcatcattaatggctcagctaactcaattggagagtaaacttaatcaaagagactcccagttgggctcaagggaagaagaattgaaaaaaacaaacgataagctacaaaaagatatcaggatagcaagagaagaaacagtttcaaaggatgaacggataactgatcttcaaaaaaaggttaaacagctagaaaatgacttatttgtgataaaaaaaacgcacagtgagtctaaaactattactgataatgaactagaatctaaagataaacttattaaaattttagaaaacgatttaaaggttgcacaagagaagtactctaaaatggaaaagagctcaaagaaagggaatttacctataaaatttccgaatcaaagttggaagatgaaaagaccacgctaa

SEQ ID NO: 79696 - DNA, 144 bp, Saccharomyces pastorianus
gcctgcaggtctgttagtaaagctaaaatagatgcgcacggcattaatataacatgtacaaaatggaatgaaacgagcgctggaggcaaatgttatgcattttctaatagtgctggattattaacactcgaatacctgtcatga

SEQ ID NO: 79697 - DNA, 621 bp, Saccharomyces pastorianus
atgccgctataccttgcagttgagattgtcttaggtatttccattctaaacaaatgtagtggtgcttatggtattttagcattgttcacgggtcatccgttggattttatgcaatggatagcatatctttggtcggtatttacattaatcgtattctcacaagggctgtatctgattcataagccaaacttgctggtattttcgcaaatctgcgtactttatacaatcgataccatttccacttgtttttttactctatggtttaccacgcaatggttcaccttggaagacactgctaatattgatggaaataatgcactacaaagtaacccaatatcgacaggtaagctgacagaacgtggtattgatataagtaaacaaagtgcaactgaaagctacgaatattccatgactattttaattacgttggtgtcattgatattcaggttctactttaacttcattttggcatcttttgttcaagaattgttacaccaccccaaatatttagttgatagggatgacgtagaacaaaacttgaaaaacaagcctatttggaaaagactgtgggctaagagccaaaaaggttgttataagctatgtaagaatttgttagagtaa

SEQ ID NO: 79698 - DNA, 1566 bp, Saccharomyces pastorianus
atgtctactattttgaaaacatctcgtgcacctgaagttgaagctagtccagtagtctcgaagaagcgaaaattaaatagacgtagagtactaccactcgatagtcttgatttttttgctggaggtttgagtactaagactctatcagaaaataggtctttaactgacgctaagagacttaattgtggcgcagaatcaaagactgtcatttcaagtcccaacattgcagaggcagatgaaaagcacgccccatttcttcaaaacgcactaaagccgactgaagatattggaaagaaaagtggtcacagtagccctggtgctataattgtcagtagccccaacttaggtactgtgaacacgagtgagtattcgttggataagtcgctacagtcacataagttaccacagccgtcattgccggaggtagcagggattggctctcaaaccatatcttcgaactccgctgactatgaaacagctgctgtgaattcgatggatgatgctgaagttactaagaattttagggtgaatcatcaccagaatatagagcaaccctctaaaaacatccgtaaactttctaattattcacgagaaatttcatctccattacaagaaaattgtaagtcacctgtaaaagagttatctattaaagagaaatctggtacgccgcacgcatttgttgaagctattcaagaaactaaaaatagagaggtcaaaagagttaagtcaaccattgttgaattgaaggatgaggagttgagcgaggaagctattaatcagctaaaaaatttggctattgtagaacctagtaacaatttactgaggaaatcatttgatagtgagggaaacaaaacaagcagaacaactgaaaaatgggaaaatagcctaatggagccagaatggcataaacgcaagaatttcaagacttttgtcaaggtacgtccaaaatcaaaggcgcacaaagaagagggtaaaaataacactcaaagctcagattttatacgaaatgcagcctttttaatcactagaaattatgttccgttaaaaaaatactccaaaaaggatacaactacaaaatggggcacagaagaaaacgaagatatgtttgctttgacggagatggaaagatttggatcgaatacatttatgtccgataatataaactcaaacactatccagaaaagatctcaagctctaaacagattcacgaatgaggatagttcaaatgaaggagaagaagattcgttttctttttctcgttgttcaggtactgcagccagcgttcaaccactaaaaaacaaaatttttattactgatgaagatgatctgggtgatattgatgataaaagcgatagactaaatcacagagaaaataatcgtaatctttttgtggtgaaggaaatgaacttacggccaaacttgtcagaagaatgttccaagcaaagtagacacagtagaagcgcaactagtagatcacgtggctcttttggggcttctaataacggtgatggcgacgacgacgatgacgacggtccgaagtttacgttcaaaagaagaaaaggataa

SEQ ID NO: 79699 - DNA, 906 bp, Saccharomyces pastorianus
atgtgggtagtacgataccagaatacattggaagatggctctattagctttatatcatgttgtcttcaggccttcaaaacttatagtataggtagatcaagtaaaaacccactgataattaaaaatgataaaagtatttccagacagcatatcacattcaaatgggaaatcaataatagttcggatctgaaacacagtagcctgtgtttagttaacaagggtaaattgacatcattaaataaaaaattcatcaaagttggcgaaacatttactattaatgcctcggacgttttaaagtccacaataattgaactgggtacaactcctattcgtatagagttcgaatggataaatgaagtctggaacattcctcctcatttgacacaattcaggacgatgctttctgaatatggtatctccactgagatttctattaatgatattcccgctaatctgatgattagcgattacccaaagagcgaggacaacagcatacgggaattgtatgcccttgttagtactatacccatgaaaaaatcacggtttctggtggaattgtgtaatactcttcttcccacatctaaaactaatttaaaatttgatgaaatgtggaacgatatgattagtaatccggagtacaatgtttttgattttgatccaaatattttgctttcgaagtttatgaggctgaataatatcagagtgttaactactatcaaaagtgaaccacgtctatcatctctcctgcggacgttcaatataaatttatttgcatttgacaacattgatagtttatataaatatgttgacagcttggaagcatcaacagaatacctgattttgacaactacagatcagaacgaacatgggaaaacctatgtactatcacacgatgtgacatcataa

SEQ ID NO: 79700 - DNA, 1197 bp, Saccharomyces pastorianus
atgatccttggtacaggtttagctgtagctagatccggtataataaaagccagcagggtcctataccgacaaatgattgtcgacttagagattcagtcgaaggacaaatcatacgcctggtttctaacatggatggccagacatcctcaaagggtatctagacacttatccgttaggacaaactacatacaacatgacaatggatcagttagtacaaaattttcgctggttccgggtccgggaaatcattggattcgttataagggtgcttttatcctgattaaaagagaaaggtccgcaaaaatgatagatatcgcaaacgggtcaccatttgagaccgtaaccttaactacactgtaccgtgacaaacatttgttcgatgacattttgaacgaggctaaagacatagccctgaagactactgagggcaagactgttatttacacttctttcggccctgaatggagaaagtttggtcaaccaaaagctaaaaggatgctgccctccgtcattttggacagtggcgtcaaagagggtattctcgatgacgtttatgattttatgaagaacggcaaatggtactctgacaggggtatcccatatcgcaggggatatttactctatggccctcccggatctggtaagactagctttatccaggctttagcgggcgaattagactacaacatttgtattttaaacctctccgaaaataatttaacagatgacagattaaaccacttaatgaataacatgccagaaaggagcatactattactggaagatattgacgcggcgttcaacaaaagaagtcaaactggtgaacaaggttttcattctagcgtaacatttagcggtttactgaatgccctggatggcgtcacatcttctgaagaaactattacattcatgactaccaatcatcctgaaaagctagacgcggctataatgagaccaggtcgtattgactacaaagtcttcgttggtaacgcaactccataccaggtagaaaaaatgtttatgaaattttacccaggtgagactgatatatgcaaaaagtttgtaaatagtgttaaagaattggatatcaccgtaagtaccgcccagttgcaaggacttttcgttatgaataaagatgcaccacacgatgcgttgaaaatggtctccagcttacggaacgctaatcatattttctag

SEQ ID NO: 79701 - DNA, 321 bp, Saccharomyces pastorianus
atggctaacatcacattcaaaaacggtgaattggccagaagggctgttgaaagatttaacggctctccaatcgatggaggcagatcaagattgagacttaacctaatcgttgatccaaaccaacgcccagtcaaaagtttagccgacaggatcaaggctatgccacaaaaaggcggaaacgctccaagaccagtaaagaggggtccaaatagaaaagctgctatggcaaaatcccaaaacaaaccaaagagagaaaagcctgcaaagaaaagtctagaagatctggacaaggaaatggcggactatttcgaaaagaaataa

SEQ ID NO: 79702 - DNA, 294 bp, Saccharomyces pastorianus
atgtctgctagcttagataaatccttagacgaaatcattggctctaacaaagcaggaagtaatagagcccgtgtcggtggtactcgtggtaacggtccaagaagagttggtaagcaagttggtagccaacgtaggagccttccaaacagaagaggccctatcagaaaaaatactagggcacctccaaacgcagtcgctagagttgccaagctcttggacaccactagagaggtcaaggtcaacgtcgaaggtttgccaagggacattaagcaggatgctgtaagagtatgttaa

SEQ ID NO: 79703 - DNA, 144 bp, Saccharomyces pastorianus
atggttttcgaccattggtccactttaggttctgacccattggacccaacctctaaggctggtgaaattgttcttgctgctcgtaagagacacggtatgaaggaagaagttccaggctggcaagaatattacgacaaattgtaa

SEQ ID NO: 79704 - DNA, 1380 bp, Saccharomyces pastorianus
atgactccaaatttctccacaaaagaattctacggtgcttggtcgtctattgctgcacttaaaaaacattcgttggttcttgaggaaggtagaccaaaacggtattcgctaacagaggaaggtgtagaactaacaaagagcttaaagacggcagacggaatctcttttccaaaagaaaatgaagaacctaacgagtattccgtaaccaggaatgaaagtagtgaattcacagcaaatctgactgacctccgtggtgaatatggtaaggaagaagagccctgcgatataaataacacttcattcatgctggatataacttttcaagatttgagcacgccgcaaaggctgcagaacaatgtatttaaaaatgatagactgaatagccaaactaatatatcttctcataaattggaagaggtctctgatgatcaaacagtacctgattccgcattaaaggctaaaagcacaataaagaggagaaggtacaacggagtaagttacgaattgtggtgtagtggtgatttcgaagttttcccaattattgatcacagagaaataaagtcacaatctgatcgtgagtttttttcaagggcatttgaaagaaaaggtatgaagtcagagataaggcaactcgctttgggtgatattatatgggttgccaagaataaaaataccgggttgcagtgtgtgctcaacaccatagttgaaagaaaaaggctagacgatttagctttaagtataagggataacaggtttatggagcaaaaaaataggttagagaaatctggctgtgaacacaaatactatctcattgaggagactatgagtggcaacattggaaatatgaatgaggccctaaagaccgcgctttgggtcattttagtgtattacaaattctccatgataagaacttgcaattcggatgaaactgtggaaaagatacatgcgttgcatactgtaatttctcatcactattctcaaaaagatctcatagttatatttccaagtgaccttaaaagcaaggacgattataaaaaggtgcttctacagtttcgtcgagaattcgaacgaaaaggcggtattgaatgctgtcataatcttgaatgctttcaagaactaatgggaaaaggcgatctaaagacggttggtgagctaactatacatgttttaatgcttgttaaaggtatatctttagaaaaagcagtagccatccaagaaatatttcctaccctgaataaaatactaatggcatataaaacgtgctcctcggaagaagaggctaaattgttgatgtttaatgtactgggagatgcacctggtgcgaagaaaattactaaatctctttcagaaaagatatatgatgcttttggtaaactttag

SEQ ID NO: 79705 - DNA, 945 bp, Saccharomyces pastorianus
atgctatatcctactgcatctacatatcatgtgaatagtataattaagcagctgataattgaactcgataagttacgactatacgaagatgcaagtgaacctttactagtacagtcccaatcggttattcgatacatggatagttcaacctcaggaactcttagcccacctaacattaaaagactttcctcgaacacagaaagaactagcaacacaatgtcctcctcatcagcatatctatcggcgttgcgaggcccagctccaaacggtgccctggcatctaacaaaaagaaaagacacagaatggagccacgcacaataagagcgttaatagtaggttgcatgttaatgtttttccagcaaatcactggctttaatgcttttatgtactatgcggcaataatattttccaaatttaatataaaaaaccctctactgcctccaattttgattgcctcaacgaacttcatattcacttttttcgccatgtacaccatggactctttgggaagaagagccattcttttgagaacaattttgattatgactgttgggttacttctttgcagtgtaggtttcggtcataaccaagtcaatttacttttaatttctgttgtaatttatgttgcagcatatgcttctgcgatgggcagcgttccatggacttgtgtggaatttctccccttgaacaggagatcatttggggcatcatgtatagcctgcacaaattggttgaccaatgcatttgtttcaatgacatatctgagcactattaacaccattggtgatgaaaatacaatgctcatttttgcttttttcacagtttgtgcctggtttttcgtatatttttggtatccagaagtcaaaggtttgtcactggaagaggttggaaaggtttttgataatggaattgatgttcattatgtctttcgtacctaccattga

SEQ ID NO: 79706 - DNA, 702 bp, Saccharomyces pastorianus
atgtctacagatgaaagtgaagacgtttattctgatctgtattccattatctcccaggtaacatccaatactgccaatgacatcgagcaactcccatatgctttaacgttcaaaacgtcgttaatcttcgttggtgctaccattggtgggcttttattcggctatgatactggtgttatatcaggtgttctgctttctttaaagcccgaagatctatctttggtagttttaacggatgttcagaaggagctgataacttccagtacaagcgtcggatcattttttggctctattctggcatttcctttagcagataggtatggaagaagaattactctcgcaatctgctgttcaatttttatcctagctgcaattggaatggctatagcaagaacattgacgtttttgatttgtgggagattgctggttgggatcgctgttggagtgtctgcccagtgcgtccctctatctctgagtgaaatttcaccttccagaatcaggggttttatgttgacattgaacattattgccatcactggaggtcaattggtttcctatgtgattgcgtcccttatgacagagattgataattcatggagatatttgttcgcactttctgctattccagctattctgttcctttcaatactggatcttatccctgaaatcgcacgatggtccatttccaacggagacatctat

SEQ ID NO: 79707 - DNA, 1638 bp, Saccharomyces pastorianus
atgtttttatctaatagaaatggtttcacaggtagggttttcggtgttactttagcagaatcgttgagcgtcgccagtgcagaagtcattgttcaaagtgagttggtgagttttggtcggatacccatcgtggtagccaagtgcggcgcatacttaaaagcaaatggattggagacctcgggtatatttcgtatagcgggcaatggtaaaagagtaaaagcccttcaatacatattctcgtcgccacctgattatggtaccaaattcaacgattgggaaacatatacagtgcacgatgttgcatcgctcctgaggagataccttaataatttggccgaaccgctaatacctttatccctatatgaacaattcagaaacccgctacgatctagaccaagaatcctaaggcatatgttgacccacgaagtttctcatccgaatgcgaataaagcaaataatgtaacagtaaagtcaagtagacagaactataatgatgatggtgctaatgatggtgacatcgaaaaggaggacgccaaagatgatgaagaaaaaagacgaagaaaaatacgtcataagagaaggctgacccgcgatataagggcagctatcaaggaatatgaagagctctttgttaccttatcaaatgacacgaaacagctaactatatacctactcgatttactgagtctttttgcaaggcaatcacagtttaacctaatgtctggtagaaacttggcggccatcttccaaccttcaatattatcgcatcctcaacatgatatggaccccaaagaatacgaattatcccgactagtggtggaatttttgatcgaatactcgtacaagctattaccccatcttttgaagttggctaaaagggaacaacaggaacggttgtcgaccgaaaataagaaaaataatggggataaacagaaaactgatcctatagaaataccaaagatcacctcatcggattcgccaccaatagtttcttccaataaaaacccaccggtgattgacaataacaataaactagaccatacgacgttatcgccaatatctacttcgataccggagaactcatcagacctacagacttcaaaaatgttaaagcctccgaagcaaagaagaccacactcaaaatcgtttggttctactccggttcctccggatgttattgctagtaataaaagaagaacgagtttattcccgtggttacataaaccgggaattttgagtgacacaggagacaatggcgacttaactgctactgaagctgaaggtgatgattatgaagaagaaaatgttgatccatacggtcagtctccatttagcgtacactcaggttctttgcccaaacagcattatctgccaattcctcgaatgaacagatcgttgagtggaaacagtaccaattcgtcctttaacactagacctatttcaatgatcctgaccagtggtaatgataattccgctgatcaattagaattactaagtaacactcatagcaataatgagcgcagtaatgctttaccattaaccgaagatgatggggatgaaagaaattcaagatcacgcaagagggaatcgtggtttcaaaggctaacaagccgttcaggctctgctaacagggcttga

SEQ ID NO: 79708 - DNA, 441 bp, Saccharomyces pastorianus
  modified_base (393)..(395): a, c, g, t, unknown, or other
  modified_base (420)..(422): a, c, g, t, unknown, or other
  modified_base (432)..(434): a, c, g, t, unknown, or other
atgccaaataatactcttaaacaaggtcccaaaattgaaaatgtttctccctctaaaggtcacgtcccaagtttttggaaacagttcataaacaaccccaaaagtatgtcatcagagagtatcagtgtccctaggtcaccaacttcactttccagaagtgcccaaccaacgactttaaagaggcctccgctgtcttcgagaccatactcatataatactccaacgaaagataggaaatccttctccaaatccgcaaaacagaacagtagcagcaacaacactaatgcggggacatcgccccacgcagagtttaaaaattatagagatatgtttttatctaatagaaatggcttcactggcagagtttttggtgtcactttagctgaatcgttnnntagtgttgccctagtgcggaagtcnnnattgttcaannnagcgtaa

SEQ ID NO: 79709 - DNA, 180 bp, Saccharomyces pastorianus
atggttttcttagcctcgttgtccgccatttcggaagccatcgaggacaggatcattatgaattctatgccggagttgatgatgatttctcttgcatccttggtaaacatcaaatcctggtccagtatttcagatatcatcttttgtacggtcgctaagatcattcagtgttttctctaa

SEQ ID NO: 79710 - DNA, 834 bp, Saccharomyces pastorianus
atgttatcaatattcatgtatacgattattttcaatcctatactacaacaatatctaccatctttcgtgcagcaaagggatttgtatgaggcaagagaacgtccttcaagaacattttcgtggcttgcgtttttcctctctcaaatcattgttgaaatcccatggaatattttagcgggtacgattgcttattgtatttactattacgcggttggattttatgcgaacgcctcagctgctggtcaactccatgagagaggtgctttgttttggttattttctattgccttctacgtctacattggttcgatgggtttgttaatgatttctttcaatgaagttgctgaaacagcggcacatatgggatcgctattgttcacgatggcattatctttctgtggtgttatggctacccctaaggctatgccaagattttggatctttatgtatagagtgtcacccctaacttatatgatcgatgcattattagcccttggtgtggctaatgtggacgttaagtgttcaaattatgaaatggtaaaatttactccaccatctggaaccacctgcggtgactatatggcatcatatatcaagttggccggaacaggctacttgagtgacccgtctgcaacagatatatgtagtttctgtgcggtatccaccaccaatgcctttttggccactttcagttctcattattacagaagatggagaaattacggtatttttatctgctatattgcttttgattatatcgctgcaacattcttgtattggttatccagggtacccaagaagaacggtaagatttccgaaaaacccaagaagtga

SEQ ID NO: 79711 - DNA, 1566 bp, Saccharomyces pastorianus
atggcatatgttgttttctttttctttgtttatctaattctttgtgagtataatgaaggtgctaaacaaaagggtgaaatggttgtgttcctaagatctaagatcaagcaattgaaaaaggaaggtaaattacaagaaaagcataggcctggagatattgaaaataatgcaggcagttctccagattccgctacaacagaaaaaaaaatactagatgatagttctgagggatcggatagctcttcagataatgccggattaggactttccaaatctgaagcaattttccactggcgtgatttatgctatgatgttcctataaaaggaggtcaaagacgtatcttaaataacgtagatggttgggtaaaaccaggcactttgactgccttaatgggggcgtcaggtgcaggtaaaacaactttactggattgtttggctgaaagagtcaccatgggtgttattactggtaatatttttgtcgatggtcgtctccgtgacgaatcattccctagatctattggttattgtcaacaacaggatttacatttgaaaacggctacagtaagagaatctttgagattttcagcttatttacgtcagccttcgtcagtttctattgaagaaaaaaatagatacgtggaagaagttatcaaaattttggaaatgcaaaaatattcagatgctgttgttggtgttgcaggtgaaggtctaaatgtcgaacaaagaaaaagacttactattggtgttgaactagcggcaaggcctaaacttttggtttttttggatgaaccaacttcaggcctggattcacaaactgcttgggacacttgccaacttatgaggaaactagctacccacggtcaagcaattttgtgtactatccatcaaccttctgctatattaatgcagcagtttgatagattattatttttacagaaagggggccaaactgtatatttcggcgatttaggtgaagggtgcaaaactatgatcgattattttgaaagtaaaggagctcacaaatgtccacctgatgcaaaccctgccgaatggatgttagaggttgtaggtgccgctcctggttctcacgctacgcaagattataatgaagtctggagaaactcagatgaatacaaagctgttcaggaagaattggattggatggaaaagaatttaccaggcaggtcaaaagaaccaactgcagaagaacataaaccttttgctgcatctttatactaccaatttaaaatggttaccattcgtttgttccaacaatactggagatcaccagattatttatggtcgaaatttattttgactattttcaaccaagtttttattgggttcacttttttcaaggctgacagaagtttacaggactacaaaaccaaatgttatcaatattcatgtatacgattattttcaatcctatactacaacaatatctaccatctttcgtgcagcaaagggatttgtatgaggcaagagaacgtccttcaagaacattttcgtggcttgcgtttttcctctctcaaatcattgttgaaatcccatggaatattttag

SEQ ID NO: 79712 - DNA, 1299 bp, Saccharomyces pastorianus
atgacaagaaactcatggatgatgctggatggtaccaaaactgattttcatataacggtgagaaataaatcactgagctgtgcaataaatcatattaagatcataccaatgaataatattgagcaaatgttgaaacctgattattggaaaaaaatgccaccagatgacttgtacatcatggaaaaacagctagattggctctctaagtcttgtgtacgtattattaaattaccaacggtaatcaagccaaatgaaaccatcacatttgatttggaattagataatactgctgttccatttaatttcaccggatttgacttattgatcgaatacggtatgagcgctactgatgaatcctgcatttatttaaaaaagttatcaataccatatgaagtaacattgagaagaacaattgaagtaccaagtatggacatcataccgctaaatgaactcttcagctcgcaagttgaaaatgttgattggattgagtatgtaatgagcaaaatacgtgcagaatctaacctccactctagagattttatattgttattattagacttcagaaattcttggattgacggaataaaattgaatgttcaatttgaagatttcactagtaatgagtatcatgtagaggcaagccatacctcgagaattattgttcctattaaaaaaattgattacaaaaagtataattttgagaatacacctataccaagaatctatccaggccgacaatttattcaaagtggtttaaacgaagaacagactatagaaatgagacaaaaattttggtgtcgcgaacatatcatttcaaagcttaaatgtaactggaaattaaccacagaccaatctgtaacaggttcggtggatttcaataagttcatagaaaagtttgatcacaagatggtctacacgatataccccgggagattattttacggagtgcagctattgcttgatgagccaaaagtcaaagtaggggaaataataaacttgaagataataacagagccgactagtacatgtagaagaaaacaaaattctactgtaaattttttggacatcgtgattttcgacagcaagacatcaaaaatattaccaagatcgaacagacgaatttggtataatggttcgttaactaaaccaatcagtacaaccaaagtttctgaaattaacttagaaattattccaattgaaaaaggccggtacgagtttagcgtttgcatctccaaatcaaacaaccaagatggaattatccagttcgactctgaaaacgttatcttgtctgttatttag

SEQ ID NO: 79713 - DNA, 2163 bp, Saccharomyces pastorianus
atgaatattcttaagcatttcccaagctatgttggcccatctaagattaggaccttagtgataccaattggccattggacgcgaaaagagtttaataatgcggtacagaaactttctgaattcaacgaaattcatctgtctgatgtaacccccattgacagccctatcttcacaccgcaaggctttccacatgggaagttatttttcgacttcttgaccatagatcatgacgatgcattggagttgtttctgtatgattttgagccatttcggaaaacatttgtcattattgggctggtaaacgattacagtgaccccttgaccaatttgaatttcatgaaggagaagtatccaactttgatttcaccgaatttggtgtacgcttcatctacacccactaaagagcttgagcaaaccatagatacgatggaaaatgtattcgcatcttctccagatatgcagaaaaacatagaaacgattatgtgcgacatagcaaggaactttttaaccgcattgaacagctattactcttcctataaacatgttactttgaggtcgccgggtgcgattggtgggaatgcggtattgaaaacaactctaataagacagaacagttacacatcttcgtcatccagcacacccatgtcagcggtacaatcttccgtctcaagttcatcgaaggcaggctcagttactactgcttctaagaggttatcttcctttgagatgactaccaatagtttaaagagatccgcttctctaaagctagctaccacgctttccacatctgagaataggtctcaacaaaaatcattgggcagacaaatgaaaattttgggcaatttccaattgctggcaggaaggtacgttgatgcgttgaacagctttgttgatgcgatcacaactttgtacaaagtgcgtgactacttatggttgggttctgctcttgacggtatttcgatctgctttttacttctatcttatctcggtttgtcataccagattccacaaattgtgagtctcatttgtcctgtggagaagctcaattttgaatctagctcaacggggatttcgcctgtagattccaatagtaaagccacagcaagcacgacggcgtcaagcacaccaaggaacagcatatctatagctgctatgcagtcacctagaaattccattatgtctttatctgccccagcattaaatattgatgtagaaaacatcaacctcccgttattaattaaatgcatatctgacaaagtcttgtattattatgatttaagtttgatgcacaatagtgaatatgctccgcaagtggtttattgcgagtttttactgaagactttaactttcatgacatcgtgttataagagttcagagttttcaaaggacgttctggacaatattgtgaaaaaccaacacagggccttgtcagatatccctaatagtccgatgttcccaaggtttgaagtttatttctatagcaataaattgttcgaattacaattgaaggaaatgcaagttgaggctcaaattaaaatatactctactatggcggaagtttatcgccttttgggatacaaaagaaagcaattattcgtgttaagattgctgatggttgctcttttggcgactccgaataagatagcatggcatcctgactacaggaccttgatagataccatcatagaactcctcaacatcaatgaaagcgaggccaaaatcaatgtagatgatccgtctcaatctacttggttgatcctacagaaaaagatcctacaactatgcattaaagtttcaagaaaaatcaatgacttcgaatatgtcgctaaatttagctcgatactaattacgaaatatacgcatctgttaaatcagtcggaacaagatgccttgtttaaagaatatattcaaccatcaattaccaacgagtctatcacaagttattgggatcccttcattctgagggaagttgttataaatagaatattggatagtgaccccacttcaaacgaaatcccattagagtcagatgttagcagccttgaaagcctagaaaatagacaaaagacacaggatattaatccgcaggaagttttcaaccctttcaaacgggttcaaccacttcttttgtttctaataacagcaccaaagttcctattttag

SEQ ID NO: 79714 - DNA, 207 bp, Saccharomyces pastorianus
atgtatcattcggcgattctctttgactttttgctgaggttctggtggctatgggtatatttatcgcagaatctgaaattagttgccgcagatagcgactacatttttttccaaggcgaaatgcagtatttcgaagtaattagaagaggcatatgggtcgttttcaaattggacgcagagtattatattaagtttgcaagcaaataa

SEQ ID NO: 79715 - DNA, 909 bp, Saccharomyces pastorianus
atggagaaaagcgaaagtaattctgaaggactttatctccaaaatatattaaatgttccccctccgcagcgatttattgtgctcataatacttgccctttggatctggacatggatattaaaattcttcttgcatagtaatttagacgtatcccaagtcatactcacgagagtaccgcacgatatacgtccaggttatactctacagcaattgcatagaacagctagaaattttgctttgaagataacaaggattattataccgttccactttgccactgtgttcctttttgagttcatgaatattatagaaggtccactcaaaaatatcattctcatcgtatattttctaccattgatccaatgtgtcactatattttggtttctgttgaaagagtgccagataataaaatattgtactaggagatgtttgttgatagaatcctccccccgttccttaaggaatacctacattttaatctctgacacgttgacatcgtttgcaaaaccattgatagacttcacattgtttacctctctaatttttagagaacccttcacacattttgatctatccgtagcccttcttcctgtactggtaagactactgcagtgtttgagagaataccgtttactgcacgaagcaactttactattcaatgcattgaaatacagttgtaatcttcccattcttttttgcacctggagatcaagagtgtatgagggatccatcaacgaagaaagactacaccacgttcaaagatggtttatgctaattaattcttcctatacgttattttgggatgtaaggatggattggtcattggactcgttaacctctttaagatccagatccaaaagtgccgtcacatctaaagaaaaaaatgtatcattcggcgattctctttga

SEQ ID NO: 79716 - DNA, 1437 bp, Saccharomyces pastorianus
atggcgacatttgaatctttaatcaacttatatgatatctatttgaacgatgtcgcactaaggcaagattccaacttggtggaaacgtggatgaaaagagtgtccttgcagaagtcagcagcggaaaagtgtaatgtgtattcagaagctatactgaaaattgatccccgaaaagttggtacgcctggctctttcggtaggctttggtgttcgtatggggatttgtattggagatcaaacgcaattagtacagctagagaattgtggacacaatctctgaaggtaccgtatccttatatagaagatctggaagaaatttacctaaactgggctgatagagaattagataaagaaggggtggaaagagctttttctatccttgaagatgcattacatgtgccaacaaatccagaaattctcctcgaaaaatataagaatggacacagaaaaatacctgctcaaactgttctattcaactcattacgtatttggtccaaatacattgattatctagaggcttactgcccaaaggatgcaaattcctccgataaaatattcaataagacaaaaatggcatacaatactgttattgatttgagattgatcactccagcaatggcagaaaattttgcattgttcttacaaaatcattacgaagtcatggaaagttttcaggtgtatgagaaaacaatccctctgtttccccccgaaatccaatacgaattatggattgagtatctagaagtagcgacatcacatcaattgtcatcactgagtcctgaacatattagatttttgtttgagaaagcacttaagaatctatgttcaaatggtatagactgtaaaacaatttttatcgcttatagcgtatttgaagaaagaataagtggtctgattagcaagagtattgagatattacgtagaggtgctgtaataggtactgttagtgtgagcacgcacctcgaaagtagactgcaactgtggagaatgtgtatttccaaggccgaatctactttgggaccatcagtaaccagagagttgtaccaagaatgcattcaaattttaccaaactctaaagctgttgagtttgtgattaaattttcagatttcgagagctctataggagaaactattcgagcacgtgaaatccttgcctatggtgcaaagcttcttccttcatccagaaatactgaattatgggatagctttgaaatttttgagttaaaacatggggataaggaaacttacaaagacatgttgaagatgaagaaggtgttggaatccaacatgctcattgattcagctagcgttagccatgaggaaggtaacattaacttcgtggcggcagcaacctcgcatgctcccaactcgcatactcttaaccaatcaacctcttcatattcgattaatccagatgaaatagaactagatatttga

SEQ ID NO: 79717 - DNA, 969 bp, Saccharomyces pastorianus
atgtcagcatacatcgcaatgaaaggagtaataacaaacgtcgatgagaacataagaaatgatgaagatgtggcttttgagtacgaaatacaaaagacaccgcagaacatacttacatggaaaagatatatcgagtattggaaagaggagggaagaactgacaaacagattaggtggctatatgaaagattttgttcacaatttgtaacagatacaagtatatgggaagattatatacgctgggaatcaacaaaggaagtagtcgaaacttcacgtattttctggctttttcaaaggtgcctgaaaagctgtgtacgagattgtgacaggatatgtttgtcttatttagaattggcaattgaacaatatgacttggcaatgataaggcatgccttagcttcatctttaatgaaaatggagagagaaatgcatcggaaagtttgggatcctgtcataaaatttgtggaagaaaaagttttaccattaacgcaactggattcaactcaagaagatgaagaagaaagtactgatgaagctgaattgataaatgtacttttagtgaagggtttcacgaagggaggttttattagcgaggaaattagtgaaaacggaagtagaggtgatatttggtcgtcacatattttagaaagatacttaaaagtggctcctcagcaaaaacgaaatgaatcgctggcaactcttgcattaactagagacaatattaccatcaaatcagtatatgaaaagtatttgccacaagatgaaaatagtgggaagtatctacctagttcagaactgccttttgaattaaatttcaattatttggccagcctagaaaaactaggtttagataatcaatatgaggagttcatgaggcaaatgaatggcatatatcccgacaaatggcttttgttgatcctatcacttgccaaatataatatctctcgcgggaggctgacagttgtggtg

SEQ ID NO: 79718 - DNA, 699 bp, Saccharomyces pastorianus
atgacagaattgcccaagagaccggaacttaaagagatttcacttcttcactctcgaaaatcttcctactattctgctaagggtgttgaaaggccaagtacaccgttttcagattacagaggcttaagtaggtccagttcaataaatatgcgtgactcatttgtacgtctgaaggctagcagtttggatttgatggccgaggtcaagcctgagaggttggtgtattcgaacgaaataccaaatttatttaatataggtgacggctctacgatttctgtaaaaggagattctgatgacgtgcatccccaagaacctcccagctttacacatagagttgttgactgtaatcaagatgatttatttgctactttacagcaaggcggtaatattgatgcagaaacagcagaggcggtttttctaagtagatacccagttcctgacttgcccatatacctgaattcatcctatctgaacagaatactaaaccaaagcaatcagaattcagaatcacatgagagggatgaaggtgcgataaatcatattataccccacgtgaatttgaaccatttactgacaagcagtattagagatgaaataatcagcgtagcttgcactactagatatgaggggaaatttatcactcaagtagtttatgcaccttgttattataaaacacaaaagtctcagatcagtaattag

SEQ ID NO: 79719 - DNA, 1200 bp, Saccharomyces pastorianus
atggtagatatatcggatacaagtggatacctacataaacaaggtgtcttacctagtgtttctttcatttgcacttctttttttgcgtgtggactgacatcttggaaagttgaactgtcatattatatagttgttgcagccgccatgggaaacagtccttctactcaggatccatcgcattcaaccaaaaaggagcatggacatcattttcatgatgcattcaataaagatcgtcagggaagcataacctctcaactgtttaacaataggaagagtactcataagagacgcgccagtcatactagcgaacataatggtgccattccccctagaatgcaattacttgcatctcacgatccatcgacagattgtgatgggcgcatgagcagtgatactactatcgataagggcccgtcccatctattcaaaaaggattattctttgtcctctgccgcagacgtaaatgacactacgttggccaatttgactttaagtgatgatcacgatgtgggtgcacccgaagagcaggtgaaatctccgtcgtttttgagcccaggtccatcaatggccactgtcaaacgaactaaaagtgatctggatgatctgtctactttgaattacaccatggttgacgaaacaacagaaaatgaaagaaacgacaaaccacaccatgaaaggcatcgctcaagcatcatagctttgaaaaaaaatcttttagaaagttcagctactgcttccccttctccaacgaggtcttcatcggtgcattcagcatcacttcccgccttgaccaagacggattccattgatattcctgtaagacaaccctattcaaagaaaccatctatccatgcataccaatatcaatatctcaataacgacgaaacattttctgagaactctcaaatggataaagagggaaacagtgatagtgtagatgcagaagcaggcgtacttcaaagtgaagatatggttttgaaccagtctcttttacaaaatgctttaaaaaaggatatgcaacgtctttcaagggtgaattcctctaattcaatgtatactacagaaaggataagccacgctaataacaatggaaatatcgaaaataacacccgtaaccagggaaacgcgggaggctccaacgacgattttaccgcacctatatctgctactgcaaaacatgatgatgaaactgtaacggtg

SEQ ID NO: 79720 - DNA, 432 bp, Saccharomyces pastorianus
atgtcgagtatgtcttcaatatcatcaacaaactccaccgaaaatactttagttgttctaaaatggaaagacgatggtaccgtggctgcaaccacggaagtctttatagtaagcacggatattgcttctgctcttaaagagcaaagagagcttactttggatgagaatgcaagtttagactcagaaaaacagttaaatcctaggatccgcatggtttatgatgatgtgcataaggaatggtttgttccagatctttttttgcctgcaggaatttatagactgcaattctccatcaatggtatattgactcactcaaattttcttcctacagctacagattcagaaggcattttgtcaactggtttgaagtattgcccggttatcatacgatcgagccatttagaaacgaagcagacatggactcgcaagtag

SEQ ID NO: 79721 - DNA, 1293 bp, Saccharomyces pastorianus
atgagctcgagggacaacgacgatagcggagacaacgtcaacggtagaggcacctcacctatccctaatctaaacatagacaagccttcgccgtcagcgtcgtcagcgtcaaaaagagaatatttaagtgcatatccaacactagctcacagagattcatcatcttcacttagtccgcggggcaaaggacaacggtcttcatcgtcttccagttccagtcaaagaatatatgtttccccaccatctcccacaggtgatttcgtacacgggagttgtgcagacggtgataatggatctaggactaatactatggtcgaaatgaaaaggaaaaaaccagttcgtccagtggacatagatgaaattatccagagattactagatgccggctatgccgcaaagaggaccaagaatgtttgcttaaagaattccgagattattcaaatttgccataaggctcgtgaattattccttgcccaacctgctctcttagaattatctccctcggtaaaaatagtgggtgatgttcacggccaatatgcagatcttttgagactttttaccaaatgcggtttcccccccatggcaaattacttatttttaggcgattacgtagatcgcggtaagcagtccctggagaccattttactattactatgctataagattaaatatcctgaaaatttcttcctcttaagaggcaatcatgaatgtgccaatgttacaagagtctacgggttttatgatgaatgtaaacgacgttgtaatatcaagatttggaaaacctttgttgacacgttcaacacgctaccgttagcagccatcgtcacaggaaaaatattttgtgttcatggtggactatcacctgttctaaattccatggacgaaattaggcacgttagtaggcccaccgatgtacccgacttcggcttaattaatgaccttttatggtcggatcctacagattcatcgaatgaatgggaggataatgagcgtggagttagtttttgttacaataaagtggctattaataaatttttaaacaaattcggattcgatttagtgtgtagagcacatatggtggtggaagatggttatgaattctttaatgacagaagcttagttacagtgttttcggctcccaactattgtggtgaattcgataactggggtgctgtcatgaccgttagtgaaggcctactctgttcttttgagttgttggacccactggacagtaccgctttgaaacaagtgatgaaaaaaggcaggcaagaacgtaaattagccaatcgctga

SEQ ID NO: 79722 - DNA, 630 bp, Saccharomyces pastorianus
atgggtaattccggttcgaaacaacataccaagcacaatagcaagaaggatgaccacgacggtgacaggaaaaagacactagatctcccaccactgacaaaatcggatactacacattcgctgaaatcgtcaaggtcgctgaggtcgctgcggtcgaaacgctcagaggcgtcgttggcatctaatgttcaagctcaaacgcaacccctctcccgcagatcgtccactctgggaaacggcaatcgcaaccataggcgatcaaacaacgccccaatcactcctcctaataaccactacctaacctcacatcccagttcgtcaagaagactctcttcctcttcgagaaggtcgagcatggggaataataacaattcagaattgcccccgtcaatgatccagatggagcccaaatcacccatcttgaaaaatagtacaagcatgcattccactagctctttcaactcttacgaaaatgcgttgactgatgatgacgacgataggggggatgatggcggcgagagcccctcaatggccaaggttactcgcatcaacactagttcttccgcagatagaggctacaagcgtactcctttaagacgtcataattcatacaaccggaaaaaggtgtaa

SEQ ID NO: 79723 - DNA, 162 bp, Saccharomyces pastorianus
atgttcgctgattttgtatggcgagaggcattttttacgccttggtatatcattggtgttattttcatttttgtttcattctttctagttaaccatcggggagaatctgctgttgaaaaggactgtgctgcggttgaaaaaggacctatcttggatgcctaa

SEQ ID NO: 79724 - DNA, 786 bp, Saccharomyces pastorianus
atgaatcgtgttggtatagacgtagatcatatgataggggtcctgcttctggccgtagtggtggtgttttgggttggcgcttcgtgtttgactaatgaattgctcgagacaaacgcgtacaataaacctttcttccttacttatctaaacatatcatcgtttgctctttatttgacgccagatctatggaggataatccaatcaagaaggaagagcttgcaggaacggacagaacgaacattacctattcacacacaagaatctttttcagagttcctacctttactatcttcaactccttctacttcttctaatttgtcttcgatagcggacacgaaagtgaaggatacaatgaggttgagtctgctattttgcgtcttgtggttcgtggcaaatttggcggctaacgctgctttgtcgtataccacagtggcttcgtcaacaattctttcatcgacatcctcattttttaccttatttcttgccactagtctaggaatagaaactttttcgacaaaaaaactgctggggttatttgtgtctttgtttggaattatcttaattgtgatgcaatcctcgaagcaacaggattctgtgagtgcttcctcctttttggtaggtaacactttagcactgctggggtcattgggttacagtgtctataccacccttttgaaatacgaaatatcatccaaaggtctcagactagacattcagatgtttcttggttatgttggtatcttcacgtttctgttgttttggccaattttattatcctggatataa

SEQ ID NO: 79725 - DNA, 1275 bp, Saccharomyces pastorianus
atgtacttgaaggcatttgataaaaacaagttactgttgttagctgcgcagattgtttcatactgttctaataataagaactccatcaaaaacgtgccaccaatattaataattttacccttggataatgcaactctgactgaattagtagacaaggcgaatatttttcaggtgatcaagaacgaagtttgtgccaagatgcctaacattgaactatatttgaaagttattcctatggatttcattagaaacgtactggtgacagtggatcagtacgtcaacgtagcaatttctatatataacatgctgccgccaaaatctgtaaagttcacccacattgcgcatacgctgccggagaaagtgaatttcagaaccatgcagcaacagcaaatgcaacagcaacagcaacagcagcagcagaataacagtacaggatcatcttctataatatattatgactcgtacatccacctggcatactcgcgtagtgtagataaagagtgggtttttgcagctctttcagatagctatggacaaggcagcatgacgaaaacgtggtacgtcgggaattccagaggaaaatttgacgacgcatgtaatcaaatatggaatatggccctaaatttagcgtctaaaaaattcggaaaaatatgtctaattttaactagattgaatggcatactgccggatgatgaattgatgaattggaggagactttctggtaggaatatacatcttgctgtggtgtgtgtggatgacaactctaaaatctccttcatagatgaggacaaattgtaccctagtttcaagccgatctacaaagacactaggtttggaggacgcatggatatgaccagattagacgactatgaaataagggatatagaccaggatatccatggaatagtatttcagcacccgttcccactggcacactcacagcatcgctgtgctattaggagtggtgctttgatcaaattcaaaaaatgcgacggtgatacggtttgggacaaattcgcagtcaaccttttaaactgtccacattctgatagtacacaattgctggaaaccatcttagaagagtttcgcaacctggctgctctaaacgtgtggtacggtctctctgatggcgaagatggccatattccatggcatatcctagccgtgaaaaaaatgatgaacactcttgtgcacaccagagtaaaaattgctaatacttccgccgctactgtgcataccgctacttcttcatcaattattctctcggataaataa

SEQ ID NO: 79726 - DNA, 1782 bp, Saccharomyces pastorianus
atgctgtcgcccagcgatcaatttgctccagctttcttaaatacccctaataataacatcaatgagaatgaattatttaatgataggaaacaaactacagtatcaaatgacttagagaacagcccactgaaaacggaactggaggcaaatggtagatcactcgaaaaggtaaataattccgtgagcaagacaggaagcgtagacacacttcataataaagagggaacactggaacaacgagaacagaacgaaaatctgccaagtgataaaagtgactctatggtagacaaggaattgtttggtgaggatgaggatgaggatttatttggcgatagcaataaatcgaattctacaaacgaatcgaacaaaagtatatcggacgaaattaccgaggatatgttcgaaatgtctgatgaagaagaaaataataacaataaaagcattaataaaaataacaaggaaatgcatactgatcttggtaaagatattccattttttccctcatctgaaaaaccgaatatccgtacgatgagcggaactacaaaaagattaaatggaaagaggaaatatttggatattccgatagatgaaatgaccttgccaacgagtccattatatatggacccaggtgcgccactccctgtggaaacaccccgcgatagacgcaaaagtgtgttcgctccactgaattttaaccccataatagaaaacaatgttgataacaaatacaaatctggagggaaattttccttcagtccgttgcaaaaggaggaagcattaaactttgatatttctgtggcggatctttctagctctgaagaggaagaggatgaagaagagaacggtagcagcgatgaggatctaaagtcattgaacgtacgcgacgacatgaaaccttctgataacatcagtactaatactaatattcatgagcctcaatacataaattactcttcgatcccaagtctacaagactctattataaagcaagaaaatttcaattcagtaaacgatgctaatatcactagcaataaggaaggcttcaactctatttggaaaattcctcaaaatgatataccacagaccgagtcaccactgaagaccgttgattcatctattcaacccatagaatccaatataaagaagaccttggaagataataatgttaccagtaatccgtccgaatttacgccgaatatggtaaattctgaaatttctaacctaccaaaagacaagagtggtattcccgaattcacaccggcggaccccaatttatcttttgaatcatcaagtagtctaccgtttctattgagacacatgccgctagcatctataccggacattttcattacgcctactcccgttgttacaatttcagaaaaagaacaagacatcttagatttaattgcagaacaagtcgtcactgattataatatcttaggaaacctcggtattccaaagatcgcctataggggagttaaagattgccaagaaggtttaataacaaccacaatgttacagttattttccactttcgatagattaaatggcaatgatacgatctccaaattctataacatgaagcagccgtacgtttttgtaaagaaacatcacgaactaatcaaagtcaaacacgactctcagccatttattaagttcctcaattttcgccctccaaatggaataaaaaacttcaaatccttattattaagttcatctttcaaagaagatgtctgtcatttgcgccaactctatctcaaacatatattaatcaagagttag

SEQ ID NO: 79727 - DNA, 1008 bp, Saccharomyces pastorianus
atgagttctgacgcttccacgtacagacttgaggatgttttatccagcttctatagagtggagaaaatcaaaaagatcaactatcatcagtacatttctaaagcccaaaacgatcaatggtctatccaaatggaattcatgctacggaagcaggatccaaagactctagttgcgctgctttcaagggatttatggtgtttcagtataaatgatgatccggtaccgacacctcctgcgatagaacataaaccggtgagcccagataaaatcggaactttcactgccgattattcaaagccaaacttaccgccacactatgctctttttttaaaagctttaagaaggaaaatttacattaatttggcattaggttcacacaataagctaatacaatttgggaatgcctgcatatcattaagcggagtgccaaattatctcgtacagctagaaccacacctttttgtaaacggagatctcacagtgtcgttatgtgccaagaacatgggattagtaccaatgaaggaggaaaatttggaagaatctttcctttcaaagcatgcgctttatttagcaccatctggaataaggatgcatttggcccctgcttccaagcaaggatacttgataacgccaccaaaacatacagaacttctcttgacgacgttaagtgtatctcatggtataaacttacaaaataaaaaaaatttgaaatgggttgctgttgttcctgacttaggacatctcaacggccacacacctactatagcttcgtatttaactcccttacttgaagcaaagaagctagtatggccgctgcatttaatcttcgcccaaccagtagctgatatagaaaattctacttccggagatccatcagaatttcactgtttgcaagatgctctggatgccattgatgatttcatacaattaaagcaaacagctgcctataggactccaggaagttccggcgtattgagcagacctgcaggcatgcaagctgcactgccg

SEQ ID NO: 79728 - DNA, 240 bp, Saccharomyces pastorianus
atgaaaagaatccaaaagggtccagttagaggtatttctttcaaattgcaagaagaagaaagagaaagaaaggatcaatacgtcccagaagtctctgctttggacttgtctcgttctaacggtgttttgaacgttgacaaccaaacctctgacttggttaaatctttgggtttgaagttgccattatctgtcatcaacgtttccgctcaaagagacagacgttacagaaagagaaactaa

SEQ ID NO: 79729 - DNA, 603 bp, Saccharomyces pastorianus
atgaaagataaattaaacgagttaccagaggcagacatcagcgtactaggtaatgcagagaccaacccagcattacgcggtgacattgcattaactattttcgatgtgtgtatgaagactttgggcaagcattatattaataagcataagggttactatgccatctcagattccaaaatgaatattgaactaaataaggagaccttgaattacctattcagtgagtcactaaggtatattaaactatttgatgaatttttagacttggaaagagactatcttatcaatcacgtgttgcagttttggaaaaatgacatgtatgacctttcgctccgtaaggatctaccagaattgtatttgaaaacagtaatgattgacatcactctaaatatcagatatatgccagttgagaaactcgatattgatcaattacaattgtctgttaagaagtattttgcatatatatcgaaattggatagcacatcggtgaagtcattgaaaaatgagtatcgttcatatttacaagacaattatttgaaaaagatgaatgcagaagatgatcctaggtataaaattctagatttaattatcagcaaactttaa

SEQ ID NO: 79730 - DNA, 225 bp, Saccharomyces pastorianus
atgcaaaacccaactcactacaaaatcccagcttggttcttgaaccgtcaaaatgacatcactgatggtaaggactaccacactttggctaacaacgtcgaatccaaattgagagatgacttggaaagattaaagaaaatcagagctcatcgtggtatcagacacttctggggtttgcgtgttagaggtcaacacaccaagaccactggtagaagaagagcttaa

SEQ ID NO: 79731 - DNA, 405 bp, Saccharomyces pastorianus
atgaaatggacagcagtaatatcgaggttgggatcaaccgcggagaagatgggcgaaaagaaaaataagaagaaaaagaaaaatgacaagactatgccaattgagatgccagacaaatacgaactcggccctgcatatgtaccgcagttattcactccgacgcgtttcgtccaattctacgccgacttggaaaaaatcaatcaagaattacataattcatttgttgaatctaaggatattttcaggtatgaggtagaatatacctcagacgagaaaccatactcaatggattcgttaacagtaggaagttatttggatcttgcaggcagattatacgaaaacaaacctgcatgggaaaaatacgtcgaatggtcatttgcgtcttctggatataaagatgattaa

SEQ ID NO: 79732 - DNA, 141 bp, Saccharomyces pastorianus
atgggtgcgaaaccatctaacaaagaagcatatatgaacaccgtccgcgacacatactatcggaaagtgtggaataagctggaaagagtggatgaaatacatgttgaaaatgagaagcaaaagaaagaaaagaaggactaa

SEQ ID NO: 79733 - DNA, 195 bp, Saccharomyces pastorianus
atgaatattgaccacttcatcccaacggatggtaaaaaagctagaaaatcgttattgaaagccatggagcaatccactcgtgttcaacaaggagaagacagtaatgaagaggacgaagaaactgaattgaatagaattctggatcacgctatggcggcaaaagaagtttttttaaatgggtgcgaaaccatctaa

SEQ ID NO: 79734 - DNA, 381 bp, Saccharomyces pastorianus
atgattaagaacaatgaattcattgaatgggcgcaattctccggtaactactatggtagtactgtcgcttccgtcaaacaagtcagtaaatctggtaagacttgtattttagatattgatatgcagggtgtcaaatctgtcaaggctatcccagagttaaatgccaggtttttgtttattgctccaccatcggtcgaggatttgaaaaaaagattagaaggtagaggtacggagaccgaagaatccatcaacaagaggttaagcgccgctcaagctgaattggcatatgctgagacaggtgcccatgacaaagttattgtcaatgatgatttggataaggcctacaaggaattgaaggattttatctttgcagaaaaatga

SEQ ID NO: 79735 - DNA, 159 bp, Saccharomyces pastorianus
atgtcccgtcctatcgtaatttctggcccaagtggtacaggtaaatctacactgttgaagaaattgttcgctgaatacccagattctttcgggtttagtgtttcatccactactagaaccccaagagctggcgaagtaaacggtaaggggatcctctag

SEQ ID NO: 79736 - DNA, 2232 bp, Saccharomyces pastorianus
atggggcacgcaaaaaccacgaccgttagacagttaccatcagattgtaccccgctaacagtggctaatcaaactatcgaaattttacaaagtctaattgacgcggattctaggctaaaatacttcctgattgcagaacatgacaacctgatagtgaacaaagctaataacaaatctaggaaggaagccttacctgacaaaaaattaagatggcctttatggcatttattctcacttttagatagaaagctcattacagacgaaagcgtattgatggatttgttaacaagaatattacaagtttgtactaaaacattggctgtcctttctacaagttcaaatggtaaagaaaatttaagcaaaaagtttcatttacctagttttgatgaggatgatctcatgaaaattttatccattattatgcttgatagttgtactacaagagtatttcaacaaacacttaatataatttacaacctctctaaattacaaggctgtatgtccattttcacgaaacatttggtatctttagctatcagcataatgagtaaattaaagagtgctctcgatgggctatcacgtgaagtaggcactatcaccaccggaatggagatcaattcagaactgttacagaaatttacccttccaagttctgatcaagctaaattattgaaaattttaactacggttgattttctttacactcacaaaagaaaagaggaagagcgcaacgttaaagaccttcaatctttatatgataagatgaacggcggaccagtgtggtcctcattgagtgagtgcttatctcaatttgaaaagagtcaagccatcaacacttcagccacaatcttacttccgttgatcgaatcacttatggttgtatgcaggcgtagtgacttaagtcaaaatagaaacactgcagtcaaatatgaagatgctaaattattggatttttccaaaacacgtgtcgaaaacttatttttcccatttacagacgcacacaagaagttgttgaatcaaatgattcgttcaaatccaaaactgatgagtggtcctttcgcattattggtcaagaatccaaaagttttggattttgacaacaaaaggtacttcttcaatgccaaattgaagtctgataatcaagagcgtcctaaattacctattaccgttcgccgtgagcaggttttcttggactcttatcgagccttatttttcaagacaaacgatgaaatcaagaattctaaattagagataacattcaaaggagaaagtggtgtcgatgccggtggggtaaccagagaatggtaccaagtactatcgagacagatgttcaaccctgattatgctctttttcttcctgtaccatcggataaaactactttccatcctaatcggacatcaggtatcaaccctgagcacctttctttctttaaatttatcgggatgattatagggaaagcaattagagaccaatgctttttggattgccattttagtcgtgaagtatacaagaatattttgggtaggcctgtatcattgaaggatatggagtctcttgatccagattattataaatcattggtgtggattcttgaaaacgatatcacagatattatagaggaaactttttctgttgaaactgatgattatggtgaacataaagttatcaatttgattgaggggggcaaggatataatagttacagaggccaataaacaggattatgtgaaaaaggttgtcgaatataaacttcagacatctgttaaggaacaaatggataactttttagtgggtttctatgcccttatatccaaagatctcattacaatatttgatgagcaggaattggagttattaatcagcggtttgcctgatattgatgtcgacgactggaaaaacaatactacttatgttaattacaccgcaacctgtaaggaagtgagttatttttggagggcagttagatccttcgacgctgaagaacgtgccaagttgttgcagtttgttaccggtactagtaaagttcctctaaatgggtttaaggaactaagcggtgtcaacggtgtttgtaaattttccatccatcgtgattttggttcatcagaaagactaccatcatcacatacctgtttcaatcaactgaatttacctccttatgaatcatatgagacattgcgtggttcactattattggcaatcaatgaagggcatgaagggtttggtcttgcctga

SEQ ID NO: 79737 - DNA, 84 bp, Saccharomyces pastorianus
atgaaagagcaatcagagaatatagaattatatcttcttgaagaaaatggagagatcatgacatgttgggaatggaaagaatga

SEQ ID NO: 79738 - DNA, 1746 bp, Saccharomyces pastorianus
atggatcacagaaaccttgatccgaaaacgctgaaggtcagccaattgagaagagttttggtagaaaatgatgttgcgttccctgccaacgctaggaagcctgtcttggtgaaattgtttgaggagaaagtgaggcaacatctccaatcttcacctgaggcctcaaaggttagaactagcattcaaaaggttgtgaagtctggggcaaaaaacgcagatcgcaaaaagacattaaagagtaaaaagcttgaatcaagttctagtgagagtaaaactgtcaaagatgaaaatgttgaaactaacaagaggaaaagggaacaaattagtacggataatgaagtgaagatgcaaatacaggaagagaagtctcctaaaaagaaaagaaagaaaagatctagtaaggccaataaaccaccagagtctcctccacaatctaagtcagatgggaaagcaacttctgctgatttaacttctgaactggaaactgtagaagaacttcataagaaagattcttcggatgacaaaccaagggtaaaagagcttccaaaaccagaattgccgaatttaaaagtatcaaacgaatttttagctcaactaaataaagagttagctagtgcagctacggagaattatgatcattctataaaatccacggacttatcgtctatcagaatcgaaacagaagagcctgttggtccttcaactggagcagaaacaagaaatgaaagtgaggtgatggagaatatcaatttggaagtccaacctgaggtgaaggaagcaaaagaagaactaacaaaaatatcagaaacttttgataatcaagacgaagaggatactagtaggttatcgtcgaaaaaaaatatacgaagtccaaaaggtcgcaccaggcacttcattgccaacaaaactaaaagagggatagatattatgaaaccgtttattgcacatctcttcatttggttatggaatggtgctattttcctttcaataatatgtcctattctttttggtctttggtatcgagaacagagaattcaagtaggatattgcggtcatgaaaagcccctgaaatctcttgcaatctcagctttccctcagactgaaagggtagattcagtgttgcaagcttatcgaccaaattgtctcgaatgtcctgagcatggaatatgttcttcttttatgaatgttgagtgtgaaccaggctatgagcctaaaagttctattttagaaacgtatggtattattccttttccaaaatattgtgccaaagatgaaagtaaagaaaaggaggttgatgaactggtttggaaagtaaatgaatatcttaaaaagaagaatgcacaacatgaatgtggtgaaggagagaatctctttgagagtggtgaaacggaaaccaaattatatgatatattctctcattccagaccgtcatgggaaagtcaaagggaattcaatgatcattggaaaaatgtgcttgaaatattaaagaaaaaagatgatattatctggctgccattagattttgaaactaatggaaaaagagagaaatctaaatctaataacactaactatatttatcgttcaacttcaaaaaaatgggttacgttgcaatgtcatttagaaggggatatacaggagtatataacgaaatatggtggttctttatttatcaccctaggcgtccttttccttatcaaaaaaatacaatcgacacttgacaattacgttcaaggagagcagataatt

SEQ ID NO: 79739 - DNA, 711 bp, Saccharomyces pastorianus
atggaacgaacgcatcattcttcagaactaggccactgcattcctcgctttgatcattactgcatgtggatagggactgttattggtagagacaattatagactctttgtgcagtttgctgcttatttttcaacacttttacttatcatgtgggtgtctatttgcgtttacataagaattattactcaacacaatcataattatagccccaatttaaacgcaaatataatttcaacgttagtgtttgccatccttggatggttattaaccgcaagtttgttggcatcgagtattttttacatgagtcaaaacaagacgtctttggaggctatcatagatagcaaaaggaaaaaatttggaacaaggaagatattttgttattactcggaagcaaacaagttgaggtttgtggtagagttcgatagatctgaatttcactctttctgggacaaaaagtcaatcttagctaatataaaagactttatgggttctaacatacttatgtggataattcctttaggcaagccctatacatctcgatgcaaatctgatggcaaaagcggttcaaaaacaacgctagtggaaatattgggtccctatgaagaaactcttagtgactacaccattcaggccattgaggacaagatatcaagaggagaatatctggccacattgcgggcttctggtgacgatagtgatcctgcttactaa

SEQ ID NO: 79740 - DNA, 114 bp, Saccharomyces pastorianus
atggctctatcatggaatattcgaatcaggcgcaggtcatggtttagattcatcttaccgattatcgtgctcggtttactgtgctacggtacgtgggcttactgccataaacta

SEQ ID NO: 79741 - DNA, 141 bp, Saccharomyces pastorianus
atgaaccttctacaagaactcagccctcgtctgtttgaggctgccaatgcttccgagaagggcaagcgattcccgatggaaatgaaggtgcccactgacttccccccaaatacgttatggcattataacttccgaaaatga

SEQ ID NO: 79742 - DNA, 162 bp, Saccharomyces pastorianus
atgctggcacaaacattcaaaaaaccacacagagccgttctagaacaggtatctgggaccacggtcttcatcagaaataagagaacaaagagcaagagctcactgtcacctttggcacaaagggtcgtcacgcagttgagtgtgatgtctgcaagcagaaag

SEQ ID NO: 79743 - DNA, 612 bp, Saccharomyces pastorianus
atgaccatagtggctaataacagttcgggcaatgatattatatccaagtacggaaacaacaaattaatgttaaactcggaaaactttaaagtcgacatacccaagagaaagagaaaatatatcaagaaaaagcagcaacaggtttctggatcgacggtaaccacaccagaggtagctacacaaaacaatcaagaagtggcaccggatgaaatctcatctgccacaattttttcaccttttgatactcatctactcgagcccgtcccttctagttcatcggaatcttccgctgaagttatgttccacggcaagcaaatgaagaattttttgattgacataaacagcttcacaaatcaacagcagcaggcacaagataatccttcgttcctgccactcgatattgaacaatcttcatatgatttgagcgaagacgcaatgtcatatcccatcatatccacacaaagcaaccgcgattgcacgcagtatgataacacaaaaatctcacaaatcttacaatcacaactaaatccagaatatctcagcgaaaatcacatgagagagacacaacaatatttgaatttttacaatgacaactttgggtcacaattttga

SEQ ID NO: 79744 - DNA, 783 bp, Saccharomyces pastorianus
atgaactgtatcactattgacgttttttttactgctttttcccatccctgcaagcgaaaaaaaaagcaagctgactcttgtataaactgcaaggactcattgattaaaagtagatttacattacagactaaaggaaaaggcaaactataccggctataccacattcgttcaaaaatgccctctaccacgctactgtttccgcagaaacacattagggccattccaggcaagatatacgcgttcttcagagagctcgtcagcggagttattatatccaagccagatctaagtcatcattattcttgtgaaaatgcgacaaaggaggaaggcaaagatgcagcagatgaagaaaagactaccacaagtttgtttcccgaatcaaataatatagaccgttctttaaatggtggctgctctgtgatcccttgctccatggatgtcagcgatttgaacacgccaatatcgatcacactatctcctgagaatcgtatcaaatcagaagtaaatgccaagtcactactcggatcaaggccagaacaagatacaggcgcccctatcaaaatgtctactggtgtcgcaagctttccattaagtccatcaggctccaccccagaacattccaccaaggtcttgaacaacggcgaagaggagttcatttgtcactactgtgacgctactttcaggattagaggatatctaacgagacatattaagaagcacgccatcgaaaaggcgtatcactgtccatttttaacagtgccactcctcctgatcgacagctga

SEQ ID NO: 79745 - DNA, 3225 bp, Saccharomyces pastorianus
atgttacaggcttttaaaccgaaaaagaggcctcctcaagagaagaaaaaaacaaaaagtaagacatccaaggctgcatctacagctaataaatcacctgcatctgaatctacctccaagaaaaagaaaaagaagaaaactgtaaaggaaagtaataaatctcaagaagcttacgaagatgatgaattttccagaatattagccgatatggttaaccaagtggttaacacttcattaaaagaaacatcaacgcatactgccacacaggataataaattggaaagcgaaagtgattttacttcccctgtgcaaagtcaatatactactgaggattcaagcacagctaatgatgactcgcttgacttgaatcaaatcatgcaaaacgcaatggctatggtttttcaaaatcaaaacgacgatgaatttgatgagaacattgttgaagactttaatcgtggcttaggcgatctgagtgtttccgatttactgccgcatgataacctttctaggatggaaaagaaatcggtgcctaaaagttcgagcaaatctgaaaagaaaacagctatatctaggagagcttccaaaaaggcatctagagatgcctcaagtgtagaattgactgaagtaccttcaaaaccgaagaaaccttccaagacagaagtatctttagaaaagaagttacgcaaaaaatacgtctctattgccaacgaggctgcatctgtggctagaaagaaaagatgggctaaaaacaaagaactaaaggagaaagagaaacttgaacgccaaactgccagagaggaaaggagacataaaaaaaaactagagaagcagaggttggcagaagaacaagaggaactgaaaaaaattgttgaacgaggtccaccttatcccccagatttaagactaactaaaagcggtaaaccaaaaaaaccatacagaagatggactccggaagagctactgaaacgatcacaggaagctgaaaaaccgaggaaggtgaaaaaggaaagaaagaaaaaggaaaagaaaatgaaggtaccgtcatctgctttgaagaaaattcctctcttcaactttgtaaagggtaatgttcagccaagtgcaagacatcgtctgaacgacattgaaggttcgctatccactattggattacataaatcgcctgacggtgttcgcaggattctttcgagaccaaagagtgaggatcacgaatggcccctatcagattcatctgcatctcaaaattacgatgcacacctaaaaactgtagtgcataaagaaaaaattcctttccatcccccatggactataccgtctcaaccaccatttgcactacccgtagctagaagaaagaaaataccaaatatcaaaaagtatagaaagagaaccaataactctttccgtgtctccaaagaaggtacggcaagtactaggaacagaattttaccagccatattactaccgataataaatacattaaaagctgctgcaaaatcgcaaacagctgctggcgccacacctgaagaggcaaggaaacggctggcaaccattattcaacatgccaagtctacagttattagggcagctttacaagcaaggaaaaacagtatgcaagccgctcattctaaggggactaccacagaactggcaacaactgcgtctcgaatgaagaatccgctgagaatgattcctattttcaatacatctcgagtgaaacaacaattagacaaacaattaccggccagaagtgcaggaacagaaatgagcagctctgaatcccctgataaagccacgcccgatccccactctaattctacaatcgctgagcatactttaaagggcgttactacgccaattaaaatagaagacagcgatgcaaatgttcctcctgttaatatagcggtttcaactatagaaccatcacaagataaactagaacttacgaagagggcagagagcgtagaacctgtggaaaataatgttgaaacagcgaaagaaacccaaagcgtacaagaaattaaggagaatgtcagtaccaaggcttctgaggaagttactctaactgaagacaagacaaatggggatccaaaaaatgaaaagaggatattaattgaatctcctgtcgaaaaaacggatgaaaagaagccaggcgagaaaattgctacagatttgaatgaagatgcgagcgtgtctgataagaaagatggagatgaaaagtctacattgcattctgatgcagcccaacttacgggtaatgaaccagacagtgtaaacacggcaacaggaaagcccaaattaattgatgtttctctcaaaccgttaaatgaagcaaaaccaaaaattcccatcatatttcccttaaaaagaccgcaaattaagcctgaagttagcgttattaatttagttcaaaatttggtaaataccaaaatacccgaaataaagaatgaatccgttgatttgggaagtaatatcaccgacattctttcctctactatcactaatattctgcccgaaatcacagccactgatgttaaaaactaccagtatgaagatgaaaacgtaaaatacctgaaaaaaacaccaagacaggttttgaatttggatggactagtgcctccatcgggtagatgtattaccaaagctaaacgtgtccgccgcattaaaaagctttctgctgacgccactaccgcaccggaagccgatggaaaagcaaacagcgaatccatcacttacacattcgatataccatctccagaagaggtacgaagtaagcgtagtgtagtcctaaaatttgccaaggctagattgaccgaggcagagttgagttgtctaaagaaggagattaacaatgtgaggaaacggagatggagagagatgaactccaccaagaactgggaatacgacgtaaagtctagattaaaaaagcgtgcgaacgcattttttggggaaggagaatcagaaacgaagtctaaatggatcgaagaaagatttcaagaaaaggtaagtcaagaaaagtacaaggatcgccttgaaactactgagacgcaagcaaacaacacgaagattgtgattgacgacaaggagattttgaatattcttgcggtaaacatgaataaccttaacaaagcacgctgtattgaaaaagatattcaagagtcgttcagggaggagaagttagcctctttacaaccaaagaagaagagaaagaaaagcattttacactga

SEQ ID NO: 79746 - DNA, 696 bp, Saccharomyces pastorianus
atggcttatgatgaagatgatggagagataaattttaatgaacttgtggggaacttactaagctcacataaccaagagggacaagaggaaggagaagtgcaaggaggagaacaggaaggagatgagtttgaaaaaataaatcctaccagtgaaaatatagaaccaaagcatccagatgacagccagcatatacataattctcctgaccaaaatatcgaaataccacattttgtcgacgaagaagatgagctagtatctgtcgttgcaaatgcggttcaaaatatagacgatgagcaagccaaaccggaaaatcatctggaaaatggatcagaacatgtaacatcggatacagcggatgataatcacgaaaaagaacaacagcaagaatgggctcatatcctacagcaggaaatattaaaatcagacggagagcccttgcgggagaatacagaaaggcgtgtaagcactagtcagcaccatccctctcagcgtactgatgacgctctcgaccaagatgatgaaaatttgaggatggctatcctagagtctctacaagaattaaacacaaatgaggaggaagagaaagagccggaaaaacatgagcatgctgccccgaatgataagttgagcagcaaaaaatcttcaaagaaaaaggaaaaagataaatccaagaacagagaatcatcaaaggactaa

SEQ ID NO: 79747 - DNA, 102 bp, Saccharomyces pastorianus
atgttagaaggagcagaatacttttctctcgtagttgggaattccatttgcggaagtggaggtgaaggtgttggctgtcgatatcctgttgttttgatttga

SEQ ID NO: 79748 - DNA, 666 bp, Saccharomyces pastorianus
atggaggtcatcaactctcctgatatttctaagtccttcattttagccttaggcgcgggagtatttaccagtattatattattacctgtggacctgataagaactagattgatagttacatcattcaaaaaaaagaagaatgtcaagacagatggaaagaatatggttactaatactagaagcttgaggcagttaatcagatgctggtcatggcgtaaaaacggagtttccattccattagatatgtggtccctaactattcttcaatctatcaataatagctttttcaacaaattgtttgatttagtcatctacaaccaattccatatcgaaaaatactctcaaaccgtcatgtacaatactatgaagtttttttctaaatcacttgaactatttatcaagttaccattggaaaacctgttacgtcgttgtcaactaaactacttgttgaacgatcagcggttatcatttaaagtagattccactgaattgatagtaaagccaaaaaaatacaatggcatatgggatgtgataagaaacaattctaatacaaatagaggccaactttggaacggttggaaagttggagttattagtttaatttgcggatatgggttacaaatgatgaataaagttgatatcaacatggaacaagagaagttctga

SEQ ID NO: 79749 - DNA, 840 bp, Saccharomyces pastorianus
atgaacaacaataatgttacggaagcaacgtcaagggcacagatacggccttattatgatcccgattctttcaatgctgggtatagcgctgttttcaagcccgatgagggtgtagtagatccgcacggatacacaattgcttctaagctaaacgttatcaactcatctccaactacaaagagaatggctaatgcattgtttaaaagctccccaatgaagaaattgtcaaattcagttaacgatggattgtcactggagggaagtaatggcgaaataactggcctgaataattttgaatgggcggaattggttaacatccagaaatggcgaaaaatatttgaacaactgctggatatgtttttcagaaagtattttcaattgctcattcaacagccctttgatgtagcaagactacttatccaagtaggtgagtttaaaatcttcaaaactacagttgacacgaataaacctcaagcaccaataattttgcgggatgaagaaggagatggcgctgcgagagaaggagaagaagatgcttacgatgaggaggagatagatttctttcccatagaaaggaagatcgccgaggcaaactctactgcgcctattatggccgaagaaactgatcattcacatcatgaacctactgatatatccttgactattgcaccacagtccctacatacaattgacgtaatcaacgccctatttgatcaggagggtattcgtggtctatggaaggccaacaacacgacttttatttacaactttctttccctaagcatagatacttggttcacaggattactctcgtctttagagggtgtccctgacccatag

SEQ ID NO: 79750 - DNA, 204 bp, Saccharomyces pastorianus
atgaagtattttgagttgcacacttactctgggtatataaaaatggacatgcataataattcaatatcaaaaacttgggaaggctatttacaagattgtaaattcaaaggctggtttatgaaagtatgcaatgatcaggattctttattacgtacgctgggtcagtttgattcagagcatttttattcacctgttcaaacgtga

SEQ ID NO: 79751 - DNA, 1188 bp, Saccharomyces pastorianus
atgcccccaagaaatacctatgaaaaaggtaatccgaaacgccaaaatagtccatattataagccaagtttcttacggcgtgaagaaactaccaatgatgaggagaagtttcagggccatggtctgaaaaccgaacttcactcagcgttaaagtcttcaaatttgaatcttatccgaagaacttatcaaactggtgaaaatccctatcttagtgatccacacgatcgaggctcatcgagcagatttaacaggcgttatgaacggggtctgaagttttaccaaaagggagaaatcagtaaaagaattgcccaagaaagaacattacaaaaacagcaggaggaggaagaattaaaaagaaagttaaaacaagaagaagacgagaaagataaaagaaaattaattgagtcaggtgatttacccaatttagagttacatgaggataagttcctattagatttgtcaaagttcaagatatactatgataataaccatggctatgaatggtgggacacggcttatttagatgaaaagggtgagttgatggaaaaatatgacatgaatggcacatcgcctgccgaagaaaagctagcagaagatattgatgaagtagacgatgatgatgatgatgagcacccatctataagatatgtagcacatcccttacctgaaaagatcaacgaggcaaaagtatcaatcaaagcatatctaacacaacatgaaaggaaaagattaaggagaaatagaaggaaaatggcaagagaagcacgggagataaaaattaagttaggactattacctaagcctgaaccgaaagttaaactaagcaacatgatgagtgttttcgagaatgatcaaaacataacggacccaactgcctgggaaaaagtagtgaaagaccaagtggacctcaggaagagaaaacatctggaagaaaacgaaagaagacatgaagatgctattaaaagaaggaaagaagcagtcaatatgaacgttgaaaagccgacagtataccattgtaaggtgttccagttcaaaaacttacagaacccaaaaataagattcaagttgaaaatgaatagtaaagaactatcactaaagggtttatgccttcgtatacgtgatgacggaccaggaataattatagtcgtgggtaacgaaaaatcatgcaattttatgagaatttggtga

SEQ ID NO: 79752 - DNA, 591 bp, Saccharomyces pastorianus
atggcttatcgcggatctagctgtcgatccaatccaagtcagatcagctctaagtcaaggataagagacaaatcaaaaccaagctctcctactgctaccgatataaactcaagtgcgagtgcgtcgagatcacgttctccgcaaatcaagttcgcatcgagtgtcaagaatgtagatggtaatgctgcactgggtgctattaaatctagacactcgctagacagcccaggggaccagcaacaacaacatcatcatcactatcatcgtgacacagatcagttgtccgttccaggccttccccatttggcaccttcaaagtcatatagtgtgagttctggtaataaggattcatctttgaggaaagtcagtagctcatcttcgctcagaaaagtaaaatctaatgattcgaactctggtaaacgtattaaaaaaccggtcgtaacttcagcacacttgaaaccaagctcaggcggtggtggtttattctctttttttaagagtaaatcgagatccccgtcacctttcagaaaggaagatgagagtaaaaatacgcctaagcgtagcggattgtttgggttcggaaggctgtag

SEQ ID NO: 79753 - DNA, 1101 bp, Saccharomyces pastorianus
atgagagagcgaaaaagaatgctaatgatgatggatgatagcaggagtgttagctcagcaagaagatcacgaaccagatcgagatcacgatccatatgtacaagaaggacactttctctggggcctgaggaatctgacagcaaattaaagcaccaaaattttatcgagtggacatctggttatacgcagaacgaaatagaacgtaaattgcaagatctttttgattatgttacactcataattccgcaagatcgttctgtcaaggtcactgtcgagatcctaattggcaagactaaaaaaacgcttcttgaggcaataaacatctatttacctgatttctttgtatctagcactttgaggtgggagagaacagacagcttagttcgttggaaatcgaactttctgacagataaactgtgtactaattttccgattccaacgtttattgtaccggcaaagagaatgttcgatttggaaatagatttgcaaaaagagtttaaagaaccggaggtaacgaaacaaaaaaatactagcggtccaaagcctgggttcagccattctaaatcagcagatgctagcattccaactatctcaaatatcaaacggaagcaagataacgattattctatagattcactatgttatgccccagaagctaatggtgctaacaatagtagccgagaggaagcatctgatgatgagcttaacgcttttaaggatgatgagaatgatgtgatgtccgtgaaatccttaacctctaacatttcggtaaaggaaaagttatgtaccatggcaaggaaacgtagaaagagtatggctcagcagttaaatgacgccgatcatgattcatcaataccaccgggacagaggcatttgaaaaaactgaatattattttggaatcttcattaaagttttcattagaaatcgatagcatcactgatagtattgaaaatggggatgtagacgaaaagagagcacactctatggagtcgggctttgaagaactgaaaagagtcatcacaggtggtgctcctccaaggcatgtggctaccccgcaaaggtccatgcttgatgttttgggacaatgccaagattcatct

SEQ ID NO: 79754 - DNA, 1431 bp, Saccharomyces pastorianus
atgatggcagatatcctggtagagaagataatcagaatgtcattaccaccatcttccgaaacggctgttgatacaattcaccatcgtatggttgctggtaaagaaaggcctaagctgtctgtgcagatcacgagtaggaattttatacagatgaactcgagactaggggtaccattcatgattatggatgaattaataaagatattaaattggactaacccagcgtatacagtatctattatgttcttatacacgctcattatattgaaaccttttcaaatgctttcctcgctccctatattctatttgttattctgcgtaatggtcccgcaatacctttacattcataagccaaaccctacaagctatctagataataatcaaacaccagcacaaggcccacctttgcgaagacctgaggttcctaaaccagtccctgaactgagccaagaatttgtcttaaacctcacggatttacaaaaccatatgctgctatatgttaaattctacgattttactttactcatattacaaaagtttgcattcttcaccaacgaggctatttcgtcgttttattttattgtattgttaataatagcaacattaaattttctgtacatggataaatttatcaagctcattccaatgagacccgtactgatactgctaggttggggtttttttattgcctcgcatccgtccaatcgtgaatatttgttgactaaattgaattcggaggagacaagattaaaaactttgactataagtactaatctggaatctaagattttgcagcatttgaaactcattgaggctagggagcaccgacttgttatgatctttgagatccaaaagtatcttcctgaatacaaagaatggcgcccagttggattctctgatgacgattattctcttttctctagtttgagaatataccagaggcgtattgaggaaaattcagtgaagtcattagaagaaattgagccacctaaggattgggaatgggaagccaattctcattgggtgcttgatttggatccaaaagaatgggtagaggacgaatttattcagtatgtcgagatagattcagaaacaaaatgggtctatgacctcaatcttgatggacaaaggggctcatatagaaggcgaatgtggaccaacagttgcgtgcggaaaaaactggattctggtatttcttcaaaccttggtgaggaggaagtagttaatccattgagggaagaaacatataggcaaggcgtacatggcgtgacgaagggttcaatgagtggcggtctaactcacagtagtgatgatgaccgcgctgatgaggaaagtataaacggtactattcctaatctcaacaatatcgacgcggatgcatcttatccgtcaatcgaagagctaacagacactctcaattcaactatataa

SEQ ID NO: 79755 - DNA, 219 bp, Saccharomyces pastorianus
atggactcggtgacaaattttttctggaatgacacctataatgctggtactccaactagatcaactctcaaggggaagaaagtgcaaaatggcatagatggaaaaagtcaggcaaagaaagagagcatatctagtggttctagaactagtgatcctacgcgtggtagtctgccatcttccagtggacagccaactagtggtggcgttttccctcgacat

SEQ ID NO: 79756 - DNA, 294 bp, Saccharomyces pastorianus
atggtatcatttagggcccaaattggctggaccacgcatggtcacagcgcagtcgacgtcaacatatatgcatacgccaataagaaagctacatggtcatatgtcttgaacaatttacaaggcaatcacgaaaatacggaagttggccagttcttagaaaactttttagaattgaacctgagcgaagtcactgatttgattagggacaccaaacacacatcagattttgatgctacagaaatagctagtgaagtacaacattatgacgaatactaccatgagttgaccaactga

SEQ ID NO: 79757 - DNA, 1191 bp, Saccharomyces pastorianus
atgatgactcacacattaccaagcgaacagacacgtcttgttcctggatctgactcgagctctcgtcctaaaaagagacggatctcgaagagatcgaagataatagtatccactgtggtctgtattggtttgttgctgattttagtgcaactggcatttccaagcagttttgcattacgttctgcatcacacaagaagaagaatgtcatattcttcgtgacggatgggatgggacctgcgtctttgtccatggcaagatcattcaaccagcatgttaatgatttacctatagacgacatcctgacacttgacgagcattttatcgggtcttcgagaacaaggtcctcggactcactagtcactgactcagctgcgggcgccaccgcatttgcatgtgcattaaagagctataatggggccatcggtgttgatccgcatcacagaccttgtggtacagtgctcgaggcggctaagttagcaggttatctcactgggcttgttgttacgacaagaatcacagatgccactccggcttcattcagttcacatgttgattacagatggcaggaagatcttatcgctacgcaccagttaggcgaatatcctctggggagagtagtagacttactcatgggtggcggcaggagccatttctaccctcaaggcgaaaaggcttctccatatggtcaccacggtgctagaaaagatggaagagatttaatcgatgaggctcaatctaatggctggcagtacgtgggtgaccgtaaaaattttgattctttgttgaaaagccacggtgaaaacgttactttacctttcttgggtctctttgcagataacgacattccttttgaaattgacagagatgaaaaggagtatccttcccttaaggaacaagtcaaggtggctttgggtgccttggaaaaagcttccaatgaggacaaagattctaatgggtttttcttaatggtggaaggctccagaattgatcatgctggtcaccaaaacgatccagcttcgcaggtaagggaggtgttggctttcgatgaagcattccaatacgttttggagtttgctgaaaattccgatacggagactgttttggtctctacgtcggatcatgaaacgggtggtttagtcacttcaagacaagtcactgctagctatcctcagtatgtctggtatccatag

SEQ ID NO: 79758 - DNA, 663 bp, Saccharomyces pastorianus
atgtgtcgttaccaatctgggtttttctggagacatgaattattagaagagtacgattggtactggcgtgtggaaccagacatcaagttatactgtgatattaattacgacgtttttaagtggatgcaagaaaacgaaaaagtttacggctttaccgtttctattcatgaatatgaagtgacgatcccaacactatggcaaacgtccatggatttcatcaaaaagaaccccgaatacttagatgaaaacaacctgatgagttttctttcgaacgataatggtaaaacatacaatctgtgccatttctggtcaaactttgaaattgcaaacttgaatttgtggaggtcaccagcctacagagagtattttgacactttggatcatcaaggtggatttttctacgaaagatggggcgatgctcccgttcattctattgctgctgctttgtttttgccaaaggataaaatccattatttttcagacattggttaccatcatccaccttatgataactgcccattggacaaggaggtctataacagtaacaactgtgaatgtgaccaaggtaatgatttcactttccaaggttactcttgtggtaaggaatattatgatgctcaagggttggtaaagccaaaaaactggaaaaaattccgtgagtag

SEQ ID NO: 79759 - DNA, 582 bp, Saccharomyces pastorianus
atggccctctttctcagtaagagactgttgagatttaccgtcattgcaggtgcggttattgttctcctcctaacattgaattccaacagtagaactcagcaatatattccgagttccatctccgctgcatttgattttacctcaggatctatatcccctgaacaacaagtcatctctgaggaaaatgatgctaaaaaattagagcaaagtgctctgaattcagaggcaagcgaagactccgaagccatggatgaagaatccaaggctctgaaagctgccgctgaaaaggcagatgccccgatcgacactaaaacaaccatggattatatcactccatcttttgctaacaaagctggtaagccaaaagcttgttacgtcactttggtgagaaacaaggagttgaaaggtttgctaagctccattaaatatgtggaaaacaaaattaacaagaaattcccatatccttgggttttcctaaacgatgaaccttttactgaagaattcaaggaagcagtcaccaaagctgtttcttccgaagttaagttttgggtattttgcccaaggaacagggtcatatcctga

SEQ ID NO: 79760 - DNA, 1020 bp, Saccharomyces pastorianus
atggtaagtgctctcgagagcagggaaaatacttttgaaaactcatcacctgctgcccaagtggtctcacaaagggataattctgcaacacctacaccatcaaactccactggcactgaagatactatattgatctctccggatacggatataaaaggagagcctgaaccttgtctgaaaaccgaaggcatcgagaacttatctcataatgtaccacaagagaccaaaagcaatactgatgtttctttcttgaaacaagtaacgtttaccgaccatctgcaagtggccataatcgatactgaagagtcaccctcaaaaaaagatacagctaatgttgatgaatcttccgcggaaaactctttatcaacacagacctacgaagggcctgagcaattaacctcaaggaactttgttacactttatgattttcctaatgctcctccaaatctaaaagattttaacacaaacttatttggtggtcgatggtcatacacaaatgggttatccgccactcagcgtccacaagatatgaaaactgttttccactccattttaccatcacctcctcagtcttcagtaccgtctcctaccgtagatatatcacttgatctgtcagctctggcaaatttcccatcttttggggaatacgataagaaaatagtccatcaaatcaacacagagataaataaggatttggaaatcaaaatcaaaacacagcctccaacgggtgtcttcttagccaatggtataagaaaaaaatgtttaatcacaaataaagaatgtcagtactttgatccaaggactggtgtgccttattctgatgtggaagcttataaaattattcagcggattcaagatcctatttctaaggaggagggaaggtcagatatcaagcgtgatgaaacgacaaatgaggatagtgacgatcaagtgagattcaagtggtttgggttcaaaaacggcggtatttaccttgatttcagtcaaagacctgcaaaaggtgttcctgaaggattttaa

SEQ ID NO: 79761 - DNA, 213 bp, Saccharomyces pastorianus
atggcggtgtttttgcagagaagaggccacactgaggccggtgtcgatttgtgtaaactaagtggactaagtcccgtcgctgttattggcgaattggttaacgatgacgaacaaggaactatgatgagattaaatgactgccaagcgttttgtaagaaacatggcattcctttgatctccatcgaagaattggcccaatatttgaagaaataa

SEQ ID NO: 79762 - DNA, 120 bp, Saccharomyces pastorianus
atgacttgtagggctcttgcagactcttcctctacgccaaaatcatttttaaaaccagggcacatctgtcccttgagagccgctgatggcggtgtttttgcagagaagaggccacactga

SEQ ID NO: 79763 - DNA, 192 bp, Saccharomyces pastorianus
atgaacaatggctttcttgtcgccattcctcagacgtctgtgcctatacgaatgagtgataatggaccttccactatgagaacaggcatgaagtttgaatccaatgatgacgacaggcatggaactgcatacacaataactgtagatgtagccaggcactaccacaggtatctgctcacgacaggtcgatga

SEQ ID NO: 79764 - DNA, 2508 bp, Saccharomyces pastorianus
atgcttgtgtcgcaaacaaagtttgatgcagaatcaaattcgaagatagacaaaatccttcttttacctaaagtagaaggcgcactaatattatgtgataacgaactagttttatttattctcccagaatttgcaccaaggcccaacacaactagacttaaaggtattagtgatgtcgttatttgtaatttttcccgaagctcgaaggcttatagaatatatgcatttcacgcagaaggcgtaagactactcaaaatatctgcagattcattagtacttaccaaagcttttaatttcaaactaatagataaagcttgtgcgcacgaagaaacattaatggtttcgaagttaaatagttacgaacttataaatctaaagtcgtcacaggtaattccattatttcgaataagtgagactgacgaagacttagaacctataataaccagtttcaatgaacagagtgaatttttagtttgttctggaggagggtcatacgatagtggggcgatggccttagtggtaaatcatcatggcgacataataaaaggaactatagtgctaaaaaattatccaagaaatgtaattgttgagtttccctacataatcgctgagtctgctttccagtcggttgacatatattctgccttgccgagtgaaaaatcccagttgttgcaaagtataactacttctggatcggatttaaaaatttcaaaatctgacaatgtattcactaataccaataattctgaagaattcaaagaaaaaatattcaataagttgagacttgagcctctgacacatagtgataataaatttagaattgaaagagaatgcgcctttgttgaagagtcttatgaagaaaagacctctttaatcgtttataataatttagggattcatttattagttccaacgccgatggtcttacgttttacatcatgtgaagagtccgaaattgataatattgaagatcaattgaaaaagcttgcgaagaaggatttaacaaaatttgagcacattgaagcgaaatatttgatgtctcttttattgtttctaatgaccttacattacgatcacatagaagatgaggtaatgaaaaagtggtgtgacttttctgacaaagttgacatcagaatattattttatatgtttggctggaaagtctatagcgagatctggtgcttccatgggttaataaatatagttgaaaggttgaaaagcttgaagctaactaacaaatgcgagaatattctaaaaatgcttctgatgatgaagaatgaactaaagaaaaagaataaaactggactcttaacgaatgactttgatgatataatgaaaactattgatataactttattcaaattaagattggaaaaaaaggaaactataactgttgatatgtttgaacgcgaaagttacgacgaaattatcagagagattaatttacatgatgataaacttcctaggatagagttactaattgagatatataaagaaaaaggggaatatcttaaagcactaaatcttttgagggaagctggggattacatttcactagtttcattcattgaagaaaatctcaaaaaacttcctgaggattatatcaaagaaagaatagccgatgatcttctcctcactcttaaacaaggcgacgaaaatactgaggaatgcgccatcaaaaaggttcttaaaatattggacatggcatgtattaataaaaacgactttttaaacaaaatacccgcagaagaaacatccctgaaggtatcattcatagaacaactcggtgtccaaaacagcaacgattccaaatttctctttaactattatttggcgaaattgcgagaaataatcaaccaaagtaacatatggtccattcttggagattttatcaaagagtacaaagacgatttcgcgtatgataagacagatataacaaattttattcatatcaaattaaagcatagtcttcagtgcgaaaatttttccaaatattatgaaaaatgtgaaaacttgaaatcggaaaatgaaaaagatgatgagtttattaatttcaccttcgacgaaatttccaagatcgataaagaacacatattgagcttgttatttttccccaatgaattaacaaactgggtttcttccgaagaattgctgaaaatatatttgtcatttaatgatttcagaagtgtagaaaaatacataggcaagcagaacttggttgcggtgatgaaacaatacttggacatatcttctttgaattactcagttgaattagtgactaatttgctacagagaaattttgaacttttagatgatacagatattcaattaaagatcctcgaaactataccttccgtatttcccgtacaaacaatatccgaattgcttttaaaggtacttattaagtatcaagaaaagaaggaggaatctaatttgcggaaatgtttgttgaaaaatcaaatatccatttctgacgaactaagccggaattttgatagtcaaggataa

SEQ ID NO: 79765 - DNA, 564 bp, Saccharomyces pastorianus
atgatctatggagacgatgcgaccatagtaaatggagaaatgctcatccactcctctaaattcttatccagggagcaagcgttaatgatagaaaggtacgtgggacaagactccccgaacttggacctcagatgccatcttattgaacatactttaaccataatatataggctatggaaagaccatttcaaacaattgcgtgaagaacaaatcaagcaggtagaaagccaattgattatgtcactatggaggtttctcgtatgccaaaccgaaactgtgacagcaaacgaaagagaaatgagagatcatcgacaccttgtagatagtttgcatgatctgacgataaaggatcaagcctcttattacgaagatgcctttgaggatttaccagaatatatcgaagaagaattgaagatgcaattgaataaaagaacggggagaataatgcaagtaaagtacgatgagaaatttcaagaaatggcaagaactattcttgagtcaaaatcattcgatctaaccacactagaggaggccgattcattatatatctcaatgggactgtaa

SEQ ID NO: 79766 - DNA, 705 bp, Saccharomyces pastorianus
atggatttgcatgtagaacctcagattttccaatatgaactgatagactatttgataatttcgtattcctttgatctcctagaaggtatattaagggtactgcagtcgcatcctaagcaaacatatatggaattttttgatgaaaatattctaaaatcatttgaatttgtctacaaactagcactaaccatttcatacaagccaatggtaaatgtaatatttagcgcagtcgaggtcgttaatattatcactagtatagtattaaatatggacaattcctcagatctgaaatccttgataagcggtagttggtggagagattgtattacaagattatacgctcttttggaaaaggaaattaagagtggcgacgtatataatgaaaatgtggatactacaactcttcatatgtcgaagtaccatgacttttttgggttaatccgaaatataggtgataatgaattgggaggattgatatcaaagctgatttatactgaccgattgcaaagtgtcccaagggtaatttctaaagaggatattgggatggatagcgacaaattcactgcccctataataggttacaagatggaaaaatggcttttgaagttaaaagatgaagttttaaactatttccgaacaattatcaatgatctatggagacgatgcgaccatagtaaatggagaaatgctcatccactcctctaa

SEQ ID NO: 79767 - DNA, 909 bp, Saccharomyces pastorianus
atgagacaagaaacggtgggtgaattttcttcagatgacgatgatgatattcttttggaattaggcaccaggcctccaaggtttactcaaataccgccatcatcagcagcattacaaacacaaattcccactactttggaggttacaacgaccacattaaacaataaacagagtaaaaatgataaccaactggttaaccaactgaataaagctcaaggtgaagcaagcatgcttcgtgataaaataaactttttgaacattgaaagggaaaaggaaaagaatattcaagccgtcaaagttaatgaattgcaagtcaagcatcttcaagagttggctaaattaaaacaagaattacagaaactggaagatgagaagaagttcttacagatggaagcgagaggaaaatcgaaaagggaagttattacgaatgtaaaaccaccgtcaacaacattatcaacaaatacaaacactataacgccagattcgtcctcagttgcaatcgaagcaaaacctcaatcaccacaatcaaaaaaacgtaagataagtgataatttactgaaaaaaaatatggttcccctaaacccaaataggattattcccgatgagacgagtttatttctagagtcaatattacttcatcaaataataggcgctgacctgagcacaatagaaatattaaatagattgaagcttgactacatcacagagtttaaatttaagaatttcgtcattgctaaaggagcccccatagggaagtccatagtttctctacttttgcgatgtaaaaagacgttgaccctcgacaggttcatagatactttgctagaggatatagctgttttgatcaaggaaatatcagttcatccaaatgaatcgaaattagctgtcccatttctcgttgcattgatg

SEQ ID NO: 79768 - DNA, 78 bp, Saccharomyces pastorianus
atgagatatttgaagcatgtctccagaagatttaagaacggtttccaaaccggttctgctaaggctacttctgcttaa

SEQ ID NO: 79769 - DNA, 1143 bp, Saccharomyces pastorianus
atgatgataataatatttatagaattgtgtagaattgcagattcccttttatggattcctaaatcctcgaggagaacttctagtatatctacatacctaatattattgccttataaaaaatggaatcccaacaattacatcaaaatccacattctcttcagattccaattaattgtcctagaagccgacgggattatgattaaaccgttcattgtacaaacgataaatttagcggtcggacaaagatatacaattttggtcaaactaaagtctgacactagttttgttcgtatgattaatggctgtaacaaaatgatgggttatataacaaaacagcggtggctttacaaagaaggcgctcatttggacctaccaaagaaccccaatgacgtttcgatcgaacacttgcctggtttcactaaggccgagctttatcgtgtcatagaaccaacgcaagaagagaataaaaggttacgcacaaaggctgatcctgttgcggtttttgaattcgattatgcttattacaaagatgaaagcacgaaacaaaagtatgggactgggatgtataaggtgaacgaacggacattcagcgagtacgtaaaagacccggtaaggttcggattcaacgaaacatatgatattgtaatcaactcactggaccacatgagacacccatggcatatgcatggccatcacttccagataatatctcttggcaataaaggtgatggcccatttcacaaagacgtacaagagggcaaggcatggagccgctatcagaacgatttacgtcacctggcccgaaccggaaaggcaccgatggtaagggatagcattaacattgcaggaaattcttacgcggttttgagaattaacaccgagatgcccggaaaatggcttttacattgtcatgtggagtggcacatgatgaaggggcttggcattgtctttgaggttccgacaacaaccgaggacagtaccaaacaagcaactacagctgtattatcgtaccctaccaaggaacctgaccttaacactgttgtccatacagccgcacttgaacaaaataaatccaaggtaatagccgtctacatcctaatcatgtgtgcggttgatgctatcttctactggttgctcatgtaa

SEQ ID NO: 79770 - DNA, 474 bp, Saccharomyces pastorianus
atggagccaccattgaacaaatctgtgcaaaaaattaggggaaaaaatgctggctcgcaggcaaaggatcattcaaaagatcacttaaaagaacataagcaggataaaaatacagcaattggaaatggctccttctttagaaaattctcaaaatcttcggacaaaacaatggaattatatgccaagatttctgcaaaacaattgtttaatggtttagagaagctgttgcgtggttggactcagtatggtttaaaaaatataaaatcgcaccccaacaatctgaccttaacgggtaaactatcgagcgataatatattctcactacgttcaacactctttgaggttaatatttatccgagaggtaagatgagcgttgtgcagttcaagaaagtttctggttcattcaaagctgtcaaaaagttggtcaatgaagttgaaaacgtcctgaataaggaaggcgttctacaaaaatag

SEQ ID NO: 79771 - DNA, 2913 bp, Saccharomyces pastorianus
atggcaatcaatggtaatagtattcctgccataaaggataataccatcggtccatggaaactaggtgaaactctcggtctagggagcactggtaaagtccagcttgctcgtaatggatccacaggacaagaggcggcagttaaggtaatatcaaaagcagtattcaataccggtaatgtcagcggtacttcgattgttggctccaccaccccagatgctctaccatatggtatagaacgcgaaataatcattatgaagttgttaaaccacccaaatgtgttacgtttatatgatgtctgggaaacaaatacagatttataccttgttttagaatacgcggagaagggtgagttgttcaacttattggttgagagaggtcctctgccagagcatgaagctatcaggttttttagacaaattattattggtgtgtcgtactgtcatgcgttgggtattgtccatcgtgatctaaaaccggaaaatctattattagatcataaatataacatcaagattgcagattttggtatggctgctttagaaactgaaggaaagctactggagacgtcgtgcggatcaccacattatgctgcaccggaaattgtatctggtataccgtatcaaggtttcgcaagtgatgtgtggtcatgcggtgtgatcctattcgcccttcttactggtcggttaccctttgacgaggaagatggaaatataagaacactattacttaaagttcaaaaaggtgagttcgaaatgccttctgatgatgaaatttcgcgtgaagctcaggatttgattagaaaaatcttaaccgttgatcctgaaagaagaatcaagaccagagatatactcaaacatccgctattacaaaaatatccaagtataagagattctaaaagtattagaggcttaccaagagaagacacatatctcacgccattatcagaaagtaattcttctattgacgctacgattttgcaaaatttagtaatattatggcatggaagagatcctgaaggaattaaggaaaaactaagagaacctggcgctaatgcagaaaagacattatatgcactactgtatagatttaagtgtgacactcaaaaggagcttattaagcaacagcaaatcaagaagaggcagtcaattagtagcgtttctgtttccccatctaaaaaagtatcgacaactccacaacgcagaagaaatagagaatctttaattagtgtaacatcatctcgtaaaaagccaatatccttcaacaaattcactgcctccagtgcctcctccagcaatctaactacacccggttcttcaaaacgtctttcaaaaaacttctcttcaaagaagaaattatctacagtcgttaaccaatcttctccaacaccagcatcacgtaataaaagagcttcggttataaatgtagaaaagaatcaaaaaagagcctctatcttttctactaccaagaagaacaaaagatcttctagatctatcaagagaatgtcattgataccaagcatgaaacgtgaatcggtgacaacaaaattaatgtcaacatatgcgaaattggcagaggatgatgattgggaatacattgagaaggaaacaaagagaacgagctcaaattttgcaactttgatagatgaaatttttgagtacgaaaagtatgaacaaataaggaaagagaaggaagagctagaacgtaaagtgagagaagcaaaagcacgtgaagagctggaacgtagaagacgtaaacaagaagaaaaagaacgtgcaagaaaattactagaaaaggaagatctgaaaagaaaacaggaggaactcaagaagcaaattgaaattgatataagtgatctagagcaagagctgtccaagcacaaagaggaaaacctggatggtaatattagatctatctctgctcctatggaaaatgaagagaaaaatatcaatcatttggaggttgatattgacaatattctccgtcgccgtaacttttctttacaaactagacctgtgtcaaggcttgatccgggtataatgttctccagtccaactgaggaagtaagtccagtggaaccaaagagaacagaaaatgaaagacttacaacagaaaagaaaattttagaaaccatcagaagatcaaaattcttgggttcatcatttaatatcgataaagagttgaaattgtctaaaatggaatatccaagtataattgcaccacaaagattgtcagaggagcgagttgtgtcagattctaacgatggatatgaatctttgatcctcccgaaggatgggaatggcgtatctcaattaaaggatagtaccacaacaactgctcccgtctctgatggtaggttgaggaagatctctgaaattagagtaccacaatttactagaaaatcaaggcattttagtgagtccaataaaaggctatctgtcctgtcgatgtactctaccaaggagtcgtttaccaacttggttgatattttgaaaaacggtaaccttgatgtcaataaccaacaaagccaaagaattccaacaccaagaagtgcggatgattcagaatttctttttgaaactgtcaacgaagaagctgaatatacaggaaatagttcgaacgatgagagattgtacgatgtcggtgattccactatcaaagacaaatccgcgttaaagctgaactttgcagatcgttttaatggatcgaacgaagcgaaacaaactgataacttacatcttccgatccttcctccgcttaatggtgacaatgaattgcgtaaacagaatagccaagagggtgaccaggcacatccaaagattaaatcgatgataccagaatcaggctcttcttcacatactgaaaaggaagaagaaaatgaggaaaaggaagagaaaaagccagaacaacactaa

SEQ ID NO: 79772 - DNA, 468 bp, Saccharomyces pastorianus
atgagcaagtatcaaagaagcattctttcacgacgtgccacagagaacttcccgtcttcattcaccatgaacaacaagctcatatatcgttcggttagatttgcaacccataacagccagcttttactgccacctttggttctctacagaaggatactaaggcagcataagctgctacctggtccccaaagggagatgggtgaccaatacgtgcgaaacgagttcaagttgcacaaagatatcgataacccgttgcatatagtcggctttttagcttcctggcaagattatctccacatgatttccaacggtaaatggaaagatgccactttatcttcggaaaccctggagaaactatcccctgagcaaacagttcaactgtatgaattgatgaaggaaacacagaaacttcaccaagacaatgaaatagaatcaagtaaggacgtgaaacggaacaacaaggattag

SEQ ID NO: 79773 - DNA, 276 bp, Saccharomyces pastorianus
atgagtacaaaatatccgacaacgatgagttgccgagaggcatttgatcaattgacgagttgctattcgattggagggcaatttagaagctattacagatatggagattttacatcatgtgacaagcaggtgtccaaattcaagttttgtattatccacggcaatgaccctgtgaaagtgcaggaatggtataaagatcaggtttccgacaataaggcattggaaaataccagtggggttatatggcaggagagggagaccactgcaaataagtga

SEQ ID NO: 79774 - DNA, 282 bp, Saccharomyces pastorianus
atgataataacaattaaattcgagtcgaaggaaaaattggtctccatgaaacaatatataacagtagttggagtgtccgttaatcaagagggcaccttttcttggcgtcctgggactttttatatgaaaattcatgaagaaagtgcggcgggcccctttgcgaagggggccgaaatatcggatcttagtaatagttctgctattggatgtggtattagcataaatcaagagggaggcgatggttctattagggtaaaagagagcagcttgaggaagaaatag

SEQ ID NO: 79775 - DNA, 1839 bp, Saccharomyces pastorianus
atgatcgataaaaggctttcatctttagaagagcacataaaatctttacaccagaaaatggacttgataatcaccacagcaaagatgtcttataacagcgatatcaaaggccctggagatgatattcagaacgtggatttcagctcaaataagacgtacgatagtcgtctaacttcgggctcagagacgataaggaaaacaggggaatatagaaaagaaaatcttttcttaaatggatttaagttgaaggaatctcctttaaaattgctacatgatattgatgagaggctatttccatcgaaggctacatctaaagctgcgaagctagctggacagcaaaggccatatgctgttgcaagagtgaactttctccatttttatgagaataatcaggaattatgccataagcttgcaaaagaatttctggtgagatcccatttctggataattccaggtgggagaaaagagatagacgtggaatatgcccactcacacctatttattacaagtgtttttactattatcgctatgagttttgctgacaacgataaatacgctgcagaacaagaaatattgtatcctttagtggagagattactcactaatacgttaaccatgtttgaaaagttaacagcgtttgatattgaggctattttatattgctgtatgttccatatttcgcgaaaggcaaagagatataggcaactgaagtttaattctctggtactaagcaattttgcgctcaatagcttgttacatgtaatagatttttatcagataaaggatagggttttggtaaaagaagtgtataatcccgaagatctttatcatctaagaatactaaattcactaactgcctgctatttagaatattccattagttacggcgatattagggaacaggatgatatgcttaaagagtttaataaacttgtggcgaaatttcctcaggcgaattttggtgatgacattaaaatcagtgagataaatttaggtgacatcgtaaatggcatctttataaaccttaaaaattattttgcgcagtgtttggatgactttaacaatgacagatatggaggtaacgcagatacttttatctttgtttttccagagctaaattattggctgaaaaattgggaagagcttttagcaaaggatggcgcgggcgtgctattgttcacatttgatttttatcatatcatgatatgtcgcacttttatcacagaattttcttccacgctaaaaagcaaccaaaggtttttgaaactaattcttaatacgatgaaagaacattcattttcgctgttgaatgggtttttgagactaccgccaacgttaataaggggtgctccgatttttacttgtcatcaactagtctacgcctgtttaactctttgtgactatctttattggttcgattcttctgaacgtcaacgcgttttgagtctttgtacaaaagtgtactggcatttgagcactataggggaaaaaatgaatgaggctactgataacgttggaaaaatcataaaatctataattgacactagtaagactcgtattaattttggcagtttgtcaaaagagaatagtgataatgataaaatgtcgactaatgctaataactacacaggagcaggaaatctgcacgccgcgaaacccgctacttcgcctactaatgttggtactttgcacgagaacttgtccagtagtcacttcatgattcctgacgtcgaccaattcaattcctttgaagacttttttcaggatttttttgatagtttaaaaccaaattcccaaaaaatgtttaccagcgataagaagactgaacaaactacttaa

SEQ ID NO: 79776 - DNA, 96 bp, Saccharomyces pastorianus
atgactgctggatataattctgcttctggaaaggtgcaaaatagtatcagatccataataaaccaaccagaggatagtgcaagagccaaagagcgc

SEQ ID NO: 79777 - DNA, 219 bp, Saccharomyces pastorianus
gcgctctttggctcttgcactatcctctggttggtttattatggatctgatactattttgcacctttccagaagcagaattatatccagcagtcatcggaaaccatctggtctggggcttactgaggcatttgagtttatatccatttttttccctgatgttcagcaaaccgaaagaaatataaaatacaactgggaaagatgttttaatggtgagtaa

SEQ ID NO: 79778 - DNA, 126 bp, Saccharomyces pastorianus
atgaaaggttcaaaatcgcaccttgtcttcactctcctgcaagtatcacaactaaatgtttttcttttctttctaggttttttgtgccatatcttaggactgttcgtttcactgcgctcttggctc

SEQ ID NO: 79779 - DNA, 654 bp, Saccharomyces pastorianus
atgaccattaaggacgtttcagaaatcaaactagctaaactttcctctgtgaacagttctctagagttcatcgagaatcaattttcaagcttggaactaccacttttggcaaaagttcaaggaacgttggggttaatagataataaaaatctgaaaaagctaaacttttcgaatgtcaccgatattcaagggggtctaatgattgctaacaatacagagcttgccaaaattgatttcttccccaagttgaggcaaattggcggtgcaatatattttgaaggtagctttgataaaattgacctcccagagctaaagttagtaaaaggtagcgcttatatcaaaagttcatctgaggaattaaactgtgaagaatttacatcaccaaaagccggtcgttcgatcataagaggcggtaaaatcgaatgcacatctggtatgaaaagtaaaatgctgaatgttgatgaagaggggaatgtactaggaaagcaggaaactgacaatgataatggaaagaaagaaaaaggaaaaaatggtgcaaaaagtcaaggaagttcaaagaagatggaaaacagtgctccgaagaacatttttattgatgctttcaaaatgtcagtttatgcagttttcacggtattgttctcgataattttttag

SEQ ID NO: 79780 - DNA, 276 bp, Saccharomyces pastorianus
atgccaatttggaaaacacaaacattcttcactagtatttctgttattcaaatagtcaataaagaaaccaaagtttctacaaaaaaagaaaagaatagcatgttgaaccagttgaacacaatcttaagatttttattcttgtttctgcagttaattaaatcatccgctgcagttgaacctaatggtggaccgaatattctagatcacaacattatgttggttaacactaatgcaacgatccctaaaaaggaacaaactgatttagaggtgattctc

SEQ ID NO: 79781 - DNA, 378 bp, Saccharomyces pastorianus
atgtttttcaatagcttggcaatcagtttgggatctaaagagttatacagatcctcacgttcttgcacgatttgttcatcactcattccctgcagaactttaatattttcattatggatagattttgcctccgatagtggggcgtctgtactcgtttgttgcttttcagcatccttgccactagtttttttcttttgggctcttttttctcttagtctttccttccaagatgatattttcttgggtttgtacaactcgggaaatcccgttccacagttgttggtactaagagtgccattgtcattactttcaacggagtcagatgtatctttctccacgatatcgcccagtaagtccattacgatggtggcagagtga

SEQ ID NO: 79782 - DNA, 1137 bp, Saccharomyces pastorianus
atgaaattgtcttccgcttttgtattatctgctatcaccgttgccgctttaggcgaaagtattactactacgataactgctaccaaaaatgggcatgtttacaccaagactgtcactcaagatgctacttttgtctgggcaggagaaggcgctgcggtaacctccgcagtaactgaagcgtctactgtcgctgcaacgtctgttgccgctgaaacatctgttgccgctgaaacatctgttgttgagccttccacttctgctcagggcacctctgctgatgaagggtctggttcgagtataaccaccactattacagctaccaaaaatggacatgtctacacaaagaccgtcacccaggacgctacttttgtatggactggtgagggtgaacgtgctcctgcctccaccgttgcaacttctagtatttctgctattgaaattccctccaccactgaggcctctattgtggagacttcctctgctgttgagacttcctctgctgttgagacttcttcttcttcctctacagcagaggcttctagtgctgaagcttctaccgcggagacttcctctgctgttcatggtgcttcttctactaccactgctactgctaaggatcttgctacagaggcctcctctactatcgagaccacttctgttaaaagcttatctcccactcagacttctctttcatcttctgtccaggcttcttctcctattgagacttcttctgctgcaaaaacctcttctgttgtgcgaactttttcttctactactactgaaaatttctctaattctaaattcacgtttgcagttgttgcatctactaccacctcctctgagtcaagcgctactatcgttacccctactagaactgggcaagcttacacagagagttcttctagggatgcccaatctgttcgtacccatgaaagtaacaattggtcatcaagttcttctgcaagcacaaaaatggtatcctctattacaagagttcaaaccactaccgctggtattttcactaacggtaagtcgtccacaactcctcaaatcgtgaattacacgggtgcggctgattctatcgccgctggtacgggtctgatgggcgctgcgctcgctgctgttatctttttgtaa

SEQ ID NO: 79783 - DNA, 105 bp, Saccharomyces pastorianus
atgttggtatcgtgtttaaatgatggacgcatctacgtcaccttaagtgcgtttttgcctgtgagatttttatttcattgtgtccacttgctattgtctggttga

SEQ ID NO: 79784 - DNA, 1080 bp, Saccharomyces pastorianus
atgtttcagacggtggcaagtacttacaaacgtacggaatgtggattcttcaaactccagataaaaaaatggactaattggtcaattgctagaggtatggttgtagatgacaagcatatcactggtctggtaattaaaccacaacatattagacaaattgctgactcttgggcagcaattggaaaagcaaatgaaattcctttcgcgttatgttttggcgttcccccagcagctattttagttagttccatgccaattcctgaaggtgtttctgaatcggattatgttggcgcaatcttgggtgagtcggttccagtagtaaaatgtgagaccaacgatttaatggttcctgcaacgagtgagatggtatttgagggtactttgtccttaacagatacacatctggaaggcccatttggtgagatgcatggatatgttttcaaaagccaaggtcatccttgtccattgtacactgtcaaggctatgagttacagagacaatgctattctacctgtttcgaaccccggtctttgtacggatgagacacataccttgattggttcactagtggctactgaggccaaggagctggctattgaatctggcttgccaattctggatgcctttatgccttatgaggctcaggctctttggcttatcttaaaggtggatttgaaagggctgcaagcattgaagacaacgcctgaagaattttgtaagaaggtaggtgatatttactttaggacaaaagttggttttatagtccatgaaataattttggtggcagatgatatcgacatatttaacttcaaagaagtcatctgggcctacgttacaagacatacacctgttgcagatcagatggcttttgatgatgtcacttcttttcctttggctccctttgtttcgcagtcatccagaagtaagactatgaaaggtggaaagtgcgttactaattgcatatttagacagcaatacgagcgcagttttgactacataacttgtaattttgaaaagggatatccaaaaggattagttgacaaagtaaatgaaaattggaaaaggtacggatataaataa

SEQ ID NO: 79785 - DNA, 510 bp, Saccharomyces pastorianus
atgaggaagctaaatccagctttagaatttagagactttatccaggtcttaaaagatgaagatgacttaatcgaaattaccgaagagattgatccaaatctcgaagtaggtgcaattatgaggaaggcctatgaatcccacttaccagccccgttatttaaaaatctcaaaggtgcttcgaaggatcttttcagcattttaggttgcccagccggtttaagaagtaaggagaaaggagatcatggtagaattgcccatcatctggggctcgacccaaaaacaactatcaaggaaatcatagattatttgctggagtgtaaggagaaggaacctctccccccaatcactgttcctgtgtcatctgcaccttgtaaaacacatatactttctgaagaaaaaatacatctacaaagcctgccaacaccatatctatatgtttcagacggtggcaagtacttacaaacgtacggaatgtggattcttcaaactccagataaaaaaatggactaa

SEQ ID NO: 79786 - DNA, 219 bp, Saccharomyces pastorianus
atggcgcgtcagacagacaaacttctcccaaaatgtattaccccgccgaataagaaaacagacccattcaccaacgacgtatcaagttacttcacccacacccacacacacacaccatgctcaccttcacttgtatacacttatgttaatactacagaaaaatcaccatcaaaatcacctaaacataaaaatattctacctttcaacttcacgaaataa

SEQ ID NO: 79787 - DNA, 192 bp, Saccharomyces pastorianus
atggcaccaaccttgaaggcagccgcagttaagggcggtaaagatcctcacgaactgcttaacattgaggtgcttttcagtcctgagattcgtgacaacaaagaattcgttgcacaattgacccactccctagaaacagtttacgataaagggccaattgccgctattaaggaaattttagaccaagtgtga

SEQ ID NO: 79788 - DNA, 582 bp, Saccharomyces pastorianus
atggtcgtagacaaaattggccgtcgtaaatgtctactatttggtgcagctgggatgatggcttgtatggtcatatttgcaagtatcggggtgaaatgtctttaccctcatggccaggatggtccatcctcgaaaggtgcaggtaatgccatgattgtgttcacttgcttctatatattctgctttgcaacgacatgggcacctgttgcttatattgtggttgccgagtcgttcccttcgaaagtcaagtctagagccatgtcgatttcgactgcatgcaactggttatggcaatttttgatcggttttttcacaccattcattactgggtctatccacttctattatggttatgttttcgtaggttgtttggttgcaatgtttctgtacgttttcttctttttaccagaaacgattggtctatctttggaggaaatccaattactatacgaagaaggtataaaaccatggaaatctgcatcttgggtcccaccttctaggagaggtatttcttccgaagaaagtaagaccgagaagaaggattggaagaaatttttgaagttctcaaagaattctgattga

SEQ ID NO: 79789 - DNA, 843 bp, Saccharomyces pastorianus
atgtctagtgcgcaatcctctattgataccgatggagatattcgagatgctgatattcatgtcgcaccacctgtgggaaaggagtggtcagatggatttgatgacaacgaagttataaacggggataacgttgagccaccaaaaagagggctcataggttatcttgtcatttacttactgtgttatccaatatcctttgggggtttcctgcctggttgggatagtggtatcacagcaggtttcattaacatggacaactttaaaatgaacttcggttcttacaagcatagcactggtgaatattatttgagcaacgtgcgtatgggtcttcttgtggctatgttcagtattggatgtgccataggtggtcttattttcgcccgtcttgctgatactttaggtagaaggctggcaattgtgatcgtggtgttggtatatatggttggtgcaattattcagatcagttcgaatcacaaatggtaccaatacttcgttggtaagattatctatggtcttggtgctggtggctgttcggtgttgtgtccaatgcttttgtctgagatagctcccacagatttgagaggtggtcttgtctcattgtaccaactgaacatgaccttcggtattttcttgggttattgtagcgtttatggtacgagaaaatacgataacactgcacaatggagagtgcccctcgggctttgctttttatgggctttgattatcatcattggtatgttattggttccagagtccccaagatatctgattgaatgtgagagacacgaagaggcccgtgtttccattgccaaaatcaacaaggtttcaccagaggatccatag

SEQ ID NO: 79790 - DNA, 102 bp, Saccharomyces pastorianus
atgcaaacgggaactataactttctgctggacgttccatttccccatccccttacaacgcatagtaaaccaaaagcagccaccgcctcaatcctacgtttaa

SEQ ID NO: 79791 - DNA, 465 bp, Saccharomyces pastorianus
atggccttcaccacaattcgatcgttaaccattttttccggttcttcgtttgacatgcctacgttcttcgtgcttgcaaaaggtggagatgagtctggagtctttttcattagtctgcactcatctattttatatgcccgttttccgcttttaaatctcttgtcgcaacactctccagtatattgttcgcgaaggtttccgcctgataacgatttaataaccggattgggaaatatacgatgcggtcaattggtgaaaaaggccttacgcagagtatgcaatgtaccgcctgatcatcagctgatcgcttcagtgcgatcgattggatatgctagagtagcattcgtgttttgtacgtgtacgcctgaatgtcgggataatttgcagagtgtgacaagaacttcaggccatcaaacaacaattagtcaaccatgcacagatatacagtcaacaccgaagtgctag

SEQ ID NO: 79792 - DNA, 2754 bp, Saccharomyces pastorianus
atgaatgccaagagatacacagtggacaaagtcttcggtcccggcgcttcccaggatctaatttttgatgaagtggcgggcccattattccaggatttcattaaaggttataattgcaccgtactggtatatggtatgacgtcaacaggtaaaacatatacaatgacgggcgacgaaaagttatataatggtgaattgagcgatgcagcaggaattataccgagggttcttttgaagttgtttgacacattggaactacaacagaacgattacgtagtaaaatgttcgttcattgaactctacaacgaagaattgaaggacctcttggacagcaatagcaacggctctagtaatactggctttgacggccaatttatgaaaaaattgaggatttttgattcaagcacagcaaataataccactagcaacagtgctagtagttccaggagtaattctaggaacagttctccgaggtcattaaatgatctaacacctaaagctgctctattaagaaaaaggttaaggacaaaatcactgccgaataccatcaagcaacagtatcaacaacaacaagcagtgaattccaggaacaactcttcctctaactctggctctaccactaataatgcttctagtaacaccaacacaaataacggtcaaagaagttcgatggctccaaatgaccaaactaatggtatatacatccagaatttgcaagaatttcacataacaaatgctatggaggggctaaacctattacaaaaaggcttaaagcataggcaagtagcgtccactaaaatgaacgatttttccagtagatctcataccatttttacaatcactttgtataagaagcatcaggatgaactatttagaatttccaaaatgaatcttgtggatttagctggttcagaaaacatcaacagatccggagcattaaatcaacgtgccaaagaagctggttcaatcaaccaaagtctattgacgctgggcagggtcataaacgcactcgtagataaaagcggccatatacctttccgtgaatccaaattgacccgcctgcttcaagattccctgggtggtaatacgaaaaccgcactaattgctactatatcgcctgcaaaggtaacttctgaagaaacctgcagtacattagagtatgcttcgaaggctaaaaacattaagaacaagccgcaactgggttcatttataatgaaggatattttggttaaaaatataactatggaattagcaaagattaaatccgatttactctctacaaagtccaaagaaggaatatatatgagccaagatcactacaaaaatttgaacagtgatttagaaagttataaaaatgaagttcaagaatgtaaaagagaaattgaaagtttgacatcgaaaaatgcattgctagtaaaagataaattgaagtcaaaagaaactattcaatctcaaaattgccaaatagaatcattgaaaactaccatagatcatttaagggcacaactagataaacagcataaaactgaaattgaaatatctgattttaataacaaactacagaagttgactgaggtaatgcaaatggccctacatgattacaaaaaaagagaacttgaccttaatcaaaagtttgaaatgcatattactaaagaaattaaaaaattgaaatctacactgtttttacaattaaacactatgcaacaggaaagtattcttcaagagactaatatccaaccaaatcttgatgtgatcaaaaatgaagtactgactcttatgagaaccatgcaagaaaaagctgaactaatgtacaaagactgtgtgaagaaaattttaaacgaatctccaaaattcttcaatattgttattgagaaaatcgacgtaataagagtagatttccaaaaattttataaaaatatagccgagaatctttctgatattagcgaagaaaataacaacatgaaacagtacttaaaaaaccattttttcaagaataaccatcaagaattactgaatcgtcatgtggattctacttatgaaaatattgagaagagaacaaacgagtttgttgagaactttaaaaaggtcctaaatgaccaccttgacgaaaataaaaaactaataatgcagaatctgacaactgcaaccagcgcggttattgatcaagaaatggatctgtttgaacccaagcgcgttaaatgggaaaattcatttgatctgataaatgattgtgactccatgaataacgaattctataatagcatggcagcgacgctatcgcaaatcaagagtactgttgatacatcatcaaattcgatgaatgagtctatttcagtcatgaaaggacaagtggaagaatcggagaacgctatatcccttttgaagaacaataccaaatttaatgatcaatttgagcagcttattaacaagcataacatgttgaaagataacattaaaaattcgataacatcaacacactctcatataactaatgtggatgatatctataatacgattgaaaacataatgaaaaactatggtaacaaggaaaacgctaccaaagacgaaatgatcgagaacatattgaaggaaataccaaatctaagtaagaaaatgccgttaaggttatcaaacataaatagcaattcagtgcaaagtgtaatatcgcccaaaaagcatgcaattgaagatgaaaacaaatccagtgaaaatgtggacaatgagggctcgagaaaaatgttaaagattgaatag

SEQ ID NO: 79793 - DNA, 240 bp, Saccharomyces pastorianus
atgccagcggaaaaccaaaatacgggtcaagatagaagctccaatagcatcagtaaaaatggcaactctcaggttggatgtcacactgttcctaatgaggaactgaacatcactgtagctgtgcgatgcagaggaaggaatgaaagggaaattagtatgaaaagctccgttgtggtaaatgtccagatattacaggttctaaagaaatttccattaacacgacgggagatactggtataa

SEQ ID NO: 79794 - DNA, 165 bp, Saccharomyces pastorianus
atgagtggcatatacactcttctgcagaggattttcgtacacaacggtgtgtgtgctgtgaagctgtctgcttccttacttggctgtttgcttgcttgtgcgtcatggtcacttttgttagaagtgagccgcataaaatggcatgtcggcacagcctacagttaa

SEQ ID NO: 79795 - DNA, 324 bp, Saccharomyces pastorianus
atgagtctttctttccttctcttttccccttttctccccccctgtttctcgtccatctctatctgtctatctgtcttatctactgttagtttttttttcgctttcacgataccgcattacgtactgcggtgcggaagtgtggatgagtggcatatacactcttctgcagaggattttcgtacacaacggtgtgtgtgctgtgaagctgtctgcttccttacttggctgtttgcttgcttgtgcgtcatggtcacttttgttagaagtgagccgcataaaatggcatgtcggcacagcctacagttaaaaattaagcatatctga

SEQ ID NO: 79796 - DNA, 105 bp, Saccharomyces pastorianus
atgtgtccttctcgtctatcttgttctgtctggtatagagtaatacttacatacatatacgtacattgtttccgctggctagttcgtaaccacctcctttcctag

SEQ ID NO: 79797 - DNA, 309 bp, Saccharomyces pastorianus
atgaagtataataacagaaaactctcgttcaaccctaccacagtaagtatcgctggaacgttgcttacggtgttctttctcacaagactcgtgctttcgttcttctcgatatcgctattccagctggtaactttccaaggaatcttcaagccctatgttccagattttaaaaatactcccagcgtagagttctacgacctacgaaattaccaaggcaacaaagatggttggcaacagggtgaccgcatcttgttttgcgtgccactgagagatgcttctgagcatcttcccatgtttttaaccatctga

SEQ ID NO: 79798 - DNA, 1185 bp, Saccharomyces pastorianus
  modified_base (956)..(956): a, c, g, t, unknown, or other
atgttttttaaccatctgaataccatgagatatccgcacaacctgattgatctgtcgtttttggtgagtgactcttcggataacaccatgggcgtgttactatccaatctacagatggcgcaatcgcaacaagacaagtccaaaaggtttggtaacatcgaaatctatgagaaggacttcggccaaatcattggtcagtccttttctgatcgtcacgggtttggcgcccagggccccagaagaaagctgatggccagggctcgtaattggcttgggtccgtggccctgaaaccataccactcctgggtttactggagagacgtggatgtcgaaaccatccccactaccatcatggaggatctaatgcatcatgacaaggacgtcattgtccccaacgtctggagacctttaccagactggctgggaaacattcaaccctacgatttaaattcatggaaggaatcagaagggggtcttcaattggcggattccctagacgaagatgctgtcattgtggaagggtacccagagtacgccacttggagacctcacctggcatacatgagagatccaaacggtaatccagaagacgaaatggaattggacggtattggaggggtctcgattctcgcgaaagctaaagtgttcagaacaggctcacactttcctgcattctcctttgaaaagcacgcagagacagaagcattcggtagactctcccgcaggatgaattacaatgtcatcggcttgccccattatgtcatctggcacatctacgaaccttccagtgacgacttaaagcacatggcttggatggctgaagaggagaagcggaaactagaagaagagagaattcgcgaattttacaacaagatctgggagattggatttgaagatgtcagagaccaatggaacgaagaaagagattcaatattaaaaaacattggctccacttncgacaataaagtcactgtagactggtctgaagaaggagatggctcggaactggtggactcaaagggtgacttcgtctctccaaacaaccagcaacagcaacagcaacaacagcagcaaaagaaacaacaagacagcaacccgcaggggaaacttcatgacggcaacgataagaacaagaaaatgcttcctaaagaggttccattggacttcgaccctgatagaaactag

SEQ ID NO: 79799 - DNA, 1713 bp, Saccharomyces pastorianus
atgtctcagtctaaaattgatgatctaaaccgtgatgatgttgaatctgaattaacctttaatgggtttttgattttccattgtcctctgaaggatgacgctattgaaaccattaaaatgttaaatgaatcctcccatcgttctattatgattactggtgataatccattaactgctgttcatgtggctaaagaagttggcatagtttttggcgaaactttaatcttagacagagcaggtaaatctgacgacaatcagttgctgttccgtgatgttgaagagacagtttccatcccatttgatccatcaaaagacacttttgatcattctaaattatttgatagatatgatattgctgttactggatatgctttgaatgccttggaagggcattctcaattaagggatctattacgtcacacctgggtttacgcacgtgtttcaccatcccaaaaggagttcttgctgaatacactaaaggatatgggatatcaaactttaatgtgcggtgatggtactaatgatgttggtgctttgaaacaagctcatgttggtattgcattgttgaatggtaccgaagaaggtttgaaaaaattgggtgaacaacgcagattggaaggtatgaaaatgatgtatataaagcaaactgaatttatggctagatggaatcaaccacagccacctgttcctgaaccgattgcacacttattcccacctggtccaaaaaatcctcattatctgaaagctttagaaagcaaaggtaccgtcattacgccagaaatcagaaaagcagttgaagaagcaaattccaaacctgttgaagtcatcaaaccaaatggactatcggaaaaaaaacctgctgacttagcttctttgttgttgaactctgctggtgatgcccaaggtgatgaagcaccagctctaaagttaggagatgcatcttgcgctgccccttttacctcgaaactggccaatgtttctgctgttactaacattatacgtcaaggccgttgtgctttagttaacacaattcaaatgtacaaaatcttggccttgaattgtttaatcagtgcctactctttgtccatcatttacatggctggtgtcaaatttggtgatggtcaagccactgtctccggtttgttactatcggtttgtttcttgagtatttcccgtggtaaacctttagaaaaactatccaagcaaaggccacagtccggaattttcaatgtttacattatgggatctattttgtctcaatttgccgttcatattgccactttagtttacatcactacagagatttataaattggaacccagagagccacaagttgatcttgaaaaggaatttgctccatcattattgaatacgggtattttcatcattcagttggtacaacaagtctctacatttgctgtcaattatcaaggtgagccattcagagaaaacattaggagtaacaaaggtatgtattatggtttattgggtgtgacaggtttggcacttgcaagtgctactgaatttttacctgagctaaacgaagccatgaagtttgtgccaatgactgatgactttaagattaagttgaccctaacattattgctcgatttctttggtagttggggtgtcgagcattttttcaagtttttcttcatggacgacaaaccatcagacatttctgtgcaacaggtcaagattggctctaaatga

SEQ ID NO: 79800 - DNA, 1599 bp, Saccharomyces pastorianus
  modified_base (1583)..(1583): a, c, g, t, unknown, or other
atgacaaagaaatcatttgtgagcagtcctattgttagggactcgacattgctggtaccaaagtcattaatagcaaagccgtacgtattaccgtttttcccgttatacgctacctttgcccaactatatttccagcaatatgatcgttacatcaaaggacctgagtggacttttgtctacttggggacattggtatccttgaacatcctagtcatgttaatgcctgcttggaatgtcaagatcaaggcgaaattcaactacagtactactaaaaatgtcaatgaagctactcacattctcatctacaccactccaaataatggttctgatggtatcgttgaaattcagagagtaactgaagcgggctctttgcagacttttttccaatttcaaaagaaaagattcttgtggcatgaaaatgagcaggtattttcttcaccaaagttccttgttgatgaatcttcaaagatcggtgatttccaaaaatgtaagggccattccggtgacctaactcatttgaagagactatatggtgagaatagttttgatattcctattccaacatttatggagttattcaaagagcacgctgttgcgccattgtttgttttccaagttttctgtgttgccttatggctattggatgagttctggtattattctttgtttaacttattcatgattatctccatggaggcagctgcagtatttcaaagattaactgccttgaaggaatttagaactatgggtatcaaaccttataccattaacgtgtttagaaacaaaaaatgggtagcattgcaaaccaatgaattgttacctatggatttagtatctataacaagaaccgccgaggagagcgcaattccttgcgatttgatcttgctcgatggctccgctattgttaatgaagcaatgctttcaggtgaatctactcccttgttaaaggaatccattaaattacgtcctagtgaagataatttacaactggacggtgttgacaagattgctgtgttacatggtggtacaaaggcattacaagtaacacctcctgaacataaatcggatatccctgctccacctgatggaggtgccttagccatcgtcaccaaaactggctttgaaacatctcagggttctttagttcgagttatgatttactccgctgaacgtgtttccgtcgataataaggaagcgttgatgttcattcttttcttgttgattttcgctgttattgcatcctggtacgtttgggttgagggtacaaagatgggtagaattcaatccaaattgatcttggactgtatattaattattacatctgttgttcctcctgagttaccaatggaattgaccatggctgtcaacagttctctggctgcccttgccaagttctatgtctattgtactgaaccatttagaattccatttgctggtagaattgatgtttgttgttttgataaaactggtactttgaccggcgaagatcttgtatttgaaggtctagctggtatctctgcggactccgaaacattcgtcacttgtacagcgctgccgaagcaccagaaagcagttcttgtcanttggtgctgctcacgc

SEQ ID NO: 79801 - DNA, 417 bp, Saccharomyces pastorianus
atgccatacctcaaaattcggttacctaataagataatctcactggcggccatcccagatggatttcaaaaccttcaaatatgtccaaatttcaatagtcaaaggttggagggcgtcatacctctatttttactttgcggtactgagggccaaatttatataatatcggaattcattggtgagctgtggatgagaacgttgcatgattacaaaaagatcaagctcgaatgtaaaagagcttttcgaaggtctgagaaaagcatgcgaaatgttactaaacaatattccgtgagtaaagagactggaataaatgaaagcggctttgatgagctagctagaaattcaaagagaagacatatagatcattcaccatacaagaccatagattttttcgatcctgtaaaactaaaaaggtga

SEQ ID NO: 79802 - DNA, 918 bp, Saccharomyces pastorianus
atggcaagacaagatgaaacggactgcaaaaaattggatagcaattcggcctttttacctttatgcataacatcttatagatcaaaagataaggctgagaagctggtaagttgtcttcatcacgaaggaagttactttttatgttttagctatggattgtataccggaacgtccaacgaattgaaagcgaaggttgagttcgctttagatggaccgttcgttgttaactacgcaactgtaccgatgttcatgtcagcttccttctgtcacctgctaatgtttaacgacggttcgattaagggatttaaatgcgaaaataacaaatttgaaactatctacgactctaatgtggctccgaaactggatactatttctttattaacttccagctggttaaatgcctcttttgagggtgttttatacacttgcaataaaaacatatcatatgatagtgatttgcatacgttatgtacgacaatttactcctttgacttcagagaaggaatagtcgaaagattttatgccaccgatggcgaagaaattatctcctttgattttattagcagggaggatttgcttgacgacgccacatgcacaggtaaatcacacgtttattttctttgcctacttaagagttgctatagtgaaaacctgcttttaaaggaatacaatcttgctggaaagcatggaagtaggaaatttgatttaaatgagtaccgccaatacaatcttttgccgatatgtgataatgaattttgttatatgaaggtagtttgcgaccataccattgtagtgttgactaataactacactcaaataataaatatagaagcaagggggcttacaaacggggcttttttcaataataaaggtctcccacatgtagaaaactaccaatttctagaagatccttatgat

SEQ ID NO: 79803 - DNA, 1629 bp, Saccharomyces pastorianus
atggatgagccttatgattacggtctttttgtttctaggacgggaaaagttttgaaagccggtatggatggttctaccggagaatttaggcaggtcgatttcttgcagtcgaaccacaactcttccaccatgttttgttatcccgtacagaactccaagctcaggatttcgatacttgaggcaaaatctggttttctacgtaaaaaagaagaattttttatccatgggctcaattctaaagagagtattgtgagctgtttctcagatggtgccgagaaatatctttttgtcatttacttggacggtgtgttttcggtatggaatgccaatcaaaagaaagtggctacatcacatccagactattctttcatagcctatgatcaattgataaaaatatcttggctgggcaaaaagcataaacacgactcgatttatgtcatcgcatcatcatacactggctgcgtaagagtctacaaatcagaatcaaattttttgagagtggatttagagattcattcgttatacgatcagaaattagaactgttggatacgattccttccttacctttggttttcctttacaacgataaggaaataattttgttaaatcttcaaaacatgtcttatggttgcatacagttaggcttagttccaagacgaatgagaattcgacccggtaaagcactgttctctctttgtgttttagattatgattctcgaataagcatctttgagttcggtagcacgttttaccgtgaaggtttcattaagcagatgacttcattaaaacctcaattagaaaatcatatcttttacctccctagcattcccgtagagctctatactgttccaaataacctcaatcaggccgtggtgtgtttggtcgatagcaatagtaggcagtataagttgatgctattcaattatgcttcaatgaaggcagtttccacattcagtttctcggatgaaaagtatttacatgccgttgtgaagccactgtggccagaacaaaactcaatctacttatcacagagacccttttatggtaataagtttgttgtatgcttaggagttggtgaaaaacgtacaaaattctggctgtttgaaattagaaacaatagcattatccaattgtacgcgaattatctcgaagattgtatattctcggtgttcatatactatgagtgcaacttggttttattttctggtgatagtggcatagcagcatataaaataaacatgctaaaagagggcgcggaaattttagaggcctattccttcccagcactttcatcgattaaccatataggtcttccagcttatatgagtggtgattatctggttcaatttgagatcttgagagattttttgagaacccgctttccaattaggacgtccatagaatatccatcagagtaccctgaatgtccgtacttgggttttaagcggttgggaagcattacacaagtggcgactaaaataattcctaagaagctaagagaacctaaaaacgattgtttagcgagtgataagaactacctattaggtcgattatcagacctttcttgtgcaacgttgaaatattccaatagatcttatgtgccaccattggtattgataataccttga

SEQ ID NO: 79804 - DNA, 111 bp, Saccharomyces pastorianus
  modified_base (4)..(4): a, c, g, t, unknown, or other
atgnaacaaacaccagagtcaaacgacgttgaaattgaggctactgcgccaattgatgacaatacagacgatgataacaaaccgaagttatctgatgtagaaaaggattaa

SEQ ID NO: 79805 - DNA, 1320 bp, Saccharomyces pastorianus
atgtttaacaaaaaagacgtcttcgcacaattaaagcaaaatgacgatatattaccggaaaatagattacagggacacaacagaaggcaaacccaattgcagcaaaataattatcaaaatgatgaattggttattccagatgcaaagaaagattcatggaacaagatttcttcaagaaatgagcaaagcacacaccaatctcagccgcaacaagatgctcaagatgatctggttttggaagatgatgaacatgaatacgatgtcgatgatatcgatgatcccaaatacctaccaataactcagtctttgaatattacacatctaattcactctgcaactaactctccatccataaatgataaaacgaaaggtacagttataaatgataaggatcaggtactagctaaattaggccagatgatcatcagccagtcaagatccaactcaacatccttgccagctgcaaataaacaaacaaccatcagatcaaagaacactaagcagaacattcctatggctacaccagtacaactactagaaatggagagcattacgtccgaatttttcagtattaactcggcagtgctactagaaaattttgctgtaaacgcatcgttcttcttaaagcagaaactaggtggccgtgcacgtttacgtttacaaaattctaatccggaacctttagtagtaatactagcctcagattccaacagatctggtgccaaagctctggcgttgggtagacatctttgccaaacggggcatatccgtgtcataacattatttacatgttctcaaaatgaactacaggattccatggtcaaaaagcaaacagatatttacaagaagtgtggcggaaaaattgttaatagtgtatcgtcgctggaatctgctatggaaacattaaatagccctgtagaaatagtcatcgatgccatgcagggatatgactgtacattgagcgatctggcggggacgtcggaagttattgaaagcagaattaaaagcatgatatcatggtgtaacaaacagcgaggatctactaaagtgtggtctttggatattccaaatgggtttgatgcgggatccggcatgccagatattttcttttcagacaggattgaagcaacaggaattatttgttctggctggcctttgattgccatcaacaacttaattgcaaatttgccaagtctagaagatgctgttttgattgatgtaggtataccacagggcgcctattcacagagaacttctttgcgtaagttccaaaactgtgatcttttcgtcactgacgggtccctgctattagatttgtaa

SEQ ID NO: 79806 - DNA, 549 bp, Saccharomyces pastorianus
atgcagccactactccatcaagccaataataatagtgcaagctctgctacctctacagctccttatccggtgtattctatgaatgtgaatgttccttattacaattcttctgcttctgcatacaagagggcacaagaaaatactacttcaaatacgaatgcagaaccttctggtgctacaagcactaactcaggcaccatgctatcaaatcctgcatacgctaattctcagtacactccatcgcaagtgtattaccagggatacccccaatatgccatggcaagtgctcaaaatccgtctatgtatcaacaccagcaccaacatcctttgcctactgtatatccaatagcgacgcctcaacaaaatataatgagctctggtcacactttgagcactattggatctgatcctcaacatcatcactatcaacaagagcccaacgaccacaaaaacttcgctatgggtcacgcgaacaataatatcttaaacatcaccaataatgatacgatgaacaacctcaatacaaacacttcaactactacacaataa

SEQ ID NO: 79807 - DNA, 366 bp, Saccharomyces pastorianus
  modified_base (156)..(202): a, c, g, t, unknown, or other
atgggaaatacaaccttaggcaacgtgaaaaacaattccactaccaacggtaatggtcctaataatataaacaataaaagcaactcttccactcccctgaatactgttatttccacgaataacaatagtgctaatataaatgctgctggcagtaannnnnnnnnnnnnnnnnnnnnnnnnnnnnnnnnnnnnnnnnnnnnnngctctggatacccaatcactcaatttgctcccgcattaccatcaacaactttgatgtatacggcgaatccaccttatatcactcaatctcctgataacactaacgctactggtatgaatacacatgttagacctgcagcatgcaagctgcactgcgtcgtttac

SEQ ID NO: 79808 - DNA, 519 bp, Saccharomyces pastorianus
atggatatcgagcctactttcaaagggtacattgaagatgaagatgacgctttgcttattcttcaagcaactttggatggcaagttaaagcatataccaagaaggccttatgaaatagaaagaccttatttgatcgtatcaggtagtatattcgtttttattgaagagatatcgggcatcaagagatggactgatggcgtttcttggtctccatcaagaatatcaggcaagtttctaatatacaaggaactagacaaggaaaacgccgggtctaatgctaatgctacttcgagtggtagtactgattccgccgtcattacggatggaacttctggtgcgagaaataacccttcttcgtcgaaaatcaagctacctcctttgaagaatcaccagtttgatttgccacctactatgggccattcaagttttgagtcagagcaagacacctccatttctccatcaaaccgttcgaacttacctttaaagtatactggcctggtgaagaagacatatctgtga

SEQ ID NO: 79809 - DNA, 93 bp, Saccharomyces pastorianus
atgaagtctgaaacaaatcaaagaccttccaagaagagcgccactgtcaaaaaagttgatgaatcatggttgccagaaacctataaaaagtaa

SEQ ID NO: 79810 - DNA, 627 bp, Saccharomyces pastorianus
  modified_base (610)..(610): a, c, g, t, unknown, or other
atgaggttttctatgttaatcgggtttaatttattaactgccttgagcagcttctgtgctgccatatcagctaataatagcgacaatgtcgaacatgaacaggaagttgcggaggcggtagcgccaccttctattaatatagaggtgaaatatgatgtcgttgggaaggaatcagaaaatcatgattctttccttgagttttacgcggaggataccgctaccttagcctataatgttactaattgggaagatactaatatcacaatttttggtgtcaacggaacaattgttacatatccacatggttatcctgtggcggacattacaggtgcgagtattgggccttacgaaatggaggtcaacggaacttcaaaattcgggcaagacgttacgttaaatttaccggaaggacaatactttttaatcccatttttattagcttctaggttcgatgaaatcgtgagaattgcggcaccaccaaccctattcgaaattgttagcccacctatttcctttttcaacccacaatttttatcagttcaggtcatctttctagccatcatcggaggtgtaagttattactacatgaagtctaaaacaaatcaaaganccttggggatcctctag

SEQ ID NO: 79811 - DNA, 1143 bp, Saccharomyces pastorianus
atgggtacccacagcaagatgccttcctacaaccatgagtctaaggaatccctgagagatatcatctccaagaacccctctgccatgttaggtaaggacattattgataagttccacgccacaaatgaattgcccttccttttcaaagttttgtccattgaaaaagtcttgtctattcaagcacatcccgacaaagccttgggtaaaatattgcacgctcaagatcctaagaactatcctgatgataatcacaaacctgaaatggccatcgctgtgactgactttgaaggtttctgcgggttcaaacctttgcaagagattgcagatgaattgaaacgtattcctgaattacgcaacattgttggtgaagaaacttccaggaattttattgagaacattcaaccttctgctcagaaaggttccccagaagatgagcaaaacaaaaagctattgcaagctgttttcagcagggtcatgaacgcttcggatgacaaaatcaagattcaagctcgctccttggtcgaaagatcaaagaattctccatcagactttaacaaacctgatttaccagaattaattcaaagactgaataaacagttccctgatgacgtgggtttgttttgtggatgtttattgttgaatcactgcagattgaatgctggtgaagccatctttttaagagctaaggatcctcacgcctatataagcggtgatattatggaatgtatggctgcttctgacaacgtagttagagcaggcttcactccaaaattcaaggatgttaaaaacttggtctccatgttaacctatacatatgatcctgtggaaaagcaaaaaatgcagcctttaaagttcgacaggtcctctggtaacggtaagtcagttttatataaccctccaatcgaagaatttgctgtattggagactacttttgatgagaaacttggtcaaaggcattttgaaggtgttgatggtccaagtatcttaatcactacaaaaggtaatggttacattaaagcagatggccaaaaattgaaagctgaacccggttttgtctttttcatcgctccacatttgcctgttgatttggaagctgaagatgaggcgtttactacctatagagcctttgtggaaccaaattag

SEQ ID NO: 79812 - DNA, 219 bp, Saccharomyces pastorianus
atgtgccctggcctaacttctgcgggtgccgacctaccacctgctcctggttacgagaaaggtacgattgtagtcatcaatgccgaaaataaagagaatgcattggctattggtgaattgatgatgggtactgaagaaattaaatcagtgaacaaaggtcattccatagaattgattcaccatttgggcgaccccttatggaacttcagcgttgagtaa

SEQ ID NO: 79813 - DNA, 1959 bp, Saccharomyces pastorianus
atgtcatcgcataatccccactctctctttattcttgatggaaatgagcatttttctaatgatatcgaaaacgtagagagccaagataacggattacaagttgaaagtgctaacaagaaacttctatggaacacacttgatgaacttttgaaaactgtatctcttgatgaaatttccctaaatcagttattagaatgtccaataagagagaagaacttgccatggatggaaaaccaattgaatttattattaaaagcatttcaagcaataggcagcgatggaaatgaagtagaatataatctaagagaaatttccggactaaagcagaggctacagttttatgagaaagttaccaagatatttcttaacagaattgtggaggaaatgcagaagaaattctcaaatatacgtggacaagatatctcacacgatcaaatgattagaattttgacgactttattgatattttctcctttaatactgttctgtaaagaaatttcacaaaaatcgtatcaagcaattgtggaaaattggaacgtcagtattcaaccagtatacatggagttatggactaagaaaatatcacaattacaaggcattgacacaaatgatgaaaaaatgaatgagctgagcttaagccagttactaaatgaatgggacacatttagaaaagagagaaaaacaaatgatatcaacccggttttcaagaatagtttttctcttcttaccgagtgccttcaaaccatgaggcaagaatgtattgtttatcaaaattttgtcgaagtgttctttcatatatcttcaaagcataatttcgaagaatacattaaacatttcaatgatccagatgctcctccaatattattagatactgtgaaagtaatgcaatctgatagagaagcagccgttattgaaacccagttggtctcaagaatattccaacctattgtcactaggctgtcctcatattttgtagaattagtgaaagccgaaccaacggtagccccagccttaactttttacttggagaatgaaattaaaagcttagaatcatccaaccatgaatttttattgtctgcagtgactagaatgtacacacaaataaaacaagtgtggtctgataatgtagaagagcaggttttgcacttcgaaagaatttctaacgcaaccaccaatggagaaattcttccaggtatacttgatttaccagtaggcttgaagaattcagaagatttgttccaatttgctaagaggtctatggatattaaagataccgatgaaggctacgagtccatcgaattaatgaattcgagcttcaggaagctaagcatagctgccacacgatcgataactcacaaagaagttaattcaagcattaatccaaacctttcagatactgctgctttaaataatgactatatggaaactatttctctcctagtgaacagtaactggctaactgaaatgctttccatgttaaacttcaataaggatggtatatttgatacgtcattgcaaaacgttaagaaagttttcgatgtggaaaaagaatcttatgcttcctttctactccgcgatactatgcctaaactaacagcctttgtttatggtgtgagcaacatcattgaaaataccaacaatgtgaacatgaccaatccttcaagatgggccgcatatagcaggcagaacctagagaacattcttttagcatacacttcccatgaaattgaaactctagtaaaaaggctgcacactcatatggtaaatgacttcggttaccaccaagaaaatgccataaacaacgtcctatgcgataagttgtggtcgtgcattcaaggtcaaaccgtctcactatacttgaaactatacactgtaattgataaacactatagagggacaaacatacgcttcacgaagaacgatatcataagtgcgttcgaggaatacaagaatgcctaa

SEQ ID NO: 79814 - DNA, 1803 bp, Saccharomyces pastorianus
atgaggtcctcgaagtctccttttaaaaggaagtctcacagtcgtgagacatcacacgatgaaaacacatcgtttttccacaagagaacaatatccggtagcagtgctcaccattctagaaacgtcagtcaaggtgcagtaccctcttccgcaccacctgtttctggtggaaattattcgcataagagaaacgtgtcgagagcttcaaattcctctcaaacttcgaattttttagccgaacaatatgaaagggataggaaagccataattaattgctgcttttccagacccgaccataagacaggtgaaccgccgaataattatattacacatgtccggattatagaagattcaaaattccctagttcaagacctcctccagattcaaaattggagaacaaaaagaaaagactccttattttgagtgccaagcccaacaatgccaagctaatacaaattcataaagcaagagaaaactcagacggctcttttcaaattggtagaacttggcagttgaccgaactagtaagagtagagaaggacctggagatatctgaaggcttcattcttaccatgagtaaaaaatactactgggaaacgaattctgcgaaggaaagaactgttttcattaaatctctaattactctatacattcaaacattcgaaggtcatgtccctgaattggtcaattgggatttatcccttttttatcttgacgagaggagttatcaaagagcagtcatcacaaatcgccccggttccgtatctccaataaagtcacctacaagtaatttcacgacaaacactacccaatcggtgggctctgtccccttttcagcacctactgagaggacaagaaggtctgaaacagaaagcgttaatccagtgtcaacgcctgcaagcgtggaatatcatgcaggaatgaaatctctaaataaggccccctattcttccaattcgacattgaatgaagtgaataaaagatacgagttagagcaacaacagcaacaagaagaggctgaactgagacgattagaagagcaaaaaagacttcagttacaaaaggaaaatgagatgaaaagattagaagaggaaagaagaataaagcaggaggagaggaaaaggcaaatggaattggaacaccaacgacaactcgaagaagaggaacgaaaacgtcaaatggaactggaggctaaaaagcaaatggagttgaaacgtcaacggcaattcgaagaagagcaacgcctaaaaaaagagagagaactattggaaatacagagaaaacaaagagaacaagaaacagctgagagattaaaaaaagaagagcaagaagcgcttgctaaaaaggaggaggaagaaaaaagtaaaagaaacaaagtagacaatgaaagttatactcaagaaataaatggtaaggttgataaccttttggaggacttaaacgcagttttggcggaagaaacagaaaccacccctactatgcaaaatggtacttacgtacccgagagaagtacagctagagctcatgaccaattaaaaaaaccactaaatattgccaaagttgagtcactcggtggaagcgatttgaatgactcgatcagtttgagtgacgagatagcaggtttgaatacatctaacttatcaggagaggaccaagatgagaagaacgatctttcgttcgagaagggagatgaggttaggtatagcaataattttgaaggtgaagctcctcacgtgtaccatgaagtatcaattattcaagaagaagcacctgccgtttcgcagaaattaatccttccggaa

SEQ ID NO: 79815 - DNA, 177 bp, Saccharomyces pastorianus
ggtgacaataatggaatagtacgcactcctgttcaagagactgacatttcaaaattagttacctatatcgaaaagtcaattgaagtggatttacttgtctctgaagatattaagaatggtattcccgccaaacaagctcaaaatgatcgaagatcagtattaaagaaatacatttaa

SEQ ID NO: 79816 - DNA, 1704 bp, Saccharomyces pastorianus
atgactgatggtatgttacagagagaggcgttgttagatcccgagatgtcaaaatattcagttatcatgttagatgaagctcacgaaagaactgtggcaactgatgttttatttgcgttgttaaagaaagcggctattaaaagaccagaattaaaagtaatagttacatcggctactttgaactctgctaaattttctgagtactttttaaattgtccgattatcaatatacctggtaaaacttttcccgtggaagtactctactcacagacgccccaaatggattacatagaggcagctttggattgtgtaatagacatccatattaatgaaggcccaggcgatattttagtctttttgactggacaggaagaaatagactcatgctgtgaaattttatatgatagggtgaaaactttaggtgacagcatcggcgaattactgattttgcccgtttattctgctttgccaagtgaaatccaatcgaaaatttttgaacccactccaaagggcagtcgaaaagtcgtatttgccacaaatattgcggaaacttcaatcactattgatggaatttattatgtcgtggaccctggatttgcaaaaatcaacatttataatgcaagagcaggtatcgagcagttgatagtgtctccaatctctcaggcacaggcaaatcaaagaaaaggtagagctggaagaacaggccctggaaaatgctatcgactttatacagaatccgcattttacaatgaaatgttagaaaacacggttccagaaattcaaaggcagaatctttctcatactattttgatgctaaaggccatgggaattaatgatttattgaaatttgacttcatggatccccctcccaaaaatttaatgcttaacgcactgacagaattataccacctgcagtcactagatgacgagggaaaactaacaaatttaggtaaagagatgtccttatttccaatggatcccactctatcacgctctttattgtcatctgttgataatcagtgctcggatgaaattgttactataatctcaatgttgtcagtacagaacgttttttatcgtccaaaagataggcaattggaagcagatagcaagaaggcaaagtttcatcacccatacggtgatcatttaacattattgaacgtttatactagatggcagcaggcaaattactcggagcagtattgcaaaacaaactttctgcattttagacatttgaaaagagcaagagatgttaaaagccaaattagcatgatatttaaaaagataggcttaaagttaataagctgtcatagtgatcctgatttaattcgtaaaactttcgtgtcagggttcttcatgaacgctgctaagcgagactcacaggtaggttataaaaccatcaatggtggtacagaggttggaatacatccctcgagttcattgtacggaaaagagtatgaatacgtaatgtatcatagtatcgtattaactagccgggaatacatgtcgcaggtaacatccattgagccccaatggcttctcgaagtagcgcctcatttttataaagctggagatgctgaaagccagtctaggaagaaagcgaaaatcattcctttgcataacaagtttgccaaggatcaaaattcatggagactaagctcaataagacagtcaagggaaagggcattaggtatcaagaggtaa

SEQ ID NO: 79817 - DNA, 1134 bp, Saccharomyces pastorianus
atgtctgatatatcgaaactcatagaagctattgtgggatctgatgaccccgtgatcattgaatttgtgctgaatatcataaataaatccggcaatttacaagagtttatacgaaatattcaaaaattggatgccggtatatcctacgaagacagtattaagatgtataatgcgtttttgggaaagcaggaagaagaaaagatacgaaataaagttacaagttcaccgttaagtcaaaaaattaatcaggtactgaaagatgacgttaatttggacgaccctgttgtgactgaatttgtccttagcattttgaataaatctaaatcaataactgagttccaggaacaactgaacttgatgcaaagcggactcgataatgaaacaattttcaagatatatcaaattgcatcaccaccagtaatgaaagaagaagtctcagttcttccaagcaccaagataccagcaaagatagaagcaaagattgaagaagaggcacaaaaaatagaaagtttagaccctagccctgtccttcacaaagtttatgaaggtaaagtgagaaacataactacttttgggtgtttcgtccaaatttttgggacgcgaatgaagaattgtgatggcttagttcatatttcagaaatgtcggaacaaagaacattagatccacatgatgtggtgagacaaggccaacatatctttgtcgaggtgataaaaatacaaaataatggaaaaatatcgctctccatgaaaaatattgatcaacatagtggagaaatccggaaaagaaatactgaaagtgtcgaagacagaggtaggtccaacgatgctcatacaagcagaaatatgaaaaacaaaattaaaaggcgtgctttgacttcaccagaaagatgggaaattcgccaactaattgccagcggtgctgcttccatcgatgactatcctgaattaaaggatgaaatacccataaatacttcctatttgaccgcgaaaagagatgacggcggtatcgttaacggtaatacagagaaagtggactcaaaattggaagaacaacaacgagacgagacggatgaaattgatgtcgagctgaatacagatgagacctgcaggcatgcaagcttgcactgccgtcgt

SEQ ID NO: 79818 - DNA, 333 bp, Saccharomyces pastorianus
atgaaatcttggcagacatctatcggcgatagtgaattcccactgaccagcttccagatccttgttactgatgccgaggtggttgttcagcgcatccttgactgcactaatggttacctccctggatggcactacaggaacaccgtgttcattgagcatacaacctcctatcatcgcagtcacttttgtatatttgttgagggcgtttgggtttgtggagagtttgtcaaaaagtggtttgaaattcctttcgataacagaatcgaaaattacaccaagcaatttccctggattcttattggatttgggaaccaagtatccaaagccttgtag

SEQ ID NO: 79819 - DNA, 114 bp, Saccharomyces pastorianus
atgattagattattgggtccaaggccattcaaggaaaggaacgaggcttttgaaaaatatttggatccaaagagcaataccgaaccgcctgaggcacctgcagcaacaaattaa

SEQ ID NO: 79820 - DNA, 2049 bp, Saccharomyces pastorianus
atgatgatgtggcaacgatatgcaaggggtgcgccacgctcattgacatcactctcatttggtaaagctagccgcatatcaacagtgaagccagtgcttcgctcgcgcatgccagttcaccagcgtttgcagacgttatctggtctggcaaccagaaacacaatacaccgttctacccaaatacgttccttccatatctcatggacaaggttaaatgaaaataggccaaacaaagagggtgagggcaagaacaatggtaataaagataataatagcaataaagaagatggcaaagacaaaagaaatgagtttggttcattatcagaatacttcagatctaaggaatttgctaatacgatgtttttgaccatcggattcacaattatatttactttgctcacaccttccagtaacaactcaggagacgactctaaccgcgtcttgactttccaggatttcaaaacaaaatacctggagaagggtcttgtgtccaagatttacgtcgttaataagtttctcgtagaggccgaattagtcaatacaaagcaagttgtatcgttcaccattggttcagtagatatttttgaggaacagatggaccagatccaggacctcttgaacattcctcctcgggatcgtatccccatcaaatacattgagagatcttctcccttcacatttttgttccccttcctgcccaccatcattctgcttggtggcctttacttcataaccagaaaaataaatagttcaccaccaaatgccaatggtggtggtggaggaggcctcggtggcatgtttaatgttggaaaatccagagcaaagctcttcaataaggaaacagacattaaaatttcatttaaaaatgttgccggttgtgatgaagctaaacaggaaatcatggaatttgttcactttttgaagaacccaggtaagtacactaaattgggcgccaagataccacgaggcgctattctttctggacccccaggtaccggtaagactctcttggccaaggccaccgcaggtgaggcaaacgtgcccttcttgtcagtatcaggttctgagttcgtcgaaatgttcgttggggtgggtgcttcacgtgtaagagacttgtttactcaagcaaggtctatggccccctcgattatctttatagatgaaattgacgctatcggtaaagaaagaggcaaaggcggcgctctcggtggcgctaacgatgaaagagaagctacactgaaccaattattggtggaaatggacggattcactacttccgaccaagtcgtagtccttgcgggtacaaataggcccgatgtgttggataatgctttgatgagaccgggaaggttcgatagacatatccaaattgattctcctgatgtcaatggtaggcagcaaatatacctggttcacttgaaaagactgaatctggatccccttcttacagatgatatgaataatctttctgggaaattggctacgcttactccaggttttactggcgcagatatcgctaatgcttgtaatgaggctgcattaatcgctgccagacataatgacccatatatcactatccatcactttgagcaagccattgaaagagtcattgcgggactagagaagaaaacaagagtcctttctaaggaagaaaaaaggtcagtggcctatcatgaggcaggacatgccgtttgtggttggtttctaaaatatgcggatccacttctgaaagtaagcatcatcccgcgtggacaaggtgctttaggctatgcccagtacctaccaccggatcaatatttgatatctgaggagcaattcagacatagaatgatcatggctcttggtggccgtgtttctgaggagctacattttccatcggtgactagcggtgctcatgatgatttcaaaaaggttacacagatggcaaatgccatggttacatccctaggaatgtcacccaagattggctacctgtcgtttgatcagaatgatggaaacttcaaagttaacaacccttcagtaataaaacggcaagaaccattgatttag

SEQ ID NO: 79821 - DNA, 834 bp, Saccharomyces pastorianus
atggatagggacagtgaaagtgaagaagctgaaacgaaagatatcagaaagcaaatccaacttttgaaaaagatcatttttgaaaaagaactgatgtaccaaataaagaaagaatgcgctttgttgatttcctatggtgtcagtattgaaaacgaaaacaaggtaataattgaactacctaacgaaaaatttgaaatcgagttgttgtcccttgacgatgactccattgtcaatcatgaacaagacttaccaaaaatcaacgacaagagagcaaatttaatgcttgttatgttgagactattattagtcgttatattcaagaaaacattacgatcgagaataagctcaccccacggactgatcaatttgaatgttgacgatgatatcttaataatacgtcccattcttggtaaagttcggtttgctaattacaaactgttactaaaaaaaatcataaaggattacgtgctcgatatagttcctggctcaagtataacagaaacggaagttgagagagaacaacctcaagaaaataaaaacattgatgatgaaaatataactaaattaaataaagagatccgtgccttcgataaactattgaatatacctagacgtgaactcaaaataaatctaccattaactgagcacaaaagccctaatctaagtttaatgctcgaaagtcctaactattgtaatgcactcattcacatcaagtttgcagctggtacggaagccaacgcagtgtcctttgacacaacattttctgattttaaagaagtagaggacttcctacattttattgtcgctgaatacatccagcaaaagaaggtgtaa

SEQ ID NO: 79822 - DNA, 591 bp, Saccharomyces pastorianus
atggctggcgacaaccctgaaaacaaggatgcttccatgttagatgtcagtgaggcagctagcaacactacgattaatggtaaacatagcgcagattcaactaatgaggcttccctggcgtacactttttctcaaatgaacgtagataatcctaatgaattagagcctcagcatcctttaagacataaatcgagtttaatttttaacgacgatgatgacgatgaaatacctccatattcaaaccatgcggaaaatggttctggggagacctttgattctgatgatgatatcgatgctagcagcttgagtagtatcgacagcaacgaaggcgatatccacgatgcagatatgacaggaaataccttgcaaaaaatggattatcagccatctcagcagtctgactcacttcaaaatcaaggctttcaacagcaacaagaacagcaacagggcactgtggaaggcaagaaaggaagagctatgatgtttccagttgacatcacttggcaacaggggggtaataaagtgtacgttactgggtcttttacgggatggagaaagatgatcgggttagtaccagtcctggacagcctg

SEQ ID NO: 79823 - DNA, 1152 bp, Saccharomyces pastorianus
atgaccaaagaccctttagatgtgaaatttgttcacgaggtttccacagacttgaacataaaaaaaaggcacgtaagaacgcatactggcgagaagcctcaccaatgtaccgttcagggctgtccgaaaagcttcagccgaagcgatgaactaaaaagacatttgaggacacatactaaaggcgtccaaaggcgcagaataaaatccaagggctcgcgaaaaaccgttgtgaatactgctaccgccgcccctaccaccttcaatgaaaacactggtgtttcgcttacggggataggtcaagctaaagtgccacctattcttatctccgttgctcagaattgcgatgacgtgaatatacgaaatactggaaataataatggcattgtggagacacaggcacctgcaattttagtgcctgtgataagtattcaaaatgaccctcatccgattccaagtaacctctccactacttctatcacctccattgcatcagtatatccctccacttctccattccagtacctgaaaagcgggtttcctgaagatcctgcatctacaccgtatgtacattcgtccggaagttctttagccctgggtgtattgtcttcaaactcctctatattttcgaaatctaggaggaatttggccgccatgagtggtcctgattctttgggtagttctaaaaaccaatccagtgcttcgcttctttctcaaacttcacatccatcaaagagcttttcaagaccgccaacggacttaagtcctctgcgaagaatcatgccttctgtaaacacaggagacatggaaatttcaaggacagtatccgtttcgagcagttcatcatcacctacttctgttacgtatgatgacaccgcggctaaagacatgggcatgggaatattttttgataggcaacctgtaacacagaaagcttgcaggagcaatcataagtacaaggttaatgctgttagcagagggagacaacatgaaagggcacaatttcatatatccggagatgatgaggacagtaacgttcaccgccaagaatcaggagcatccaacacaaatcccaaggtatcattgcctccgataaagagcattttgcgacaaattgataattttaacagtgctccttcttacttcagtaaataa

SEQ ID NO: 79824 - DNA, 183 bp, Saccharomyces pastorianus
atgaattacctgcgagatagatttcctccggataatgaccaaagaccctttagatgtgaaatttgttcacgaggtttccacagacttgaacataaaaaaaaggcacgtaagaacgcatactggcgagaagcctcaccaatgtaccgttcagggctgtccgaaaagcttcagccgaagcgatga

SEQ ID NO: 79825 - DNA, 555 bp, Saccharomyces pastorianus
atggattcaaagtctacaattggggttgagtttgccaccagaactttggaaattgatggcaagaggatcaaggcgcagatttgggatactgcgggccaggaacgttacagagccattacttctgcttattatagaggagctgtaggtgccttgatcgtttacgatatcagtaaatcaagctcatatgaaaattgtaatcattggttatcagaattaagagaaaatgcagatgacaacgtcgcagtggggcttatcggtaacaagtctgatttggcccatttacgtgctgtacctacggaggagtccaagacttttgcacaggaaaatcagttattattcacagaaacaagtgctttgaacagtgaaaacgtggataaggcttttgaagagttaatcaataccatctatcaaaaggtcagcaagcatcaaatggaccttggtgactccagtgccaacgggaatgccaatggtgcgtccgctcctaatggaccaacgattagtctgacaccaacaccaaacgaaaacaaaaaggcaaatggaaataactgttgttaa

SEQ ID NO: 79826 - DNA, 264 bp, Saccharomyces pastorianus
atgagtagcgaggactacgggtatgattacgacctactatttaaaattgtactgatcggtgattccggggtagggaaatccaatctattgtcaacgatttacgaaagaacgaattcaatatggattcaaagtctacaattggggttgagtttgccaccagaactttggaaattgatggcaagaggatcaaggcgcagatttgggatactgcgggccaggaacgttacagagccattacttctgcttattatagaggagctgtag

SEQ ID NO: 79827 - DNA, 1248 bp, Saccharomyces pastorianus
atgttaatagacttgcaaaaatctccgacgaataataatccgaggatacataaacataggagaagcaggagcgttcataatattgatgacatttccttaaatttcgaggcaacctccacaccaccagctccgacctctgctccgtcaattcctgttgaacattctaacccatgtacttccattgaaatacctaagagatcacccttacggttcacgtcatctccaaaaacatctgatattcctcctgaagctcaatcacctaaaaatgggtccttcctccaagaaatctcggtaccttcgattcaaattataccagatgaaagtatctctcatacaagagaaccatcaccatcacttattgaatgcccagaggatgaaaacgaagctttttctactgaagttgctgaccattctattgcaataattagtgaaacaaaaagtgttccatcgatagagccattcaaaccgctatcttcattcaattcatttggtcaagaaattcaaaacaaggaaccaactcctttgaaccaaactcctacagacttaattggtaaacaaagaaactgtgtgaatccgcattcaattccatttagcgttttatcttccaatagccaatcgtcacaatcgggtagtagtaaatcttcctacaattctgagttttcttccaatactgccattacggatacaacatctcaaccttctgtgaccattaacaggtcaactttagaacataactttatagaagaaaaacgatcaattaaaaatttaggtcatggtcctccatcccagaagaacaactattcgttccccaggaataagaatactccttcaaatagacacgatttggaatttaataccatttacgaaaaaagagatggtaaaatggttgaggttattcttttagatcaggatgaagatgtaggcctcaaaaataacgatatatcacgaacaagagtctgccatgctcaaaaagctaaaaatgagcaacagaagaaacgtctaagccattgcaacgaaattttgggcatgtgtgataaaactgcagatgatgcaaaaagaattatttatcaactggtaaatgagaagcataaattctcagaaaaaggacaacaaacaaagccaaaaaaatcaagagtacttccgccgttgccttttccactgtatgatgaaaaagggaattgtttgatcccgaacaagtatcagtccagtattcataacgacattccatctcatcgcaaactaaaataa

SEQ ID NO: 79828 - DNA, 630 bp, Saccharomyces pastorianus
atgctaccactaataacgttattctacttaaaacgagcaaaacaaaaaaaaaccaagacaattgaaaacgcaatggatgcattcagcttaaagaaggataatcgaaaaaaatttcaagataaacagaaattgaaaagaaaacatgccacacccagtgatagaaagtaccggctattgaaccgccaaaaagaagagaaagctaccacagaggagaaagagcaagaccaagaacagcccgccctgaagtcaaacgaggacaggtactatgaggacccggtactcgaggacccggattctgcagtcgctaatgcagagttgaacaaggtgctaaaagacgtcctcaaaaatcggctccagcagaacgacgacgccacagcggtcaataatgttgctaataaagatactttgaaaatcaaagacctcaagcagatgagtacggatgagctcaatcgttggctcggacggcagaatacaacatcggctataacagcggctgagcccgaatcattagtcgttcccattcacgtacaaggtgatcatgatcgtgcgggcaagaagatcagtgccccttcgaccgatctaccggaagaactagagaccgatcaggatttccttgatggactgctctaa

SEQ ID NO: 79829 - DNA, 1674 bp, Saccharomyces pastorianus
atgatgaagttgcaacaagataaggatggtctttcagatcgtgttgtcactggtgttttgagttcattggagacttcccgtgatatcaagctatcttctgtttctttactgttccacggtaaagttttgatccaagattctggtttagaattaaactacggccgtagatatggtcttctgggagaaaatggttgtggtaagtcaacattcttaaaggctcttgctactagagaatatcctattcctgagcatattgatatttatttattggacgaacctgcggaaccaagtgaattgtcggccttggactacgttgtcactgaagctcaacacgaattgaaaagaatagaagacttagtcgaaaagactatcttggaagatggtcctgagtccgagttattagagcctctatatgaaagaatggactctttggatccagacacctttgaatctagagctgctatcattttgatcggtctaggtttcaacaagaagaccattttgaagaaaaccaaagatatgtctggtggatggaaaatgcgtgttgcgttggcaaaagctcttttcgttaagccaactctattattgttggatgatcctactgcgcatctggatttggaagcttgtgtttggttagaagaatatttgaagagatttgacagaactttagttttggtgtcccactctcaagatttcttgaacggtgtttgtaccaatatgattgacatgagagctcaaaaactaactgcttacggtggtaactacgattcttatcacaagacaagatccgaattggaaaccaatcaaatgaaacaatacaataaacaacaagaggaaatccaacatattaaaaaattcattgcatctgctggtacttatgctaacttggtgaaacaagctaaatctagacaaaaaattttggacaagatggaagcagatggtttagtccaacctgtcgtccctgacaaagttttctcatttagattcccacaagtggaaagactgccaccaccagttttagcattcgatgatatttcatttcattatgagagcaacccatccgaaaacttgtacgaacatttgaactttggtgtcgatatggactcacgtattgcccttgtcggaccaaatggtgttggtaaatccacattgttgaagattatgaccggtgaattgaccccacaatctggccgtgtttctagacatacccatgtcaagttgggtgtctactcgcaacattctcaagatcaactggacttgacaaaatctgctctagaatttgtccgtgacaagtactctaacatctcacaagatttccaattctggagaggccaactaggtcgttacgggctaaccggggaaggtcaaaccgttcaaatggctaccttgtcagaaggtcaacgttctcgtgtcgtctttgctttattagctttagaacaaccaaatgtcctactattagatgaacctaccaatggtttggatatcccaaccatcgactccttggccgacgccatcaacgaatttaacggtggtgtcgtcgtcgtttcgcatgatttcagattattagacaaaattgcccaagatattttcgttgtggaaaacaagaccgctaccagatgggacggatccattttgcaatataagaacaaattggccaagaacgttgttttgtaa

SEQ ID NO: 79830 - DNA, 135 bp, Saccharomyces pastorianus
atgccaccagtatctgcgtcaaaggccaagagagatgctaagaaagctgaaagagaggctaagaaagccgctgccggtaaaaccatcagaaagctaggtagaaaaaaggaggctgctgctgagaatcggaggtag

SEQ ID NO: 79831 - DNA, 1026 bp, Saccharomyces pastorianus
atgagcaagcataagcatgaatggacggaatcagtggccaactctgggccggcttcaatcttatcttactgcgcgtcctcgattttgatgacagtaacgaacaaattcgtggttaacctggacaactttaacatgaactttgtgatgttgtttgtacaatcactggtgtgcactgtgacgctatgtatcctacgaattgtaggcgttgctaattttcgatctttgaacaggacagatgtaaaaaactggtttccaatttctttgctgctcgtattaatgatttatacgtcgtcaaagagcttacaataccttgccgtgcccatctacacaattttcaagaatctgacgatcattctcattgcctatggcgaggtcctcttctttggcggaaaagtcacttctatggagttgacgtcatttattatgatggtcctttcatctgtagtggccacctggggcgatcagcaggccattgcaatcaaagcatcatctttggagaatctcgatcaggaacttgttgagtcaaccatctttgtgttgaatccggggtacctctggatgttcaccaattgtatttcgtctgcattgttcgttttgattatgcggaagagaattcggctgactaactttaaagactatgatactatgttttataacaacgttctggcattgcctttgctgctagtcttttccttcattatggaagattggtccacaaagagtttgtctgtgaacttgtccgccgactcactggcagcaatggtcatcagtgggctcatgtccgtggggatatcgtactgttccggctggtgtgttcgtgtaacttcctctacaacgtattctatggttggtgctttgaacaaattgcccatagcgttggcgggattggtgttctttgacgctccaaaaaactttttgtccttcttttctatctttctaggatttctgtctggcctgctgtacgctgtggctaaacagaaaaagatacaacagcaaaaagttctagcagctactcttgagaagtag

SEQ ID NO: 79832 - DNA, 879 bp, Saccharomyces pastorianus
atgaacagccaatcgtataatagtagtaacgcaaattttaatggagcaagcaatgcaaatttgaattctaataacttaatgcgtcacaattcgaacactgttactcctaattttagaaggtcttcaagacgaagtagtacttcatcgaacacctcaagttccagtaaatcttcatccagatctgttgttccgatattaccaaatccttcacctaatagcgctaattcacagcagttcaacatgaacatgaacctaatgaacacaacaaataatgtaagtgcaggaaatagtgtcgcatcctcaccaagaattatatcgtccgcaaactttaactcaaatagtcctctacagcagaatctattatcaaattctttccaacgtcaaggaatgaatataccaagaagaaagatgtcgcgcaatgcatcgtactcctcatcgtttatggctgcgtctttgcaacaactgcacgaacagcaacaagtggacgtgaattccaacacaaacacgaattcgaatagacagaattggaattcaagcaatagcgtttcaacaaattcaagatcatcaaattttgtctctcaaaagccaaattttgatatttttaatactcctatagattcaccgagtgtctcaagaccttcttcaagaaaatcacatacctcattgttatcacaacaattgcagaactcggagtcgaattcgtttatctcaaatcacaaatttaacaatagattatcaagtgactctacttcacctataaaatatgaagcagatgtgagtacaggcggaaagatcagtgaggataattccacaaaaggatcttctaaagaaagttcagcaattgctgacgaattggattggttaaaatttggtatatga

SEQ ID NO: 79833 - DNA, 525 bp, Saccharomyces pastorianus
atgcaagacgaccccgaaaattcgaagctgtacgacctgctgaatagtcatctggacgtgcatggtcgaagtaatgaagagccgagacaaactggtgacagtaggagccagagtagtggcaacaccggtgaaaacgaggaggatatagcatttgccagtggattaaacggcggcacattcgactcaatgctggaggcactgcccgatgatttatattttacggacttcgtgtctccttttacagcagctgccacgaccagcgtgactactaagacggtcaaggacaccacaccagctaccaatcatatggatgatgatattgcgatgtttgattcacttgccacaactcagcccatcgacatagccgcatccaaccaacaaaatggtgaaattgcacaactttgggactttaacgtggaccaattcaacatgacgcccagcaactcgagcggttcagctactattagtgctcctaacagctttacttccgacataccgcaatacaaccacggttccctcggcaac

SEQ ID NO: 79834 - DNA, 348 bp, Saccharomyces pastorianus
atgtcgtccacgtccctggccaatttcaaaagagctgcctcagtatcttccagtatatccaatatggaaccatcaggacaaaataaaaaacctctgatacaatgtttcaattgtaaaactttcaagacaccgctttggaggagaagcccagaggggaatactctttgcaatgcctgcggtcttttccagaaattacatggtaccatgaggccattatccttaaaatcggacgttatcaaaaagaggatttcaaagaagagagccaaacaaacggacccaaacattgcacaaaaatactccaagtgcacctgcaactgcctcaacttcagtaaccactacaaatgctaa

SEQ ID NO: 79835 - DNA, 1341 bp, Saccharomyces pastorianus
atggaattttatgacattttcaaagatttcaatttagaagatttgacatcagaaagtctgaggaagtctcggtatagattgtttcaaaaaagattatatttatactgcaaggatcattctgtcgagctatttggaagaaattatcctgttttattgaatcaaggttcatttgaaggctggccatcaactgtcgcaatcatgcactattttcaccccattgtccaaccatattttgatgaagaagttctcagtgataaatacataaatatggctggaaacggacactacagaaacttaaatttcaatgaactgaaatattttttacaaagtttgaatttgcctcaaatttctagcttcgacaagtggtttcatgattctatgcacgagatgtttctattaagagaatttttatcaattgatgagtccgataatataggtaaaggtaatatgaggattaccgaagaaaaaattatgaacatagatggtggaaagttccaaataccatgttttaaaatacggtatacaacattcttgcctaatatacccatttcttctcaatctcctttgaagcgcagtaattctcccagtagaagcaagagtcccacacgacgtcagatggatataatggaacacccaaatagtctttggttacccaaatacttgatacctcaatcgcatctattagtaattcaatattatgagacacagcaacttatacagaaagaaaaagagaagaaaggtaaaaaatcgaataagtctcggctaccacggaagaataacttggatgagtttttaagaaagcatacttcgccgattaaaagtatcggaaaggtaggcgaatcgagaaaggaaatcctggaacctgtgagaaaaaggctttttgtagatacagacgaagacactagtctggaagaaataccggctcccacaagactgaccaccgtcgatgaacacagcgataatgacgatgattcgttgatttttgtagatgagattacaaacagccaaagcgttttagatagttcacccggtaaaagaattcgggatcttacacaggacgaacaggttgacgtttggaaggacgtaatagaaatatcaccaataaaaaagtcaagaactactaatgctgagaaaaatccgcctgagtctggtttaaaatcacgctcaagcatcacaatcaatgctcgccttcaaggtactaagatgttgcctccaaacttgactgccccaaggttagaaagagaacactcctctgtccttgaccaacttttcacagacgcacaagatacagtcgaccggtttgtagcctgtgacagtgatagcagtagcactattgaatga

SEQ ID NO: 79836 - DNA, 894 bp, Saccharomyces pastorianus
atgggtgtctcacaaatatgggaatttttgaagccatatctgcaagattccagaattccgttgagaaagtttgtcatagactttaataaatcgcaaaaaagagctccaagaatcgcgatcgacgcatatggatggctatttgagtgtggatttatccaaaatatagatataagcgccagatctagatcaagatcaaggagtcctacccgttctccgcgtgatagtgatatcgacagtagtcaagaatattatggtagcagaagttatacaactacaggaaaagctgtgataaacttcatatctcgattaaaagaactactgagtttaaacgtcgaattcttgcttgtatttgacggagttatgaaaccctctttcaaaaggaaatttaaccacgaacagaacgctactacttgtgatgatgagaaagagtactattcaagctgggaacagcatgttaagaatcatgaagtttatggcaattgtaaaggattgctagcgccatctgaccctgagttcatcagtcttgtacggaaattattagacttgatgaacatttcatatgtaatcgcatgtggggagggagaagcccagtgtgtttggctgcaagtttctggggctgtagatttcattttaagtaacgattcagatactctcgtatttgggggagaaaaaatcctgaaaaattactcgaaattctacgatgattttggcccaagttcaataacttcccacagtcccagtagacatcatgatagtaaagaatcttttgttactgttatagatctacccaaaattaataaagtagcagggaagaagtttgatcgcctgtctctcttatttttcagcgtgctattaggtgccgatacaattcgtggagtcacgggtgttgggtag

SEQ ID NO: 79837 - DNA, 831 bp, Saccharomyces pastorianus
atgtttggaaaggaagatgaggagggtacagcagccactgaaaccgaaaaagcagatgagagcactgatggtggaatgattaagcatgacactaataaagctgaatctttgaaaaaagataaattatcgaaggagcaaagagagaagctaatggaaatggagaaaaaaagacgggaagatatgatgaaacaagtcgacgagttggcagaaaaactgaacgaaaaaatctctaggtacttaattgctgtgaagtccaataacttggaggaatttacgcgaaaactagatcaagaaatcgaggatttgaaattagaaagttttggtctagagttattgtatttattggccagggtttacaagacaaaagcgaataattttatcatgtccaagaagacttacggaatttctaaaatattcactggtacacgcgacaatgctagatctgttaaatcagcatataatttattgtctacaggcttagaagctcaaaaagccatggaaaaaatgagtgaagtcaatactgacgaactggaccaatatgaacgtgccaaatttgagtccacaatggctggtaaggcacttggtgtcatgtgggctatgtcgaaatttgaactggaaagaaaactaaaagacgtttgcaataagattctaaacgataaaaaggttccttccaaggaacgtattacaaaggcaaaagcaatgctgtttattgcccacaagtttgccagtgctagaaggtcaccagaagaagctgaagaagctagagtttttgaagagctaatcctaggtgagcaggagaaggaacacaaaaaacatactgtggccagataa

SEQ ID NO: 79838 - DNA, 246 bp, Saccharomyces pastorianus
atggtaaaggagacggagtattatgatattttgggcatcaagcctgaggccacgcccactgaaatcaaaaaggcctatcgtagaaaggctatggaaacacatccggacaagcatcctgatgacccagatgctcaagcaaagtttcaagccgtaggcgaggcctaccaagtcttaagtgatccagggcttcgttccaagtatgaccagtttggtaaggaggatgctgttcctcagcaaggattctga

SEQ ID NO: 79839 - DNA, 528 bp, Saccharomyces pastorianus
atgagtccattattaacagtgttacagtttctaaccaaaaaggcaaggttctacacaaaacttcggatgttcaagatgaatgccaccacaggcataaaaattcaaaatggtatgcaacctatcatcaagggagcagtaagctccacatttaaacgtgctctatacaatttcggtatcaaagaaaagaagagtgtcaatattgaaatggggagaacgcaacaaactaagaaaatcgatcagtctttgtccaaaaaacttcccaaaggtactatctacgatccatttgacttctctatgggacgaatccatttagatagaaaatatcaggcaaacaagaactcaaacaggaacgatataatgaagtccggtgcaaatccactagaattttatgcaagaccaagaatactttcaagatatgtgacctccacgggaagaatccaacatagggatatcacaggcttatcggcaaagaatcaaagaagactatcgaaagccattagacggtgccaggcaataggattaatgtga

SEQ ID NO: 79840 - DNA, 234 bp, Saccharomyces pastorianus
atgttctattatgcctttaaattgcattgtagggtaacctgttgggggaaaaaatatctaggattactttacatacttaaatatgagtccattattaacagtgttacagtttctaaccaaaaaggcaaggttctacacaaaacttcggatgttcaagatgaatgccaccacaggcataaaaattcaaaatggtatgcaacctatcatcaagggagcagtaagctccacatttaa

SEQ ID NO: 79841 - DNA, 663 bp, Saccharomyces pastorianus
atgccaccatcaaaatcaaataaaaaattcgttaatggtggcggtgctcatgaaatttcagatcgtaattcaaaaaattaccatgttgttggattatacagcaagaacttccccattttaagcaacaagaatcctaaaagtttaaagctgaacatttttatcaatttatcacaaaataagaaagtttttctacaagaattgtcattatacatccatagagacaacaattacttttcaaattcctcctcatttaataatattcccaatagccacaatggtaatgactgtaatggtgtggccaagggttataacgctggctgtacaagattaattgctggaaggatactagtgaaaaacattttatatgataaaagagtggtggtacgatatacgtgggatagttggagaacaacacatgaagtggaatgcgtttacatcagtgatggcgatggaatattgccgggcactaacatggacattttccacttcattatcgatgatgccagcaaagtggatcctcgcggcaagttagaattttgcattcattattctacacgtaacgactatgagcgcgaagagtactgggacaacaacaacgggaataattataaggtggatgttgtaatggatggctttaacgatcccttcacggcggcagcatga

SEQ ID NO: 79842 - DNA, 843 bp, Saccharomyces pastorianus
atgtatataaaggcagaacagaaaccccaacagtttgagaggaagagtgaaaaactagacagaaataaaaaccagcagctaccagatcttgaaacagatttcaagggttacagagtgaattcggacctatacaacaaagaacgagatgggagtacggaagagactttaaactctttgaagtttttacataaacctcagagagtaactcaaatgagagcgaacaggttcccagaggaagaagtacaaagaaacactgatttaaacaaaagaattttctccgcagggaatgatgaaaacgttgataatgagagcggctggtcaaaaattgccgctgccaagaatcacacttccgtagaatcattaaatggcagtacgagacccccattcaaaatagagctgcctcccctttcccccaaatccaccgtaccaaaatcttttcaagcagaatatcccgaagctaagtcacctggcaatgatatgaattttgaatatgatgaagaaattctaattccatttgcgccacctgtatataaaaagtcaggtgaactattgaagagctcattgaagagaagatcaaaatcattacctacaaccccaggtataaggagcgggaatggtgtccaagcaagagacggtagtccgatgttgattaggagtaagagtgttcactttgatcaggcggcacctgtaaaatattttgctgaggatgaaagccctataaacgttaataaaactgaacaacacgataattgtctaagctttaagcataagccagtgaatttaatggtggacccggaagaagagacaaaaatgctatcatctggattagaaacgactccatag

SEQ ID NO: 79843 - DNA, 729 bp, Saccharomyces pastorianus
  modified_base (5)..(5): a, c, g, t, unknown, or other
atggnggaagaacatgattatccattagtctttcatacccctgaggagaacccatattttgttggtgttttaagaggacatacggcgactgtaagaactgtctcaggccacggtaatattgccattagtggctcctatgataatacattgattgtgtgggatgttgcgcaaatgaaatgtctatatatcttgagtggacatacggatcgtatttattcgacaatctacgatcatgaaagaaaaaggtgcatctctgccagtatggataccactattagaatctgggatttggaaaatataaggaataatggagaatgttcctacgcaacaaattcagcatcgccatgcgccaaaatacttggtgctatgtacactttgcggggtcacagagccctagtcggtttattgggattatccgataaatttttagtcagtgcttctgcagacggttcaataaggtgttgggacgctaacacttactttctgaagcactttttcgatcacacgcagttgaatacaatcaccgcattgcacgtttctgatgaggtattagtgagtggatctgaaggtttgctcaatatttatgatttaaatagtgggctgttagtccgttcagatacattgagtggtgctgataatgtttggaacgttagttttaaggacaacacacttgtggcagcggtagaacgagacaagcgaaatcttttagaaattttggactttagttga

SEQ ID NO: 79844 - DNA, 753 bp, Saccharomyces pastorianus
  modified_base (105)..(105): a, c, g, t, unknown, or other
atgcttgattttaccagacgattaggattaactgcaaatggtactgtacctgagtccttcaacaagcgtgatgctactgaataccctaacattatcagtaatatnactacccaagcagccaacttcactcagcatattctcgtcgagcaacttcaaaatgacgtcacggcaataagtatcagtaatgccattaatgtagccgtcgatggttctgtggaaacaccagcagacctgcaatacaaccgcaaccaggaaacaggtgaatctaccctctgtagagccaagttttacggagtggaggtaagaacttggtctaggttgtacaatagggccgtctcttccacaactcttacgactaatttgaacagctacatagcgcaatgggtagcatgggccgttcacgggagcggtgacaagaagttttgcggcagccaggagttcacgaatatcttttttgatgggcaagagggttggagtttgtttgtcaagacgtggtcaacaaacagtagctgtgatattacagcctctgaaggaaatttaacatgtgctgttcgtgtttcaatatccagtatgcacaatcacggcaagacagcgttttgtgttacctatagccacggtgattcttggcgtgccgagctgagagtagttgccaatgatgcttggtctcattattatccctggagtattgactgtccagaagttgataaaaataatatggctattaatgattgttttgatcaggcgcaaggttaa

SEQ ID NO: 79845 - DNA, 297 bp, Saccharomyces pastorianus
atgcgcataacaataagatcgcataaaaaaatgagacggtatagtatcctgaggtcatttttctcccttggattgattgcttgcttttgtatctttcttataatagttctttcagaagagcccaatatgcggttattatataagttaagttacggctatgtgaagattttgaataatgtaaaactgttagaaagcattgcctcttgtataagatgtggtcgcattacttcagttaatgacttgaaccagtttgtttttcaatccacggctgtattcttcactaataaaaccgattag

SEQ ID NO: 79846 - DNA, 1008 bp, Saccharomyces pastorianus
atgattcttgcaccaaattccgtgtcaaacatattcaatgtcaacaatagcggcagtaacactgcttctacttctaataccaactcaagaagggaatctgtcatcaagaaggaatttcagcaaagattaaacaacttaagtaacagtggaggccctacctccaacaacgggcccattttccccaactcttatacctttatggatctcccacattcttcatcggtgtcatcgtcatccactttgcataagtctaaacgaggttcgttttctggccattctatgaagtcatcgtgtaatccgactaatctatggtcaaaagatgaagacgctttgctaatggaaaacaaaaagagaaacctatccgttatggaactatccattcttttgccgcagagaactgaggtagaaattcaatggagattaaacgccttgtcaagtgatgcggatatgttgtctcctacacattcacctcaaaaaactctgtccaagaaaactcgtccaagaatgttcaaaactggttctaccactgatgatgacaaaggtagcgacaaagaggacgttatgagtgatggtagtaacgatgatgacgaagataatgtagacccgctgcatcgtgctaaacaatccagtaacaagactgtcttttcatccagcagttccaacatatcctccaaagacgtttcaccggatccgatcttttcaccggatcccgcagatgattcatcgaatacttctgatgatggttctaggtgcaccataacctccgataccagctcctcggctgcaaccatgaatcgcacccctaattccaaaaacccgcaagatattgctttgttaaacaactttcgttctgaagccattactccgagaccgaagccttcttccacaactacatccatcactaccgaaaacaccaataacatgataaaccattctagttctacaactactaccacaaacaacagtccgctgccaagcataaacactatcttcaaggatatgctgtga

SEQ ID NO: 79847 - DNA, 285 bp, Saccharomyces pastorianus
atggacatagacgacacggacgctgacacagatgcagaaaatcttgacccttccagccaatccaagagcaagacctccggccccagtgatctagcatccttggaggcgctacttggtgctacaggaggagtgaagacagacagcaacgggaacaaagtcacctacactcttccccagtctgccttggcccaactgctccaaaccataggccatgacccggcttcctcccatcccgagaatgacagtaacactgaccacaaggccggccgttcccacttgcaatga

SEQ ID NO: 79848 - DNA, 987 bp, Saccharomyces pastorianus
atgggacaaattctatcaaacccggtaattgataaagagagccactccggtgctgactccttgaccgcgtttggactgtgtgcaatgcaagggtggcggatgtcaatggaggattcacacattctagagcctaatgttttgacaaagtccgataaggaccatattgcattttacggtatattcgatggtcatggtggcgctaaagtagcagaatactgtggtaataaaatagtggagatcctgcaagagcagaaatcgttccatgaaggaaatttaccaagggctttgattgatactttcataaacacagacgtgaaactgttacaagatcctgtgatgaaagaagaccatagcggatgtacggctacatccatattagtatcaaagtcccagaacttgttagtatgtggtaacgctggtgacagtagaaccgtactcgccaccgacgggaacgcaaaggcattatcatacgatcacaagcccactctagcaagcgaaaaatcacgtattgtggcagctgatggcttcgtagaaatggatagggtcaacggtaacttggcgctctctcgtgccattggtgattttgagttcaaatccaaccccaaattgggccccgaggagcaaatagtgacatgtgttccggacattctcgagcattctctagattacgatagggacgagtttgtaatcttagcctgtgatggtatctgggattgtttgacttcccaagattgtgtggacttggttcatctcggccttcgcgaaggcaagacattgaatgaaatttcttcgcggatcatcgatgtctgttgtgctcccaccacagaggggacgggtattggatgcgacaacatgagtatagtggttgtcgcgctgctgaaagaaggtgaagacgtcgctcaatggagcgaccgtatgaagtccaaggcccaccgcacatcagtgcgttcttttgcagacaagagaagaagggtgtttagttactaa

SEQ ID NO: 79849 - DNA, 228 bp, Saccharomyces pastorianus
atgtcagcgttaacgtatgtatccgccgcttcaataggtacgttcagcacattgatattcggcttttgttgggcacttgacatttcaaccgcaagagagtttgtatttaagactagagagttcatgggcgttccacaagccttagaaaccgacacgagcatggacgaagaaacctccaaactaaccaagcaattgcaagacctcctgtcgagcgaaaacaacaagtag

SEQ ID NO: 79850 - DNA, 180 bp, Saccharomyces pastorianus
atgatcgaagagaagaaggaacgtaagaaacgcagggttcttcaaatggccagattttatggtgcggccgccttcaccctgattaccatgaggcttatctccagggccataaaagtacgaaaatgtatgtattttgtcctagttcagtggcaaaaactaataataggatatagttactaa

SEQ ID NO: 79851 - DNA, 1308 bp, Saccharomyces pastorianus
atggatatcgacgcttcgccctcattgattgaaaaatataactcttttcccacaagaaagattcttcctgagcaggacgagtttgagaacgacgttgaggacgatgcttcttcctcactgaaggaaaaatcacaaggttcttgtgaaattgaaattgcttctgaaatttcatccgaaattttaaatggcacatcggcagacggtaattccgagtttcacgacttcgctgagccccctccctctcagaatgaatctgtcgctctgtcttttagtcaatcgaatgatttggactttttgaataatccaagcggatcaggctcttcaaacgatatcaatagaagcacgagttccatttcacttcctagacatgtgtcactagattttaacgtttacaatagtctttgcctcacaaatgaggtgactgcatcagaatcacataatgtggccaaatttcaccttggcaaggaaaacaagaagagcttgctaccaagatggaaaaccattgaaatgtacggggaggtagttaagaaaactcaagacatatattctaattttcagtatgcacaatacattttaagggtagggttggataccgaaaaactacacgaacttgttaaggaactggaggatgaaagcaatagcttcactgtagattctttaaaggaatatttagtgaacgatgccaaagttattttgaagaaactaagtgccgttggataccctgatgcacagtaccttctaggtgacgcctactcctctggagttttcggtaaaataaagaatagaagagcatttcttttattctccgctgcagccaaaagattgcacatcgaaagtgtttacagaactgccatttgctatgagtgcggcttgggtgtaaccagaaatgcaccgagggcggttaactttttgacttttgctgcaactaagaaccatcctgcagcaatgtacaaattaggagtatattcgtatcatggtttgatgggtcttccagatgatattctaaccaaaatggatggttatagatggttgcgaagggctacatctatggctagcagctttgtttgtggtgctccttttgaattagccaatatttatatgacgggatataaagatcttatcatttcggatccagattatgctatggcattgtatgagaaggcggcggctttagggcatactgaatcggcaagaatactagaagacgctcgcagaagtggagggtttgtttcgcgaggacatcctccttcggcacagaaatatcataaaacctcccatgaagctgtggcagccaaaaagttgatttaa

SEQ ID NO: 79852 - DNA, 744 bp, Saccharomyces pastorianus
atggaattacttatcttaattcacgcttgtaagacggcatcagtcagaagaattacggcagtaataccaaatttcccttatgctagacaagataagaaggataaatcgcgggcgcccatcactgcgaagctgattgccaatcttttggaaactgcgggttgtgatcatgttattactatggatctccatgcttcacaaattcaagggttttttcatatcccggttgataatttatacggtgaaccaagtgtgttgaattacataaggaccaaaacagatttcaataatgcgatactggtatcgcctgatgctggtggtgcgaaaagggtggcttctttagcggacaagctggatatgaattttgccttgattcataaggagaggcaaaaagctaatgaagtttcgcgaatgctgcttgtcggtgatgttgctggtaagtcatgcttgttgattgacgatatggctgacacgtgtggtacgctggtgaaagcttgtgacacattaatggatcacggtgctaaggaggttatcgctattgtcacacatggtatattttctggctcagctagggagaagttaataaatagtaggttatcaagaattgtttgcaccaacacggtacctgttgatttggatttggacattgtcgatcaggtggatatcagccctacgattgcagaagctatcagaagattgcataatggagaatcagtctcatatttatttacacatgcgcctgtttaa

SEQ ID NO: 79853 - DNA, 144 bp, Saccharomyces pastorianus
atgtctacaaacagtattaagttgttagctggtaactcacatcctgggcttgctgagcttatttcccaaaggcttggtgtaccgttatctaaagtgggggtatatcagtattcaaataaagagacgtctgttacaatagggtaa

SEQ ID NO: 79854 - DNA, 411 bp, Saccharomyces pastorianus
atgaccagtgatgaagccacgacaggatcaattacaacatcagaccatcagaagaagacattagcaagaaattccataagttataacacttttcaaaatgttagattcaaattgatttttccggaagttgtacaggaaaatgtagagacattagaaaagagaaaattggatgagggggatgcggcaaatacaggtgatgaaacagaagacccttttacaaaggctgcgaaggaaaaagtcatctcgttggaggaaattctagaccctgaagacagaatacgcgctgaacaagcgttgagacaatcagaaaataattccaagaaagatggcaaagaacctaatggtagttcttcaatggtttatattggtatcgctatttttttgtttttggttggcctttttatgaaatga

SEQ ID NO: 79855 - DNA, 324 bp, Saccharomyces pastorianus
atggctacaaagcaggctcacaagagattgacgaaagagtacaagttgatggtggaaaaccctccaccatatattcttgctcgccccaacgaagataatattttagagtggcactatattatcacaggacctgcggatactccttacaagggcggtcaatatcacggtactttaactttcccgtctgattatccatacaaaccaccggctatcagaatgataacaccgaatggacgtttcaagcccaacacacgattatgcctttctatgagtgattacaccctgatacttggaatcctggctggtctgtctcaaccattttga

SEQ ID NO: 79856 - DNA, 750 bp, Saccharomyces pastorianus
atgccatcattggaatcgccttcttcccttctgccgatacagatgtctccactaggaaagtactcaaaaccgctttcgcagcagatcaacaaattaaatacaaaagtttctactctacaaagaataatgggtgaagaaattaaaaatctggacaacgaagtagtagaaaccgaatcctctatttctaacaataagaagagattgattacaatagcacatcaaatagaggatgctttcgattccgtatcaaacaaaactcccataaattcgatatcagatttacaatcaaggattaaagaaacatcgtcaaagttgaattctgaaaagcaaaattttattcaaagcttggaaaaatctcaagctttaaaactggctacaattgtccaggatgaggaatcaaaggttgatatgaatactaactcaagttcacatccagaaaaacaggaagatgaagagccaattccaaagtcaacgtcggaaacttcttctcctaaaaacaccaaagcggacgccaaattttctaatactgtacaagaatcatatgatgtaaatgagacgttgagactagcaacggaactaactattctacagtttaaaagaaggatgacaacattgaaaataagcgaagctaaaagcaaaattaattcatcggtgaagttagataaatacagaaacttgattggtatcacaattgagaacattgactcaaaattggacgatatagaaaaggatttgagggcaaacgcataa

SEQ ID NO: 79857 - DNA, 114 bp, Saccharomyces pastorianus
tcccgtccactagctcggtttagttgtgaccagctgctgtacttgggtcgcgctgcctcctccacacgggtctatgacagtatagccgatgagttttcatccctatatttttaa

SEQ ID NO: 79858 - DNA, 348 bp, Saccharomyces pastorianus
atgaactgtgctgacaacagtggtgccagaaacttgtacatcattgccgtcaaaggttctggttctagattgaacagattaccagccgcctctttgggtgacatggttatggccactgttaaaaagggtaagccagaattgagaaagaaggttatgccagctattgttgtccgtcaagctaagtcttggagaagaagagacggtgtctttttgtacttcgaggacaatgctggtgtcatcgctaatcctaagggtgaaatgaagggttctgccattactggtccagtcggtaaggaatgtgccgacttatggccaagagttgcttccaactctggtgttgttgtttaa

SEQ ID NO: 79859 - DNA, 183 bp, Saccharomyces pastorianus
atgcactttgctactaaaaccattctattcaccttgcgaaaacaacaagcgaaaaaaaaaagcgagggcgaaagagtaagatcaccacgcacgtttaggggatcggagagcttatctatacagcaactagaagtatatagaacaacaatggtcgaacgatgggttagtttcacagctcaataa

SEQ ID NO: 79860 - DNA, 267 bp, Saccharomyces pastorianus
atggtttggtctgaattgttggaaatactagcgtattctgtcgattgctccgttaatggagacttatacaccaacacgtcaggggaaatttcaacagcagacatacttaggttcgcggagattgtagaatacccttctgctacactattaacacagaatgtgcgtcaaaccacaccacacaataaacaatgcactttgctactaaaaccattctattcaccttgcgaaaacaacaagcgaaaaaaaaaagcgagggcgaaagagtaa

SEQ ID NO: 79861 - DNA, 213 bp, Saccharomyces pastorianus
atgttatcattatccaatgagagtgaccatagtatgacagaaacatctgatgatatgttctcaaattctggtaattgggattgttcttcagcaaatactgttagcgaaggtagattgaatgatgaccaagaggatgtcgtcttcacaaagaggatgtattctgtaaatgatgtgcatttaagtggatctactattgatactactgtggtctag

SEQ ID NO: 79862 - DNA, 1380 bp, Saccharomyces pastorianus
atgcaagataccaaatactacgaaccaacaaatatttttcgtcagcctgctattaatataaagaagagatcagataaaaagaggattttacaatcgatgatgactttatccacgtataaaaaaacgtggcaaaacaatacttcgaaaatgaattcaccgattttgcgaaaagcatcagacaacttcaatgactattatacaactaaaaaattaaaatcagattattggaaactgtacggtgttgatgaaagtgagttatccataccttcagacatgtccattgtggataatatacttctagtatctacaatgaacgagaaagacaacttgaaactttttgaaatttccgctgagaaaaagctgaaggaactacagacgattactgttcccggtaaacccattacttgtatctgcttattgcccatggtagattttccgccacagattttccccagctctcaaataaatcctaaccacaaccaattaatattgacaggtcatcaagacggtatagtcaatctgatagcaacttcaacatataagggatgtgctaaaataataaaaaggtttaaccacaacaagtttctaaaatctactgtatcaacgtcgattccgattctggaaataacgccaaaaacagcacctattttgaaggtttcgccatggaacaagactggttttgtttcccttctaaatgactccctctttatatatgacttgaaatcaaatcttgattgcataaaaacacctatttttttgcaatcatatccaggtataaattcttttgccgttaatgaattccatgatcccttcttactggccttagttggctcaaaatttggaccaaatggcatttcgctgcttgatttgagaacaaatctctatattccagatattttagataatagcatatctgcaggatgtggaaaaggccatttgcaaagaaagaacacaagtttggattgcgtatggataagtaatcatcacgttgcacagagcttgaacgataaaattcaaatttgggacattcaatcctgcgacggtaaaccagtttgtgaattatatgctaagaaaggatacattgaaagtctaaaatttaacgaaaaaacaggcgcgttatatagcagtgatgaccaaggctttgtcatttgttgggatttacaaaacctacaaaacatgaaatatggtgagttagtccatggatttaactcaattagcctagatagtgaaagtgaactactattaaccaagcaagtcttccaatgtggaaacattattgtgagtggtatgagtgataaaaatatttgcttgaagagcaatgacactaaggccaatggaaaaggatgtggattttattccttgatatggcaaacgatggaa

SEQ ID NO: 79863 - DNA, 1617 bp, Saccharomyces pastorianus
atggttaatttgcctatcaattcctcatttgcatccttggacagcttctacatagataattttgcgatggctagaatgggaatgagttctccagaagcgggagattcggtttcttctgtaccaaaccttccttctgcaccgtcttcaacaaggcttggacgatcaccagtctttagtggagtcaccaaccaaccaagtccaattcgccccgttttgccacaacaaaagtcatcgttttgtgcaacaggtcggtatgataagagtcacaatagtcttcttagaaattcttcatctcatctaacgtcatacaactccggcagaccatcttcaaggactggccgaatgaattcacgcaaccaaaacttaccgaaaataccaaatagcctttcaaaaatctcaacaacgaaattgactgaactaagagttccaaaggattcagaaatgccatcacctgcaaaaaaccctaacgctgatcatttgagaaggtttcccgtaaagaaaaataccaaaacacccgccataaaagatcctccgagaagaaacattaatagcagcgataagtcaggctccaaaaattctcctataaaatccttataccaacggatgaaacagtctaaggataattcaaaaaccttcgaggtacgtagaggaaactttttcagtcattttaatggagatgatgatgatagcagtagccagtcgtccgtaaccagttctggttcagaatctgattcagaattatcatccacttcatcgtcctgtacatctggaacccaatctcggaatagctccaacaataatgcatattcagaaacggagtcattacctttcgagtttggtgttgattcagaagatggaagtggagtattattaagagatttacctaacgaagatcaaataaggccgtttctggatatacaaccatgtcgacgcatgaaagttaaaagctcattgaacctcgaaccaccttctgtctcatcttcttcatcttcatcctccgacgaagatgagctaattttaaatgtcgggactgcaggtcatcgaagaaggcataattcttcaaaacttagtgaactatccaacagtccgcagaagggatcaaataacttcatgtattccaatggaagtgttcatgacagtgagacgacgataacgccgcaaaatatggatgacctgacgctgcatcgggcactgagccgtagccaacccattagtaagcctggcccattagtattaccaaagcgtttagaccaaaagaaagctacgacggaaacctcaaatttgacagatatcgttgaatttaacggtaataacgatcatcgaaaggacaaaaatttcggtaaagttctttattcaagggacttgttaaaagatgctctaagttcaactaatgcaggcagaaggagatccataccttcaaataaaataagaggacgaaaggacgcaagtattaccatgagtactaatgttggtaatgatgaacatgctagaaataccagctgcaatggtgataaaggacaagaaaacggcgctataaaacaaaggacccatgaaagatcgcgatctttaacagtcgctgaactaaatgaagagaagagaaggagtgcacttccatga

SEQ ID NO: 79864 - DNA, 1560 bp, Saccharomyces pastorianus
atggataggagtgataaaaaagttaacgtcgaagaggtcgatgtaccttcaaacttacaaatagaattagaaaaatcaggcaccagtagcagtgtatcactccgaagcccgactaagagtagcgctaccaatttggcgggcatggccgaaggtgcaagagataatgcatcaatagcgtcttcatcggtagattccctcaacatgctattagagcggcaaagagtaaggcaattaaaccatccacagcaccaacagcatataagtagttcactagctaagaccccgacaacgacttcatcattttgttcgagcgggagttctaagaataaagttaaggaaactaatcgaatatctctaacatacgacccggtgtcaaagaggaaagttttaaacacttatgagatcatcaaagaattaggccatggacaacatggaaaagtaaaattagcaagagatatattgagtaaacaattagtagcgattaaaatagtggatagacatgaaaagaagcagaggaagtttttcacgtttatcaaatcaagtaaaatatccgaaaatgataaaataaaacgagaaattgccattatgaaaaaatgccatcacaaacatgtcgtacaactgatagaagtcctggatgatttaaaatcaagaaaaatttatttagttctagagtattgttctcgaggcgaggtaaaatggtgtccaccggattgtatggaatcagatgctaagggtccctctttactaagttttcaagaaacgcgagagattttaagaggcgttgtgctcggcttagaatatctccattaccaaggaatcattcaccgagatattaagcctgccaacttattaatatcaggagatggcactgttaagatttccgattttggtgtttctttagctgctagcagcacgaatagttccgatagtagcgaatccttagacgagttagaattagccaaaacagtgggcacgcctgcattttttgctcccgaaatgtgcttgggtgaagatgcattcaccaggtataacttaacaaaggaaaatttatttcgtggttcttgcatctcattcatgatagatatttgggctgtgggtgtgaccttgtactgtcttctttttggaatgctgccttttttttctgattttgagctcaaattatttgaaaaaattgtaaacgacccgttaaaatttccaacatttaaagaaatacagtccaacaaggtatctaaagtatcttgtgaggaggaatacgaaatggcaaaggaccttttattgaaattgttagaaaaaaatccccaaaaaagaatgactatacctgccattaaaaaacatccttttgtttcatgggattttgaccacgtaccggagaacaatgaaaagttactatcttctgtccttgagcaaaaattacgtttccaatgtaaccaaactgatcaatttgaacccatttctatttcaaagcacgaattgaaaaacgctgtctccggtgtcgggaaaaaaaatcaaagaatccgtactaaaaagtatcccgctaaaggatccgtcagatctctctaa

SEQ ID NO: 79865 - DNA, 429 bp, Saccharomyces pastorianus
atgcatggtggtctctcaccagatttgaatagtatggaacagatcagaagggtgatgaggccaacagatattcccgacgttggcttattatgtgacttgttgtggtcagatccagataaagatatcgtaggttggagtgaaaatgatagaggtgtttctttcacttttggtcctgatgtagtgaacagatttttacagaaacaagatatggagttgatttgcagggcccaccaagttgtggaagatggttatgaattctttagtaaaagacaattggtgacacttttcagtgctccgaattattgtggtgaattcgataacgctggtgcaatgatgagtgttgatgaaagtttattatgttcttttcaaattttaaagccagcccaaaaaagtctaccaaggcaagctgggggtagaaagaaaaaataa

SEQ ID NO: 79866 - DNA, 186 bp, Saccharomyces pastorianus
atggactcacaaccagttgacgttgataatatcatcgatagattattggaagtaagaggatctaaacctggtcaacaagttgatctagaagaaaatgaaatcagatacttatgttcgaaagccagatctatattcataaagcaacccattttactagagttagaagccccaattaaagtatgttaa

SEQ ID NO: 79867 - DNA, 393 bp, Saccharomyces pastorianus
atggatgtcctggctaagttgatcatttcaaagcaaaaagatggatcacaattacaagttgagtacgagcataagttgaaagaattggagaaattcattaacctactactgggattgcatgaaagcactgtgggaagtataatgaatactagtgttcttgacatggtactgcggaatggaatagagatcatagaaaaagacgatcaaaaatatgccctgataccgattaaagcaaaggaagaggcagataaaactacgagcactattcagggagtaaccagcaaaaagagtagtaaaaagaaaaaaaataagataaaatgttcattttgtcacgaggctggccacacaagagcacactgcggtgcgagactgacagttatacccaagaaataa

SEQ ID NO: 79868 - DNA, 2253 bp, Saccharomyces pastorianus
atgccaggatataaccatgcaggccctaaagaagatgcaaaccggttgtcaaaggggtttctccgattgaatgaaacagcttttttatattacatgatcgtatatacgctcttggaggatactctaccaagactaaaggaattttcgagcaacaaggaccagaatgttagaaatttgtacggggagagaatccagcttttgcataatgacccaaatattgagcggattcgaaatgtcattgaaaattaccctaaatttatacagttgcaaactatagagcctggaaaattaagttcaatgttgcattttcatggtgacgctctcttgcttatcgatgtacggcccaggtctgaattcgttagggcccatatcaaatgcaaaaacattatatgcatcgatcctgcctcatttaaggattcttttacagaccaacaaattgaaagtgtctctttgatcacttcgccgcactcagatatcactctcttttcaaatcgagacaagttcaagttcattattttatatactgacactcaattgcataataatttccagcaaaggcaaactcgcatccttgcgaagattctttcccaaaattcagtaattaaaccgctgagtgggacgaaaatactcattttggaaaatgggttctcaaactgggttaaattaggtggggcgtatcaatcatctgtcagtgaaacagcgcctcttacatcctcgtcttcaacgccagcttttggtagtccgcaagtcccaacaggcttgttcaatcagaaatctctatctccaaataaagataagagtatgccgatggtatccatgaatacgcagcctttgctaacaacggtgcaaaggcctcaattacccttatactattcagatttgcccattataccgcagccaagccccaacagaaattctcccaccgttcaaaaatttagtccacatccaccaaccactctctcaaaactcaatacaccctcgaccattcaaaataaagcaaacactgtggaaagaatatcgccagatatccgcgctgcacaagcccatgcctatttgccccctgcatcgaatgtattctcgccacgtattccgcctttaccacaacagaacttgtcttcgtcaaggcagaccatcctaaacaactcacaagtgcttgatctagatcttatagtaggattggaaaatataggtaactgttgttatatgaactgtatacttcaatgtttggtgggaacacacgatttggttcgaatgtttttggataacacatatctgaattttattaattttgatagttcaagaggttctaaggggttgctagctaaaaatttcgccatcttggtcaataatatgcacagacacggtgcattcacacctcctaacgtaagaacgataccagttcagactattcagtttaaaaaaatttgcggccatatcaaccccatgtatagtgattcaatgcagcaagattgtcaagaattttgtcaatttttgcttgatggcttgcacgaggatttgaaccaaaacggcagcaaaaagcatcttaaacagttatcagatgaggaagaacgaatgagagaaaaaatgtccatacgcaaagctagtgctctcgagtgggaaagatttttgcttaccgacttcagtgcgataattgaccttttccaaggacagtacgcatctaggctacaatgtcaagtttgtgaacatacctccacaacttaccaaacattctctgttctttctgttcctgtcccacgcgttaaaacttgtaacatattagactgtttccgggaattcaccaaatgcgaaaggttaggtgtcgatgaacaatggtcatgtcctaaatgcttaaaaaagcagccttccactaaacaactcaagattactagattgcctaagaaactaattattaatttgaaacgatttgacaatcaaatgaataagaataatgtgtttgtccaatatccttacttcttagatcttacaccatattgggcgagagattttaatcatgaagctattgttaatgaggacattcctaccaggggccaagtaccaccatttagatacagactgtatggggttgcatgtcattcggggagtttgtatgggggacactatacttcatacgtttataagggaccaaaaaaaggttggtattttttcgatgactcgctttatcgtcctataacgtttagtactgaatttatcacacccagtgcatatgttttattttacgaaagaattttttga

SEQ ID NO: 79869 - DNA, 234 bp, Saccharomyces pastorianus
atgggctcagaacaagccttaagtgaggttgtcgaatctgctaaagagcggttcggcaggcttacgcatttagttcagaagtttcttgatgatgacgacgtgccacaagagtgtctgcctttgctccaagaatgcgcagaaatatggtctagttatgtggacgcatgccaggatataaccatgcaggccctaaagaagatgcaaaccggttgtcaaaggggtttctccgattga

SEQ ID NO: 79870 - DNA, 1452 bp, Saccharomyces pastorianus
atgctcagggcttgtaatgttaacgcacgacttatcatgtcatgtcaaccgccagattttaccaatatgaagattgacacttctttgaatggcaacaatgcgtacaaagatatggtcaagtatccgattttttggtgtgaagtgtgggacaaattctctaagaaatggataactgttgacccagtaaatctcaaaaccattgaacaggtcagacttcattccaagttggcaccgaaaggcgtggcgtgctgcgaaagaaatatgttgaggtacgtgattgcttacgatcggaagtatggctgtagagatgtaactcggagatatgcccaatggatgaactctaaagtaagaaaaagaagaataactaaagatgactttggtgagaaatggttcagaaaagtgataacagcacttcaccatagaaagagaaccaaaattgatgattacgaagatcaatatttttttcagagagatgaaagtgaaggcataccagattcggtgcaggatttgaaaaaccacccatattatgttttagaacaagatatcaaacagactcaaactgtaaagccaggatgtaaagagtgtggatatttaaaagtacatggaaaagttgggaaggttttgaaagtttatgcaaaaagagatattgcggatttgaaaagtgctagacaatggtacatgaacggccgaattttaaaaactggtagcaggtgtaaaaaggtgataaagaggacagttggaagacctaagggcgaagcagaagaagaagatgaaagattatatagctttgaagacacagaattatacatccctccatcagccagtgcgagcggtgaaataaccaagaatacatttggaaacatcgaagtttttgcaccaacgatgatacctggtaactgttgtttggttgagaatcctgtggcaattaaagctgctaggtttttgggggtggaatttgcacctgctgtaacttcttttaagtttgaacgcggcagtacagttaagccagttttaagtggcattgttgttgcaaagtggctcagagaagctattgaaaccgctattgatggaatagagtttattcaagaggatgataataggaaggaacatttgcttggtgctttggagagttggaatactttactgctaaaactgcgtattcgtagcaagctgaactccacatatggtaaaattgccgaggaagaacctaacgttacgaaggaacagaatattgcggacaatcacgataatacggagacttttatgggaggtgggttcctaccgagtatagcaaaccaagaagcaaggccgtatagtgaaccttcagagccagaagatagtttagattatgtttctgttgacaaagcggaggaaagtgctacagacgacgatgtcggggagaattattcggattttatgaaagaactagagatgtcagaggaatcagactga

SEQ ID NO: 79871 - DNA, 1404 bp, Saccharomyces pastorianus
atgactcccgacaataatcccctctggtatagcgagaagcaacttcagcttcttaacggcaagaacttttttatgtttgtcgcacctgtagcttcacaaaagttggatacagcaataagaaaggaaaccacatttgtgccaatgcttgctgcttcattcaaacgccaaccatcacaattggtccgcgggttaggagctgttcttcgcactcccaccaggataggtcatgttcgtaccatggcaactttaaaaacaactgataagaaggcccctgaggacatcgagggctcggacacagtgcaaattgagttgcctgaatcttccttcgagtcgtatatgctagagcctccagacttgtcttatgagacttcgaaagccaccttgttacagatgtataaagatatggtcatcatcagaagaatggagatggcttgtgatgccttgtacaaggccaaaaaaatcagaggtttttgccatctatctgttggtcaggaggccattgctgtcggtatcgagaatgccatcacaaaattggattccatcatcacatcttacagatgtcacggtttcacttttatgagaggtgcctcagtgaaagccgttctggctgaattgatgggtagaagagccggtgtctcttatggtaagggtggttccatgcacctttacgctccaggcttctatggtggtaatggtatcgtgggtgcccaggttcctttaggtgcaggtttagcttttgctcaccaatacaagaacgaggacgcctgctctttcactttgtatggtgatggtgcctctaatcaaggtcaagtttttgaatctttcaacatggccaaattatggaatttgcccgtcgtgttttgctgtgagaacaacaagtacggtatgggtaccgccgcttcaagatcctccgcgatgactgaatatttcaagcgtggtcaatatattccaggtttaaaagttaacggtatggatattctagctgtctaccaagcatccaagtttgctaaggactggtgtctatccggcaaaggtcctctcgttctagaatatgaaacctataggtacggtggccattctatgtctgatcccggtactacctacagaactagagacgagattcagcatatgagatccaagaacgatccaattgctggtcttaagatgcatttgattgatctaggtattgccactgaagctgaagtcaaagcttacgacaagtccgctagaaaatacgttgacgaacaagttgaattagctgatgctgctcctcctccagaagccaaattatccatcttgtttgaagacgtctacgtgaaaggtacagaaactccaaccctaagaggtaggatccctgaagatacttgggacttcaaaaagcaaggctttgcctctagggattaa

SEQ ID NO: 79872 - DNA, 672 bp, Saccharomyces pastorianus
atgacaatgagtatcactgaagtatttggtgaatttaggtgtggtaagacacagatgtctcatactttgtgtgttaccacgcagcttccgagggaaatgggtggtggtgaagggaaagtagcatatattgatacagaaggcactttcaggcccgagaggattaagcaaattgcagaaggttatgaattggatcccgagtcatgtttggcaaacgtttcatatgctagagccttgaatagtgaacatcaaatggaacttgttgaacaattgggtgaagagcttagttctggagattatcgccttatcgtggtagattctataatggcaaacttcagagtagactactgcggtagaggtgaactaagcgaaagacagcaaaagctaaatcaacatcttttcaaattgaatagattggcagaggaatttaatgttgcagtatttctaacaaaccaagttcaatcagacccaggtgcttctgcattatttgcctcggcagatggtaggaaaccaattggagggcacgtcctggcacatgcgtcagcaacaaggattttgttgagaaaagggcgtggtgacgaaagagttgccaagttacaagattccccagatatgcctgaaaaagaatgtgtctacgtaattggtgaaaaaggtattaccgattcaagtgactag

SEQ ID NO: 79873 - DNA, 273 bp, Saccharomyces pastorianus
atgtctgttacaggaactgagatcgatagtgatacagcaaaaaatattcttagtgtagatgaattacagaactatggtattaatgcctcagatcttcaaaaattgaagtctggtgggatatacacagtcaatgtatgttattataacatttttaaaacctctgctgtagaggttctttccccctttcttttactaactaataatttggaaaggaacttttatagaccgttttgtcaacaacaagaagacatctatgtaaaattaaagggttaa

SEQ ID NO: 79874 - DNA, 744 bp, Saccharomyces pastorianus
atgtatatgaaaaatttaaaaataacgatgcccatctatctaagagtgttaatgtggatatatttttttactatcttaggactagcatgcgcttacaacgttacagaacaggtagagtttgacaagttcaaatcagattaccttgcctgtctcgcaccagaacacaggaacatagtagttgatttggctagtaacggattcataacaatttcaccaatggcgaacgcaacaattgactttgaggatgtaactagtgactactttaactgcactgacgtcaatactaacatacaggttacgatcgcgtctttttacaataaatacggatttgggcccgacgataacggctattatcacgctgtggcaggaccctcagaatttgaacagcatcatatggaggttaggctttacagaccatattatccaggtgagttttccatggggaagcgttcagacgcactcggtgtaactggttttgaccgaaaagactgtgcaggtgagggtttctatgacgaacaaactgcagctacttcttgtcagaatataggctccactcagtacgctaagtcggtcaggtcctataactatggttgctgcggcggagcggtctggatcaggatttggccgcatcacaattgtttacaaggacatgatcaccattttaagataaggccaggccagatgctatgttggaatgtcaacgcatattcttggatgcaaccagaatccggatggaacccgtaa

SEQ ID NO: 79875 - DNA, 921 bp, Saccharomyces pastorianus
atgaaagccaggccaagggatgcagtccctgagatgagtaagatcgaattagcaggagatttttggattggagttaatgatttggacttctccaaaaaattacctcggggttcgtttaagcctttgattcttggaatgactttacagttattggttcaatttagcggtataaacattatccttggttatattacatacatttgcgagattgtagggcttgaaggcaatgtaaaactattcaccagttccattccatatttcatcaacatggttttgagcttgttaccgattacattcattgattacactagcagaaagctaattaccttgttgggtggctttcccattagtgggttgctcattacaatcggcgcattatttgtgaagtatggtcaagacaccaagcccatcgacggcaataggagtttagtttggtcaattggagaaaacccgtttgtgggaggatggattctaactttatgctttctaattgttggaatatttgccatgagcctttccagtataccttgggtttacacgaatgaaatgttgccctcacgagtgaaagttaagggatttgccatttgcgtaacgtttggatggttgggcaattttattttaacgtttctatgccctgtgatgattgaaagattaaaaggcacaacatttataatatttggatctttgacattcttgatatcactttcagttttgatttggttcccagaaacaaagggtatgagcatagaagatattgataaattcttcgaatttgagagtaaagagggcaccaatttacatggggaaaagggtatcaaaacgccggactcaaattctaatggcggttctacaagatcctcccaagaagggcaattgcataaacctataaaactgaaaagcgatgaagagatgatcatatga

SEQ ID NO: 79876 - DNA, 132 bp, Saccharomyces pastorianus
atggctagctacgctctacctgaatcttatcactggctagtactacatgggaagatgagtgaagctcaggaaattcagcacaatttagccaaaaagtttaatgaaagccaggccaagggatgcagtccctga

SEQ ID NO: 79877 - DNA, 1083 bp, Saccharomyces pastorianus
atgtgtaaagccggttttgccggtgacgacgctcctcgtgctgtcttcccatctatcgtcggtagaccaagacaccaaggtatcatggtcggtatgggtcaaaaagactcctacgttggtgatgaagctcaatccaagagaggtatcttgactttacgttacccaattgaacacggtattgtcaccaactgggacgatatggaaaagatctggcatcataccttctacaacgaattgagagttgccccagaagaacaccctgttcttttgactgaagctccaatgaaccctaaatcaaacagagaaaagatgactcaaattatgtttgaaacttttaacgttccagccttctacgtttccatccaagccgttttgtccttgtactcttccggtagaactactggtattgttttggattccggtgatggtgttactcacgtcgttccaatttacgctggtttctctctacctcacgccattttgagaatcgatttggccggtagagatttgactgactacttgatgaagatcttgagtgaacgtggttactctttctccaccactgctgaaagagaaattgtccgtgacatcaaggaaaaactatgttacgtcgccttggacttcgaacaagaaatgcaaaccgctgctcaatcttcttcaattgaaaaatcctacgaacttccagatggtcaagtcatcactattggtaacgaaagattcagagccccagaagctttgttccatccttctgttttgggtttggaatctgccggtattgaccaaactacttacaactccatcatgaagtgtgatgtcgatgtccgtaaggaattatacggtaacatcgttatgtccggtggtaccaccatgttcccaggtattgccgaaagaatgcaaaaggaaatcaccgctttggctccatcttccatgaaggtcaagatcattgctcctccagaaagaaagtactccgtctggattggtggttctatcttggcttctttgactaccttccaacaaatgtggatctcaaaacaagaatacgacgaaagtggtccatctatcgttcaccacaagtgtttctaa

SEQ ID NO: 79878 - DNA, 350 bp, Saccharomyces pastorianus
atgtgtaaagccggttttgccggtgacgacgctcctcgtgctgtcttcccatctatcgtcggtagaccaagacaccaaggtatcatggtcggtatgggtcaaaaagactcctacgttggtgatgaagctcaatccaagagaggtatcttgactttacgttacccaattgaacacggtattgtcaccaactgggacgatatggaaaagatctggcatcataccttctacaacgaattgagagttgccccagaagaacaccctgttcttttgactgaagctccaatgaaccctaaatcaaacagagaaaagatgactcaaattatgtttgaaacttttaacgttccagcctt

SEQ ID NO: 79879 - DNA, 350 bp, Saccharomyces pastorianus
ctacgtttccatccaagccgttttgtccttgtactcttccggtagaactactggtattgttttggattccggtgatggtgttactcacgtcgttccaatttacgctggtttctctctacctcacgccattttgagaatcgatttggccggtagagatttgactgactacttgatgaagatcttgagtgaacgtggttactctttctccaccactgctgaaagagaaattgtccgtgacatcaaggaaaaactatgttacgtcgccttggacttcgaacaagaaatgcaaaccgctgctcaatcttcttcaattgaaaaatcctacgaacttccagatggtcaagtcatca

SEQ ID NO: 79880 - DNA, 780 bp, Saccharomyces pastorianus
atgaacaccatttattcaagcccccacagcagcaattccagattatcgttaagaaataaacatcattcgcctaagaggcattctcaaacaagtttccccgcacaaaagtctacgccgcaatcacagcaattgacatctaccacaccacagtctcaacagcaagaagctagtgagagatcagaatcacaacagataatgtttctcagcgaaccgttcgtaagaactgctttagtgaaaggttcatttaaaacaatagtacaattgcccaaatatgtggacctgggagagtggatagcgttgaacgttttcgaattcttcacaaacttgaaccaattttacggagtagtagcggagtacgtaacgcctgacgcgtatccaacaatgaacgctggccctcacacggattatttatggctggacgcaaacaatagacaggtttcactgccagctagtcagtacatagatttggccctcacgtggataaataacaaagtgaacgataaaaacttgtttccgaccaaaaatgggctaccattcccgcagcaattttcgagagatgtgcagagaatcatggtacagatgttcaggatattcgcacatatttatcaccaccactttgacaaaattgtgcacttgtcattagaagctcattggaattcatttttctctcatttcattagttttgcaaaggagtttaagatcattgacagaaaggaaatggctccgctgctaccgttaattgaaagctttgaaaaacagggcaaaattatttataattag

SEQ ID NO: 79881 - DNA, 246 bp, Saccharomyces pastorianus
ctagaggatcccgccgtaggaaacttagggaacgccattgaggttagtgaagatggttctatagtcactgtagtatccagtgccaaattttctggtaaatacttgaaatacctaacaaagaagtatttgaagaagaatcagctaagagactggatcagattcgtctccataaggcaaaaccaatacaaattggttttctatcaagtcactcctgaagatgctgacgaagaagaggatgacgaataa

SEQ ID NO: 79882 - DNA, 1737 bp, Saccharomyces pastorianus
atgactagcttggaaatttgtgaatttgaaagacgagtaacagattccttagacatggaacaatctacagaagatcaagtatgggatgaacaagatcacatgagaaatagacggagaagcaaaagaagaaagaaaatggcatatgtcgcacttgccatggtaggtggttctttggtccttggactaagtggtggtttactagcccccgtcattggcggggggattgctgctggtttgtcaacaataggtattactggtgctacaagtttcttgaccggagtgggtggtaccactgttgttgccgtttcaagtactgctattggtgccaacatcggtgctagaggtatgtcaaaaaggatgggaagtgtgagaacttttgagttcaggccactgcataataatagaaggattaatctaatcctaacagtgtcaggctggatggttggtaacgaagatgatgttagattgccattttctacggtggaccctgttgaaggtgacctgtactcgttatattgggagcccgaaatgctaaagtctattggtcaaacggtcagtattgtagctaccgaaatttttaccacctcgcttcaacaaattttgggtgccactgttttaacagccttgatcagttctatccaatggccgatggctttatcgaaattgggttatattttagataatccgtggaatgtttctttggacagagcttggtctgcaggcaaaattcttgctgacaccctaattgcaagaaatttaggtgcccgccccattacactggttggcttctcaataggtgcgagggtcattttttcttgtttaatcgaattgtgcaagaaaaaggctctaggtttgattgaaaacgtttatctattcggtacaccagctgtcatgaaaaaggagcaactagtcatggcaagatctgtagttagtgggaggtttgtaaatggttattcggataaagattggtttttagcatatttatttagagctgctgctggtggatttagtgctgttatgggtatttctacgatagaaaacgttgaaggtatcgagaatattaattgcactgaatttgttgatggtcatttgaattatcgtaaaagcatgcctaagttattaaaaagaattggtattgctgttttaagtgaggagtttgtcgagatagaggagatgatgaacccagaagaagtgaaaagaaaaaggaaattaataaatgatgtcgatgcagcccaaaaaaaactaagtgaaagaaaaaagcataacagttgggtgccgaagtggttgaaaccgaagaaatccaaatggaaggtcatggtcgaagaagctgtcgaagaaggaagagatatgcaagacctaccagaaaatgacgtcaataacaatgaaaacgaaaatccagatgaacatgaagggatagcaaggcaaaaacgcagagatgctgctcttgtcgatcatggggcattaatgcatgagttacaacttataaaacaagcgatgcacgaagacgaaataaagaataaagcatgccttccaggagaagacaaggaagtggaatcatcaaacgacttcttgggggagtcgcattacaaaccaccgtcaacaccaaaaattaatccaccacaaagccctaataacttccaattgttaagtgctgggagaactattcttccagaggatgatgatttcgaccctcgaggaaaaaaaaaggttgaattctctttcccagatgatatctag

SEQ ID NO: 79883 - DNA, 1407 bp, Saccharomyces pastorianus
  modified_base (1389)..(1389): a, c, g, t, unknown, or other
atgtccgattcggaggaagatttaggtatacagttgaaaggcttgaagatagcgaggcatttgaaggagtcaggggagcatactgatgaagaatccaactcaagccccgaacatgattgcggcttgagtaatcaagatgatttaactgttatgcatacacaggctaaagaagaagtttttaaacgaagagaagaagacggaacacgaaccgaagaagacggaacacgaaccgaagatgctttacatgagggagaagcaggaaaagagggcacaggttttccctcatcacagtcagtgtgcagtcctaatgaagcagatagcggtattgatcgggccgataaacctagtttgctggacccttttaaatctgtgcacgatacggatcctgttccaggtacaaagtccaggagcaattcagactccgactctgattcagatgatggaggctggcaagagatgcccgctgtctcatcgttcaatatatataaccacagaggcgaactagagttgacttccaaggttagaaactcagaacaagcctctgagacgtctcccacagttcctccaggaaaaaattgcaaaagtgtcaatgattctagatttgactatacgaaaatggccgctgagcagcaagcccaacgatcctatcgaacaaataaaaagacagatttcctttttgaccacaaagtactgaaaaagaaaattaacagttcgcaaacttccgtaaatttgacttcttccccttcgactacatccttgaacaatgaaaaaaataatgatgacgatgatgatgattcttatgacgaatatgaggacgacgtggaaccagtgaacgacttgaatcgggactcgcagttaaacataacgaaaaatctgctatctgatatggagaagtttgcctacgtaggtgcaataaacattttggcaaatcaaatgtgcacgaatttggctacgctgtgtctttgtattgacattaaatcccacaagaaactagcacatagattacagtttacccagaaggatatggctgcttggaaaactgtggttttatcacggctatatgatcatttggggatatctcaagaagaaattgttatgattgagaagctttctctgcacaaaatccaattggaagatttgtgtaaatgtttgaaaaccactcagagcattgataatccatgggagaatgatagagaccacgaagaagacggtatagaggaaactacggaacgaatgagtccaaatgaacaaaatggctcagtacaggctagtactcccgacccagaacaatccgcaacacctgaaacaccaaaggctaaacaatcaccgttatcttcggacgttccaggaaaagtactcgatccggaaagacctgcaggcatgcaagcntgcactgccgtcgtttac

SEQ ID NO: 79884 - DNA, 963 bp, Saccharomyces pastorianus
atggagaaacggaaaattgaagacgcagatgtctttttcaacttaacggacgatccctttaatcctgtatttgacatgtcgttgcctaaaaatttttcgactagtaatgttccctttgcatctatcgcgtcatccaagtttcagatagatagatctttttattcttcacatttaccagaatacttgaaggggatatctgatgacatcagaatatatgattcaaatggccgttcgagaaacaaagataattacaacttggataccaaaagaatcaaaaaaactgaactgtacgacccattccaagaaaatttggaaattcattcgagagagtatccaataaaattcaggaagagagttggtagatctaatattaagtatgttgatcgtatgccaaattttacaacatcgtcgaccaagtctgcatgttctttaatggattttgtagatttcgattcaatcgaaaaagaacaatattcaagagaaggtagtaacgatactgactcgattaatgtttacgattccaaatacgacgaatttgtcagactttacgacaagtggaagtatgattctccacaaaatgaatatgggatcaagttttcagatgaaccggcaagacttaaccagatttcaaatgatactcaggtgattagattcggaacaatgttgggtacgaagtcctacgaacaattaagggaagccaccataaagtatcgtagggactatatcaccagactgaaacaaaagcatatacaacatttacaacagcaacaacaacagcagcagcagcaacagcagcaacaacaacaacaacagcagcaacaacagcagcaagcacaacaacaaaagcagaaatcacagaacaataattcaaattcttcgaactccctaaaaaaattaaatgattcgttaatcaattcagaagcgaaacagaactcttctataacccagaaaaattcatcatga

SEQ ID NO: 79885 - DNA, 690 bp, Saccharomyces pastorianus
  modified_base (52)..(52): a, c, g, t, unknown, or other
atgaaaaaaaaatttgatcccaaaattctcgaaaatataagtgatgacgatnatgatgatgacgatggtaataagaaacttttatccaacaaaagtaaaaataacactgacgagcaagataaatttccttcaaaaatccaagaggtgtctaggtcgatggctaagacgggcgccacagtagggagtgagccggttagaattacaaatgtcgattatcacgccctaggtggaaacttggatgatatggtcaaggcatattcattggggttatatgacgacgatttagaggaagatccaggaaccatagtggaaaagctcgaggatttcaaagaatacaataagcaggtggagttgctgcgtgacgaaattcgagactttcaactagaaaaccagccagtgacgatggaggaggaggaaaatgatggcaatgttatgaatgatatcattgagcatgaatttcctgaaagttacacaaatgacgaggacgaagtagcactacatgcgggccggctacaggaagaggttgctatagagtacagacggttgaaggaagctacggcgtcgaaatggcaatcatcatcacccgccgcacatactgaaggcgaattggagcctattgataagttcgggaacccggtcaagacaagtcgtttccgctctcaacggctccatatggacagtaaaccataa

SEQ ID NO: 79886 - DNA, 723 bp, Saccharomyces pastorianus
atgtcgttgagcaggtctgagtgcacaatggagtgcgtctccacgtcatcatcatcgtcatcgtcgtcaaacacattttcaaaaacagaagatccgttgaggttcatgtctgaaaggaagaattgctggttatcagtatcggtgtcatcgaggtcgttgttgcctgggccagcggcgttcacgccgctggcaaagggcgaggcggagaagtccataatagagttagaatgttgcattatgcggttaattcgatggaaagacgtgcggttatgcaaacgccaagaaaggttcaaaatacggttagaatcgggcaatattttctgggcgctcgagtacaggtcccagatttctttgtttaaattcaagtccgggtcgaggttcgggactctgttcgtgctcatagttatgttcactaccgtgcaccgtgtacaatgtatatatatatctatatatatatatgcacatgcgatgaacagaacaggggaagggcggaaaagcaaaggaaagaaaacgtgcatgctaataccggggccgggagtggcacacacctatatatatgtggctgggccgggcaccgcaagtgtgcgactcatagtgctgttattattgttgctctgtattgtggtggctgttaataccagcggtagctgcaccggcactaacactatgctgcgctgcttcacatcgttctgctatgtgtcggcctgtggtcggacgcaatga

SEQ ID NO: 79887 - DNA, 111 bp, Saccharomyces pastorianus
atgctattattatttaaaaatggtaagttattggtgaaaataaagtggtcatcgaaggaggacgagcaggaagtgtccaagaaaattagggaaaccagaagcattatgtga

SEQ ID NO: 79888 - DNA, 492 bp, Saccharomyces pastorianus
atgttatgtttagagtatgatataggacttctctctctttttttttttttgtccaggtggagtgcgatttgttcgttatatgcctcattccgtaagtgtgatcagtcaggacgttatttcgcgctgcaagttccttacttttccatagagttccacaggatggaaggagaaataatgataaaggaaagcagaacatattacccttcttttggagcgtactcccatctgttacccgctcatccaaatgcacattgtgttaccctcttgttaggtatttttcggagttctccttttctccttcttttcctcttgatacacagaaaagtgggagaaggtagggggggtcagagaatgaagaaaaaaaggggacgcgcaaatccaagtgaaaatctccgggagcgggcggatcccactaacggcccagccgaaaatggaaaaaaagggtcggtgacgtgtgggtgccagctggcggtagcaatgacgacgtgttga

SEQ ID NO: 79889 - DNA, 735 bp, Saccharomyces pastorianus
atggcggttgcttcttcgtcatcaatttccgcgcgttcgattttatttaaaagtactttctttgaagcgccgagatttttcatgaaatccgtctcaaatccaagcaaattatctttgaatttctttctctttttaccgcgaatcccaagcactgacgctacggggatgtcttcaaattcattgaatatcttgattaacccaatatcgcgtcttttcaacctgtttggcacctgggattttttcaaatcggcgagaaactcctcttgtgtcttaccattttctgacacatgcttgttcagatctagcgatattagcttgtcgaccttgtttaccgtagctgaactattgtattttttcaatggtgttagatttaaatcgtttttgtcaatgatagcagcggaggtgatttcttcttctgtttctgttggtgctgctggcgttactttgggcagttgtggtgtgacttttttcctgttcaatgtcatgggtgaagaagattccagtatgggcgtaggcgtcaaaagtgatctagtctcctctacagtctcttcgctcttgtcatcttccccttcaccgtcctcttcactcttgtcaccaccgatactgggctttttcacctctgtaacattggtacgctcgcgcttcctaccttcctccatcttactcatgaattctcttctcttgatgcgttggttggctccgaactctaattcatcttcaggatccgtgtcgtaa

SEQ ID NO: 79890 - DNA, 2859 bp, Saccharomyces pastorianus
atgaaatcattacaacgctcaaaatcttcctttgttaaagaaagcgcagtaatttctaagcaaaaaagtaaattagattatatcttcaaggataaggaaaaattagtctcggatttacggctcataaaagttcctcaacaggcagcagggaagcgaatttcccatatagaaaaaagaatcgaaagtttacagaaagatcttcaaagacagaagacttatgtggagagatttgaaacacaactaaaagtggtgaccagatcaaaggaagcttttgaagaggaaatcaaacaatctgctagaaattatgacaaattcaagctaaatgaaaatgatttaaagacatataattgcttacatgaaaaatatctgactgaaggtgggtcaatcctagaagaaaaaattgccgttttgaacaacgataagcgagaaatccaagaggaattggagagattcaacaaaagggcagatatttctaaaagaaggataacggaggagctttctataacaggagaaaaattggacacccaattaaacgatttaagagtttctttgaatgagaaaaacgcccttcatactgaacgtttgcacgagctgaaaaaattacaatctgatattgaatctgctaataatcaagaatacgacttaaatttcaagttgagggaaacgttggttaagatcgatgacttgagtgctaatcaaagagaaacaatgaaagaaagaaaactaagagaaaatatagcaatgttgaaaagattcttccccggagtaaaaggtcttgttcatgatctttgtcacccaaaaaaggagaaatatggcttggcagtgtctaccatcttaggtaagaactttgattccgtcattgtagaaaatttaaccgtagctcaagaatgcattgcatttttgaagaagcaacgtgcgggcactgcatctttcataccactagacacgattgagacagagttacctacattatcattgcctgactcacaagactatattttatcaattaatgctattgactacgagccggaatatgaaaaagcgatgcaatatgtgtgtggcgattccatcatatgtaatacgttgaatattgctaaagatctgaaatggaaaaagggcataagaggcaaattggttacaattgaaggtgctttgatctacaaggccggtttgatgacaggtggtatatcaggagatgccaataataggtgggataaagaagaatatcaaagcttaatgtctttaaaagacaaattactaatccaaatcgatgaactttccaacggtcaacgctctaattcaatcagagcaagagaagttgaaaatagtgtttcactattgaactcggacatagcaaatttgagaactcaagtaacacaacaaaaacgctccttggatgaaaatcgtttagagattaagtaccataatgacttgatagagaaagaaattcaaccgaagataactgaactaaagaagaagctagatgatttagaaaatactaaagataatttagagaaagagaaggaggctttacaaaataatattttcaaagaattcactagtaaaattggctttacaatcaaagaatatgaaaatcattccggtgaattgatgagacaacaatctaaagaattacagcagttacaaaaacaaattttgaccgttgaaaataagttgcagtttgagacagacagactaagtactactcaaagaagatatgaaaaggcgcaaaaggatttagagaatgctcaagttgaaatgaagtctttggaagaacaggaatatgcaatagaaatgaaaatcggatcaatagagtctaaattggaagaacacaaaaatcacttagatgagttacagaagaaatttgtaacgaagcaaagtgaattaaattccagtgaagatattctagaggacatgaacagcaacttacaagtcttaaaaagggaaagagacggtataaaggaagatattgaaaagtttgatttagagagagtaacagcgttaaagaattgtaaaatttctaatataaatatacctatatcatctgaaacaacgatagatgatttaccaatatcttccactgataatgaagcaattacaatttccaacagtatcgatataaactataaaggactacctaaaaaatacaaagaaaacaataccgattcggcaaggaaggagctggagcagaagattcatgaagtggaggaaatattgaacgagttgcagcccaatgcaagagctttggagagatacgacgaggcggaaggaaggtttgaagtgattaataacgaaacagaacaactaaaggccgaagaaaagaaaatattaaaccagttcctaaaaattaagaaaaaaagaaaggaactgttcgaaaagacatttgattatgtgagcgaccatttagacgcaatctacagggaacttactaaaaatcccaactccaatgtggaattggccggtggtaacgcttctttaaccatagaagacgaagatgaaccgttcaatgcgggaatcaaatatcatgccactccgcctcttaaaagattcaaagacatggaatatctttctggtggtgaaaaaaccgtagctgcattagctctattatttgctattaattcctaccagcctagtcccttcttcgtgctggacgaagtggacgcagccctagacattactaacgtccagagaattgctgcctatataagaaggcaccgtaatccagatctccaattcattgtcatttcattgaagaacaccatgtttgaaaaatctgacgctctcgttggggtttacagacagcaacaagaaaactcgtcgaagatcataactttggacttgagcaattacgcagaataa

SEQ ID NO: 79891 - DNA, 507 bp, Saccharomyces pastorianus
atgggacgtttagttggcttagaactaagtaatttcaagtcctatagaggcgttaccaaggtaggattcggcgagtcgaatttcacaagtattatcggtcctaacggatctggtaaatcgaatatgatggatgctatctcattcgtactcggtgtgcggagtaatcatttgaggtcaaacatcttgaaagatttaatctatagaggtgttgtaaacgatgagaatagtgatgattatgataacgagggcgctgcctcttcgaacccacaatccgcatacgtgaaggcattttatcaaaaaggtaacaaactggtggagctgatgagaataatttccagaaacggtgacactagttataaaattgatggaaaaactgtctcctataaggactattctatatttcttgagaacgaaaatattcttatcaaagccaaaaattttctagtgttccagggtgatgttgagcaaattgcagcacaatctcccgtagaattatcaagaatgtga

SEQ ID NO: 79892 - DNA, 306 bp, Saccharomyces pastorianus
atggcatacgtatattttggtctaacgatattctgtgctttatggtcctattccatttatatgaaaagagttgatattattcaacaaagaagcggtcaacatctagatgcaccacttggtccagttttggttgctatagttttatttgtcactttagtggttaattttgttatggcgtttagaaatgcagcaaagtctcgtcaagagttgcaaatacagaatttagaagttcctgaaagaataccagaagtattaaggccacttcaaaattatctattcaagttaatggggccaagcagtgattag

SEQ ID NO: 79893 - DNA, 1611 bp, Saccharomyces pastorianus
atgaaatcattgcctgatctagataagttattttcaaggttattatgcattaatcattctgcaataaaacctgaccaaagaattaattacgttttgttgctaaaggaaactttacaaagcgtgaagtcattgaaagacgcacttaatgatcagttaattcaaagccgtttaattagcgagaccaaaaaaatattcaataatgacgcaattatggaaattgaaaaattaattaatagttgtataaatgaagactgtgtttgggcatcctcagctatacaactacttaaccaacgttcatatgctgtgaaaagtgattccaatgggcttttggatgtttctagacaaatctacaaagaggtaaaagaggaattttttcgtgaggtagaagatcttaccgctaacaacaaaatcaatttagatcataattacgattctgcacgaggcttttatctcagaataaaaagacaggaatttaccgatgacgtcgctacacttccagacgtattcatttcaagaacaataaaaaaaaattatattgaatgtacaaccctaaatataataaaaaaaaatgcgaggttgaaggaagttatggaagagattttacttttaagtgaagagacagttgatgaactgctcgataaaattgcaacccatatttctgaactatttatgattgcagaagcagtggctatcctggatttggtttgttcattcacatataatttgaaagaaaataattacacaataccgatttttacaaacaatctactaattcgagattcaagacacccactacttgaaaaggtactaaaaaattttgtccctaacaccatatcaagtacaaaacatagctccagcttacaaatcataaccggatgcaacatgagtggaaaatctgtttatttaaaacaagttgcccttatttgcataatggcccaaatgggatcaggtataccggcactttatgggtcttttcctgtctttaaacgtctacatgcaagagtctgcaatgacagtatggaattaacctcatcaaattttggttttgaaatgaaagaaatggcttactttttagatgacataaatacagaaacactgttaattttagatgaacttggtcgtggttcaagcatcgctgatgggttttgtgtgtctttggcagtaactgaacatttacttcgaacggaggcaacggtatttctttctacacacttccaggacattcctaaaataatgtctaagaagccagcagtttcccatcttcatatggatgcagtccttctcaatgacaattctgtcaaaatgaattatcagttgacccagaaatctgtcgcaatagagaatagtggaataaaggtggtaaaaaaaatattcaacccggatattattgcagaagcgtacaatatccattcgcttttgaaaattgcaaaagcaaggactgaaaacgaagattcaaatggcgttgttgatcaaaagaccataaaccaaatgaagagaatacacaatcttgtagcgatattgaaagaatgtgcaggaaatgaaaaagagcccttgactttagggaaattaaaagaaataaactccgacttcatcgaaaattttggagaataa

SEQ ID NO: 79894 - DNA, 1011 bp, Saccharomyces pastorianus
atgagtgaatctaatctatctagttttatcagtacaaattatttcaatttaaggtcggcggctaattcttcaaactctatttcgaagccaagtacgaaaaagagtatcaggaaccaaaaatcgccaactaacataagtggttgggctctcaaaaagaaaacgctacaaatagcagagacaacatgggaaaacaatgaaaaagattcaacacatagccattacttaatgactggatcaatggcctctaggaccgcaacctccttaagtcgatacagcaccaacgcttcactcctcggtcctagtattgactgtgttctttgttgcatatacgaagtgccaagagacataagtacgcggattgggttatgtattatcaactgtaacacgggacagatgtatctttcagatttcatggattcacaaatttacattcgtgtagttcataaactccaaatttaccaacctacggaaatactgattccaagcagttctctagctccaacagtatcaaaattagcgacaatgataaaatttaatgtggccgagacagttaaaattgaagagggttcacggaagtgcttcaatagccaagatggactggcggcgattacaaagtatttaatggatgatacaaaaaaggacttgaaaatcgaggagattatagataaaacgtttgctctttgtgctgcatctgctgcgataagctacatggaagagattatatccaaaagcagccgaaatttgaatgcgtttcgaaaactacgtatacagtttgaaggaacagaaaatacaatgctgattgattctaaaaccgtcagaggtttagaacttgtagaaaataaattggataagaatggcatatcactatggaagttcttggataccacgtccactaaaatgggacaaagatcacttcggaacagtatactgcagccattaactgataggggcagtatcgaaatgagactagaggccctagaagaattgaaagccaatgatgaccttctataa

SEQ ID NO: 79895 - DNA, 1350 bp, Saccharomyces pastorianus
atgccagcagtaaagacgtcagcatgcagtatggtagttatggatgaagcagacagattgttggatatgagttttattaaggataccgaaaaaattctgaggctattgcctaaacaaagaagaacgggtttattttctgcaactatgcgtagcgccggatcagatatctttaagacagggcttagaaatcctgtcaggattaccgttaactctaagaaccaggcgccctcctctttgaaattaaattactgtgtcgtaaatcctgccgaaaaactacaacttttggttagcgttttgaataactacaaattcaagaaatgtattgtatattttccaacatgtgtgtcagtctcctacttctactcatttatccagtatttgggaaagagaaatattctcgtgaatgaagtagaagtattttccttgcatggaaaacttcaaacatcggcaaggacaaaaactctaacagcttttactgattcgctaagtaattctgttttattcacaacagatgtggctgctagaggtattgacatacccgacgttgatctcgtcatccagcttgatcctcctaccaatactgatatgttcatgcatagatgtggtagaactggtagagcaaatagagtgggtaaagcaattacgtttcttaatgaaggcagagaagaggattttattcctttcatgcaagttaaaaatgtggaacttgaagaacttgatttggaagtaaagggcataacaacaaacttttacgaggactttagaaattggatactagaagatagggatagatttgataaaggtgttaaagcatatgttgcctttattaaatactactcaaatcattccgcaacttcaatttttaggcttcaatctttagattatgttggtattgcgaaattgtatggtcttttccgcctacctagaatgcctgagataacaaagtacttagccaccgaaaaacaagaagggattttcccagggaattggttggtcgatcccccagttaatatggatgaatataaatacaaggacaaaaaacgtgaaaaggagagacaagaaacattaaaaaatataagcctgattaatgataagaagaagctgaaaagtgagttgaagaagaagaatttagcgtggtcagataaaacattgacgaaagaacggaaactcgagagaaaggaaaagatgagtttaaaaaggaaggctatagaggaagaattgaaagcagaagagctcgatgaaaatgctgaagaagagcgtattaaagaggattggaaagaaatcgttttacagaataaacggaagaaagtttccagcaaagctatccaaggcaattttgaccacttataa

SEQ ID NO: 79896 - DNA, 213 bp, Saccharomyces pastorianus
atgtcaaagtcattggaatgggataatctcgggttttctttacttccttggataaggacaggactggatgttatgggttttgagaccatgactccagtccaagcatcgacaattcccatgcttgctggcaacaaggatgtagtagttgattctgtaacaggctcaggtaagaccgctgcgtttgttgacctgcaggcatgcaagcttggcact

SEQ ID NO: 79897 - DNA, 168 bp, Saccharomyces pastorianus
atgattcatatcttgaacgaaagtaagtatcaatcgtccacaaaaggtcaacaaattgattccttaaaaaatgttgcgagacaatgtatgatttatgctggtatgattcaatacagaatgccaagggaaacgtacagcactttaattaatataggggtctctctatga

SEQ ID NO: 79898 - DNA, 249 bp, Saccharomyces pastorianus
atggcgtccatatattttgataatgctggtatatcgagacagattcatgttaaaaacaaagaaatttgtatgctgctcttaaatatctcctctatcagggagctatatttcaataaacaatggcaagaaacactatcccaaatggagttattggatttacttcctttctcagacgagctatctgctagaaagaaagcacaagatttctctaatttagatgacaacattgtgaaaaatattccaaattag

SEQ ID NO: 79899 - DNA, 900 bp, Saccharomyces pastorianus
atgatgaatagtaaggtggggtccgcggacaccggccgtgacgatacgaaagaaactgtttatatttcttcgattgcgcttttaaagatgctaaagcatggtagagctggtgttcccatggaagtcatggggttgatgttaggtgagtttgtcgatgattatacggttaacgttgtggacgtgtttgcgatgcctcaatcgggtaccggagtttctgttgaggctgtcgatgatgttttccaagcgaagatgatggacatgttaaaacaaacgggcagagaccaaatggtcgttggctggtaccactctcatccagggtttggctgttggctatcttctgttgatgttaatactcaaaaatcttttgaacaactaaacagcagagctgttgctgtcgttgttgaccctattcaatccgttaagggaaaagttgtcatcgatgcttttagattgattgacacgggcgcattgataaataacttagagcctagacaaacaacctccaacacaggcttattgaacaaggccaacattcaagccttaattcacggtctgaataggcactactattctttaaatattgattatcataaaaccgcgaaggaaaccaagatgttaatgaacttacataaagaacagtggcaatcaggtcttaagatgtacgattatgaagaaaaagaagaatcaaatttggctgctacaaagagtatggttaagatagccgaacagtactctaagagaatagaagaggaaaaggaattaaccgaagaagaacttaagacaagatacgttggtaggcaagatccaaagaagcacctttccgaaacagcagatgagacactagagaacaatattgtttctgtgctgacggcgggtgttaattcagtggcaattaaataa

SEQ ID NO: 79900 - DNA, 1905 bp, Saccharomyces pastorianus
atgctgggtgtgaacggtgacatcgaacatgctggtagaaagatggaaacaagagttgatttgaaaaaactggccaaggctgaacaaaagatcgcaaagaaagtcgccaagagaaataacaaatttgttaaatacgaggcttctaaattgatcaatgaccaaaaggaggaggattacgattctttctttttgcaaatcaaccctttagaattcggttcatccgctggtaaatccaaggatatccatattgacactttcgacttgtacgttggtgacggtcaaagaattttgtccaacgcccaattgactctaagttttggtcacagatatggtcttgtgggccaaaatggtattggtaaatctactttgttaagggctctatctagaagagagctgaacgtccccaaacatgtttcgattttacacgtggaacaagagttaagaggtgatgatacaaaggctttacaaagtgtgctggacgcagacgtttggagaaaacaactattaagtgaagaagccaagatcaatgaaagattaaaggaaatggatgtattaagacaggaattcgaagaagacagtttagaagttaaaaaattggacaatgagagagaagacttggataaccatttgatacagatttctgacaaattagtcgatatggaatctgacaaggctgaagctagggcagcatcaatcttatatggtttagggttcagtacggaggcacagcaacaacccactaattccttttccggtggttggagaatgagattgtccttggcaagagccttattctgtcaaccagatcttttgttgttagatgaaccttccaatatgttggatgtgccatccatcgcttatttagcagagtatttgaaaacatatccaaatacagttttgacagtttctcacgaccgtgcattcttgaatgaagtggctacagatatcatttatcaacacaacgaaagactagactattacagaggccaagatttcgataccttttacaccacaaaggaggaacgtagaaagaatgctcaacgtgagtatgataaccaaatggtttacagaaagcacttgcaagagtttattgacaaatacagatacaatgctgccaaatcacaggaagctcaatcaagaattaagaaattggaaaaattgcccgttttggagccacctgaacaagacaaaaccattgatttcaaattccctgaatgtgataaattgtctccaccaattatccaattgcaagacgtttcctttggttatgatgaaaacaacctattattgaaagatgttaacctggacgttcaaatggattccagaattgcccttgtaggtgccaatggttgtggtaagactacactgttgaagattatgatggagcagttaagaccactaaaaggctttgtatcaagaaacccaagattacgtataggctacttcactcaacatcatgtggattctatggatttgaccacgtctgcagtggactggatgtccaaatccttcccaggtaaaactgatgaagagtatagacgtcatctaggttcatttggtatcactggtaccctgggtctacaaaagatgcaattattatccggtggtcaaaaatctcgtgtagcattcgctgcattgtgtttaaataatccacacattttggttctggatgaaccttctaaccatttggataccactggtctagacgctttggtggaagccttgaaaaatttcaacggtggtgtcttaatggtttcccatgatatctctgttattgactctgtttgtaaagagatttgggtttcagagcaaggtactgtcaagaggttcgaaggtacaatttacgactatagagattacatcttgcagtctgctgatgctgcaggtgtggttaaaaagcattga

SEQ ID NO: 79901 - DNA, 168 bp, Saccharomyces pastorianus
atggcaagcatcggttcgcaagtgagaaaagctgcttctagtattgaccctatcgtcacggattacgcagtgggctactttaaccacttgtccggaataacttttgatgctgttcaaagtaagcaagtagatttgtccactgaagtgcatttgtgtccgatttattga

SEQ ID NO: 79902 - DNA, 147 bp, Saccharomyces pastorianus
atgcaccgtggtcctgttacaatttcatccttatacgacttggtgtggctggctaactcttccctgttccctttgctcgttattggcgtgcattttctcagttttaggtttgatacgtctgcgcagtcagacagaaaacatagctaa

SEQ ID NO: 79903 - DNA, 249 bp, Saccharomyces pastorianus
atgctaaattataaattgattttactgttttcctctttcctacaattaatctctttttctggctttatgatatgttgtttaacttcaccaataattagaaactgggggctggctcaagctgctggagtttcatatggtacctttggttactgtaaaactttgaattctttttcctgctctcgagtacgtttaatatataacacctcgaaagaaaaactacctggccttttcttaaacgttggtggctaa

SEQ ID NO: 79904 - DNA, 453 bp, Saccharomyces pastorianus
atgtggaaatgcctactgaaaaaaaaaatggcaaatattttatattatgagggaatctcaagccattcacaagataactacgaccctccttggttatttggcgttgaggctacccaatcagccgatcgctttaaaatatattcaaaaaaaaatcattgtctcacagagccccgccaatatcaactacaacaaccaaataattaccaggatcaaagtgaggttcctcataactctttcattccttggtattcccgaagaagaccagtaggatacaaccacaattacaatcgctactactcacagacaactcatggtaacagcgaacactcccgacaaacattgccacagacctacaacatacacagcatgctccccagaaagtacaagcccgcctacaaaaaacaggcacatcgtgtgaagagtaatccacaaccagcttatactttccaatga

SEQ ID NO: 79905 - DNA, 567 bp, Saccharomyces pastorianus
atgggtgtcccatctatcacaacaaacgtttctgggttcggtgcctacatggaagacttgattgaaacagaccaagcgaaagactatggtatttatattgtagaccgtcgtttcaagagtcctgatgaatctgtcgagcaattagcagattacatggaagagtttgtaaacaagaccagaagacaaagaatcaaccaaagaaacagaaccgaaagactatcagacttgttagattggaagagaatggggttggaatacgttaaggctagacagttaggtcttcgtagggcctatccagagcagttcaagcaattggtgggtgaaacaattagtgacgccaatatgaacactcttgccggtggcaagaaattcaagattgccaggcctttgagtgtacccggatcccccaaagtaaggtccaatagtactgtttacatgactccgggcgatttaggtacccttcaagatgctaataatgcagatgactattttagtttgagcacgaatggagccatcgacaatgacgatgatgacaacgatacgtctgcatactacgaggataattaa

SEQ ID NO: 79906 - DNA, 1368 bp, Saccharomyces pastorianus
atggctcgtgacttacaaaatcatctactgttcgaagtagcaacagaagtagctaacagggttggtggtatttactctgtcttgaagtccaaggctccagtcactgtggcacaatacggagacaactatacgctgcttggacctttgaacaaggcgacttatgaaagtgaggttgaaaaacttgactgggaagatgaaagtatctttcctgaagagctgttaccaatcccaaaaactttgatgtccatgcgggaaaagggtgtgaactttgtctacggtaactggttgattgagggagcaccacgtgtcattttatttgagctggattctgtaagacactttttgaacgaatggaaggctgacctatggtctctcgtcggaattccatcaccagagcatgatcacgaaacaaacgatgccatattgttgggttatgttgttgtgtggtttttgggagaagtttcaaaactggacagtagccatgccatcattggccatttccatgaatggctagctggtgtagccctgccattgtgtagaaagaaaagaattgatgttgtaacgattttcaccacgcacgcaactttattgggtagatacttgtgtgccgctggtgatgtagatttttataacaatctacagtattttgatgtggaccaagaagctggtaagagaggcatatatcataggtactgcattgagcgcgctgcggctcatactgccgatgtttttacgactgtgtcgcaaatcactgcattagaagcggagcatttgttgaagaggaaaccggatggtatcttgcccaatggtttgaacgttgttaagtttcaagcagtacatgaatttcaaaatctgcatgccctgaaaaaagacaaaattaatgatttcgtcagaggccatttccatggttgttttgatttcgatctagacaacacagtttatttctttatcgctggtagatatgaatacaaaaacaaaggtgctgacatgttcattgaatcattggctcgtctcaattacagattgaaggtttctggatccaagaagactgtggtagcgtttttgatcatgcctgccaaaaccaattccttcactgtggaggcactgaaaagccaagccattgtaaaatctttggaaaatactgttaatgaggtcaccgcatccattgggaagagaattttcgagcatacgatgagataccctcataatggcctagaatcagagttgcccactaatttggatgagctgttgaagagttctgaaaaggttttgctgaagaaaagggtattggcgctgagaagaccttacggggaactgcctccggtagtcacgcataacatgcgcgatgatgctaacgatccattttaa

SEQ ID NO: 79907 - DNA, 852 bp, Saccharomyces pastorianus
atgaaaaattctaagattgctgaggcgctcaaagatgtcaccggagatcaagagatcgacgatatcaacatttcagacgaatttcaaaggacagttgaattgccagaattggaaaaacaagatataaaggataataaaggggaagacaaggaattggaagtagaagaaacagagaaagaaacttctcttcctgatcttgtagtggaagaaaacatcacggaggaaaagaatgaaattaagcaagaagaagaggaggtatcccagttagacttcaatgaaacagagtcaatcagtaaagaagccccaaacaatgacgaaaatggatttgaagatcaaagtacaagggaaaatcccaagaaagcaagtgcagatgacattttcaaagatattttggacgaaacgaatgagtttttagagcaactaaaaattgttgatgattccgaactaaacgctctactccaatcactagatgcgaaagactccacaactcaaactactgagcaatccaagaaaaacaatgacaagccgcaagacgtaataacgactagcgagatccggaagctgaatgaaaaggaagctgtatatatatacacgtcactagccggaggcggtttccatatgatccccagaacaaatcgcttaagcacaatcctgacggccaaccgaatcccgttcacctacagagatcttggcacagatgatgaagcgagaaaagtttggaagactttcagcaagggtaggagtcttccaggtgtggtcagaggacacaatgacttaatcgggaactgggaagaaatagaagaagctaacgaagactacaaattgcgggaactcatttacgatactatttaa

SEQ ID NO: 79908 - DNA, 414 bp, Saccharomyces pastorianus
atgattagacggcggtctaccaattatacggccgcactaaattccagggaacaagcccgggaacgcgaaagcagtatcggggagcacgccccgggagccgaacgtaggagtagcggacccatggatttccagaatactatccacaatatgcaatacaggaccactaacgactctgacctgagccacgctggcgtggatatgggtgactccatctcccatacaccgatccgttctcgtgctggcaacaaacccattttcaaaaactcgtaccttgacaacaacagcaatggtaacagcgcaagagtcccacatggctctcctccacagttgggcgcgcgtagaaagtcgtcttttaagtacgaggactttaagaaggacatctataaccagcttcacatgtttggagagaagtaa

SEQ ID NO: 79909 - DNA, 291 bp, Saccharomyces pastorianus
tctagaggatcccggcgaatcggcattagccgccgaagtcgcgctcaacgcaaacatctggaccccacggactatcgatttttagggctcgggcattcggtcatcggagacgaccacacgccattcctggccgccggagtacccgtattacatgcaatcccgctaccattcccaagtacatggcacaccgtggatgatgacttccggcacttagacgccgcggagactcgtcactgggcgctgcttgtgtgcgaatttgtagtacagtcactacgctcccgtaaccagtga

SEQ ID NO: 79910 - DNA, 1359 bp, Saccharomyces pastorianus
atgaaaaccttgagcaacttttgggcagatcgatctgcgtatttgtggaaaccccttgtttatccaacctgtccttcggaacacatttttactgatagtgacgttataatccgcgaagatgaaccaagttccttgatcgcattttgcttgagtacttctgactatagaaataaaatgatgaacttgaatgcccaacaacaacagcagcagcaaacagcagaagctgctcctgccaaaacaggaggaaacagtggaggaactacgcaaaccggggatccttctgttaacatttctccctcagtttctacaacttctcataataaggggagggactcagaaatttcatccttagtaaccaccaaagagggcttgttgaacacccctcccattgaaggcacccgagataggaccccacaagaatcacaaacgcattcccaagcaaatttagatactcttcaagaattagagaaaattatgacaaaaaaaacagccacgcacttgagatatcaatttgaggagggtttaacggtaatgtcatgtaaaattttcttcacagaacattttgacgtgtttagaaagatttgtgattgtcaagaaaacttcattcaaagtttgtcaagatgtgttaaatgggattccaatgggggaaaaagtgggagcgggtttttaaagactttggatgatagatttattataaaggagctgtcacacgcagaactggaagccttcataaaatttgcaccaagttattttgaatacatggcacaagcaatgttccatgatttgcccacgactttggctaaagtatttgggttttatcaaattcaagtaaaaagctctatttcaagttctaaaagttataaaatggatgttatcattatggagaacttattttatgagaagaaaacaacaagaatttttgatttgaagggttccatgagaaatagacatgtcgaacaaacaggtaaagctaatgaagtgttgttggatgaaaatatggtagagtatatttacgaatcacctattcatgttcgcgaatatgacaagaaacttttaagagcttctgtttggaacgacacattatttttggccaaaatgaatgtgatggattattccttagtcattggtattgacaatgaagggtatactttgacagtaggaatcattgatttcattcgaacgtttacatgggacaaaaaattagaaagttgggtcaaagagaaaggcctagtagggggggccagtgtgatcaagcagcctaccgttgttacaccaagacaatataaaaaacgttttagggaagcaatggagaggtatattttgatggttcctgatccgtggtatagggaaggaaattaa

SEQ ID NO: 79911 - DNA, 6108 bp, Saccharomyces pastorianus
  modified_base (1715)..(1747): a, c, g, t, unknown, or other
atgtcatcggatgaaccccatgcatctatatcctttccagatggctcacatgtccggtcgtcctccactggtacttcatctgtgaacacaatcgatgctaccttatccagaccgaactatattaagaaaccgtccctgcacattatgtcgacatctacgacgtcgactacgacggatctagtgacaaacccaattctgagcaatatctccgtgccaaaaataagcccccccacatcatcctcgatagcaacagcgacatcaacaagtcacgtgaccggcactgcgtcgcattcgaatattaaagctaatgctaacactagtaccagcgtgaataagaaaaatatgccgccaacaactagtgggaggataccctctaacaccatcaagagatatccgagtcgctataagccttctcactcgctgcagctgcccattaagaacgactccaactttaaacgatctagcatatatgcctccaaatccactgttactgctatccccattaggaacaatcggccaatttccatgcagaattcctatgcgcgcactcctgacagcgatcatgacgacgttggcgatgaagtgtcttcgataaagagtgcctcttcttcgttgaccgcatccctgtccaagagtttcctgttcgcattttataacaaccgcaagaaggacaagaccagtaacaatggtgtcctctcaaaggaatattggatgaaggacgagagttctaaagaatgtttcagttgtggtaaaacgtttaacactttcagaaggaaacaccactgcaggatatgcggccaaattttttgcagcagttgcactctcttgatagatggtgatcgattcggctgtcatgccaagatgcgagtatgttacaattgttatgagcatgcagacacatacgaggactccagtgatgaggagaatgattctacaatgcaattgaatgagccaaggtctcgctctcgctctcgttcttccaataccaatccatattctcattcacattcgcatttgcatctcatttcacaggacaaccataacggtaccgatctccatgatccagtagcagcaacggataaccctcaacagcagaatgaggtctacctattaaatgacgatgacgtacaaagtataatgacctcaggtgaagattctaaattgttcatttctacacccccaccaccaccgaagatggccatcccagcaacaaagcaaggcggatcgctggaaatctcattcgattcggaaaacgatagggctttgcattatcaagatgacaaccccggtcgccatcatcaccttgattccgtgcccacaaggtacactatcagagatatggacaatatatcacattacgataccaactctaattccactttgaggccacattataacaccaataacagcactattaccatcaacaacctcaacaacactacttccaacaacagcaactataacaataccaatagcaacagcaacatcaataatcctgcgcattccttaagaaggtctattttccattatgtaagcagcaatagtgttaacaaggacagtaacaatagctctgcaacacccgcttcgtctgcacaatcttcttccatactggatcctgccaatcgtattatcgggaattatgctcatagaaattacaagtttaaattcaactacaattccaaaggtccttcgcaacaaaatgacacggcaaatgnnnnnnnnnnnnnnnnnnnnnnnnnnnnnnnnnacagtgccagcggtattgctgacaacaataacattccctcaaacgacaatggcacgacgttcactctagataagaagaaaagaaacccactgacaaaatctaaatctacatccgcttacctagaatatcctctaaacgaggaagactcttctgaggacgaaggctccatgtccatatattctgtattgaatgatgaccataaaactgacaatccaattagatcaatgaggaactccacaaaatcttttcaacgagcgcaagcttcactacagcggatgaggtttagaaggaaaagtaaaagcaagcattttcccaacaactcgaaaagttccatttatagagacttaaatttcttgaccaatagtactcccaatttactttctgtagtaagcgacgacaatctatacgacgattcttctcctttgcaagacaaggcctcttcatccgctgcaagcagactcactgacagaaaattcagtaatagcagtggcagcaataataatagcaatagtaatagcaatatcaacaccgatccttggaagagaatcgctagtatatcgggattcaaactgaaaaaggaaaaaaagagagaattaaatgaagtctctcttttacacatgcatgccctattaaaacaattattgaatgatcaagaaatttccaatcctcaagaatggataacccttctagatggcgctttgcgtaaagttttaaggaccatcctgaacgcgagggatttgaacaccttagattttagacaaacttacgttaagataaaaagaattagtggtggatctcctcaaaattcagaatatatcgatggggttgtcttttcgaaagcattgccgtcgaaaacaatgccacgacatttgaaaaacccaaggatactattaatcatgtttccactggagtaccaaaagaacaataaccactttctaagtatagagtccgtcttcaggcaagagcgcgaatatttggataaacttgtttcgagattaaagtcattacatcctgatattatatacgtcggcgccaatgttagtgggtacgcgttagaactattaaatgactcaggcattgtcgtacagtttaatatgaaaccacaagtcattgaaagaattgccaagctaacagaagcagatattgccatttctgtggataagttggctacgaatattaagatgggtgaatgtgaaacttttgaagttaaaagctacatttatggaaacatcagtaaaacatatacatttcttcggggctgtaacccagaacttggtggaacaattttgttaagaggtgatagtcttgaaaacttgagaaaaatcaaacaagtctctgaatttatggtctacgcaattttttcattgaagttggaaagttcattttttaacgataatttcatacaactttctacagatgtttatttgaagagagctgaatccaaaaaactgcaagttttcgaaggttattttgcagatttcttgatcaaattcaataacagaattttgactgtatcaccaacggtagattttcccattccctttttattggaaaaagccagaggcttggaaaagaagctcatagaaaggatcaatcaatatgaaagcgaatctgatttagatcggcaaacgcaactaaatatgcttcaaggcttagaatcgactatcactaagaaacacttaggaaatttaataaaattcctgcatgaaatggaaattgaaaatttagagcttgagtttcagaagagaagtcgtcaatgggaggtttcatattcatcatcacagaacttacttggtacgggctcacaccagtctataacagttctctactcaatggtttcaacaaagactgccacaccttgcgttggccctcaaattgttactattgactatttttgggacagtgatatttccattggtcagtttatcgagaacgtcgtgggaactgccaggtatccctgccaacaaggctgtaatggtctgtatttggatcattatagaagctatgttcatgggtcaggaaaagtagacgttttaatcgaaaaattccaaactagattaccaaaattaaaagatattatcctcacgtggagttattgtaaaaaatgtgggacatctactccgattttacaaattagcgaaaaaacctggaattattctttcggtaaatatttagaagtcatgttttggagttacaaagatagcgtgacaggaattgggaaatgtcctcatgatttcactaaagatcatgtcaaatactttggttacaatgatttagtggttcgactagaatattctgatttagaagttcatgaattgataaccccaccacgcaaaataaaatggaaacctcatatcgacatcaaactgaaggtggaactatactataagattctggaaaagatcaataatttctatgggagtgtcctaagtcggttggaacgtattaaattggatagtatgactaaagataaagttcttagtggacaagctaaaattatcgaattgaagagcaatgctacagaggagcaaaaattaatgttgcaagacctggatactttttacgcagatagtccttgcgatcaacatttaccattgaacctggttatcaaatctctatacgataaggctgtaaattggaactctacatttgcgatatttgcaaaaagctatttgccttctgaaactgatattagtcgtatcacggccaagcagctgaaaaaactgttttacgattcttcaagaaaagacagcgaagacaaaaaatcacttcatgatgaaaaggcgaagacgaggaaaccagaaaagaacgaattaccgttagaggaattgaaagatgtcgaaaagccgaaaattgatagcaagaatacgacagagaatcgtgacataacgaacgaaccacagaatgccgtgacgataaccactcttaaagacgacactccaattattccaacaagtggtactagtcacttgacagttacaccttctgcatcgtcggtttcttcttctttgacccctcaaaccgaagaacgtccgccaataagcagaagtggaacaggtatatctacgactcatgataaaagcactagacctaacataagaaaaatgagtagtgatagtagtttatgtggactagcatcacttgctaatgaatatagtaaaaataataaggtgagtaagctagctacatttttcgatcaaatgcattttgatgccctgtcgaaagaatttgaactggaacgtgaaagggaaagattacaacttaataaggataaataccaagccatacgattacaaacatccacaccaattgtggaaatttataaaaatgtcaaagacgcagttgatgaaccgcttcactccagaagttcaggcaataatttgtcatctgcgaatgttaagactttggaggcacctgtgggagaacattctcgggccaataattgtaatcctcctaatttagatcaaaacttggaaactgaactagaaaattccattagccaatggggagaaaacattttgaacccctctggaaagaccaccgcaagtactcatttaacttctaagccagtagtaaaagaaacttcagaaaatccgaagtcaatagttagagaatcagataattcaaagtcggagccgcttccacctgtaataacaacaacaactgtcaataaggtagaatccactccacaacctgaaaaatcattattgatgaaaaccttgagcaacttttgggcagatcgatctgcgtatttgtggaaaccccttgtttatccaacctgtccttcggaacacatttttaccgatagtgacgttataatccgcgaagatgaaccaagttccttgatcgcattttgcttgagtacttctgactatagaaataaaatgatgaacttgaatgcccagcaacaacagcagcagcaaacagcagaagctgctcctgccaaaacaggaggaaacagtggaggaactacgcaaaccggggatccttctgttaacatttctccctcagtttctacaacttctcataataagggaagggactcagaaatttcatccttagtaaccactaaagagggcttgttgaacacccctcccattgaaggcgcccgagataggaccccacaagaatcacaaacgcattcccaagcaaatttagatactcttcaagaattagagaaaattatgacaaaaaaaacagccacacacttgagatatcaatttgaggagggtttaacggtaatgtcatgtaaaattttcttcactgaacattttgacgtgtttagaaagatttgtgattgtcaagaaaacttcattcaaagtttgtcaagatgtgttaaatgggattccaatgggggaaaa

SEQ ID NO: 79912 - DNA, 537 bp, Saccharomyces pastorianus
atgagcaacaataaactagacagcgatgatagcaacatggaagaagctgcagccgatgattcatcgctcgataccaccagtatcgatgcgctgagtgacgaggaaaacccgacaagactcgcaagagaaccatatgtggatgcatcaagaaagacaatgggtaggatgatacgttactcttctcaaaagctatcccgaagagctgccagaacattgggtcagattttccccatcaaagttacatcgttgttggaatcctcgcgccattttgcgtctttgaaacttcccgttgaaaccaattcccatgtaatgaccatatcaagtataggctctccaatagatatagacacatccgagtatccggaactcttcgaaactggcaattccgcaagtacagagtcctaccatgagcctgttatgaagatggtccccatcagggtcgtttcctcggatggatacctatacaactttgttatggacccggagagaggcggcgattgcttaatattgtcacagtattccatcttgatggattga

SEQ ID NO: 79913 - DNA, 255 bp, Saccharomyces pastorianus
atggtcatcgaagctcataagggcgagattgctgcaatggcaattagttttgatgggacactaatggctaccgcctctgataaaggtactatcatcaggtctttgacattgaaacgggtgataagatctaccaattcaggagagggacgtacgcgacaagaatttactccatatcattcagtgaagatagccagtacttggcggttaccggctcttccaaaaccgtgcatatcttcaaattggggcattcaatga

SEQ ID NO: 79914 - DNA, 546 bp, Saccharomyces pastorianus
atgtctgattcatcacctactatcaactttattaatttcaatcaaaccggaacgtgtatttcccttggaacgtcgaaaggtttcaaaatattcaattgtgagcccttcggaaaattttattcagaggacagtgggggctatgctatcgtcgagatgttgttctccacctcgttactagccctcgttgggataggcgatcaacctgcgctttcaccaaggagattgcgtataatcaacacaaaaaaacattctattatctgtgaggtgactttccctacttctattctgagtgtgaaaatgaataagtctcgattggtggtacttttacaagagcagatttatatttatgatatcaacaccatgagactattgcatactatagaaacaaaccctaacccacgtggccttatggctatgtctccttcggtagccaacagctatttagtgtatccatcaccaccaaaagttattaactccgaaattaaagctcatgccaccacaacaatatcacattgtcagttggtggcaacacaggggatcctctag

SEQ ID NO: 79915 - DNA, 555 bp, Saccharomyces pastorianus
atgaatatgatagaaaatgttgagaaaaaggaggcagcattaaaaacaatgattaaaacgattgaaaaagataagatgaaaatccaagagactatatcgaagttgaacgaatataaaagagaaactttagtcaaaacatgggagaaagtgacacttgattttggtaatatttttgctgaccttttaccaaattcatttgcaaaattggttccatgcgaaggtaaggacgtaacgcagggtttagaggttaaagtaaagcttggtaatatatggaaggaaagtttgattgaattgtccggtgggcaaaggtcgttgattgctttgtcattgattatggcattgttgcaatttcgaccagcgcctatgtatattttggatgaagttgatgctgctcttgatttaagtcatacgcaaaatataggtcatttgattaaaacaaggtttaaaggatctcagttcattgtagtctcgcttaaagaaggtatgtttgccaatgctaatagggtcttcaggacgagatttcaagatggtacctccgtagttagtataatgtga

SEQ ID NO: 79916 - DNA, 990 bp, Saccharomyces pastorianus
atgtatacgaccacaggtacattgtctggtggtagtagaaatacctctgaatcgttattagttgatattcaagaatacaatcaaattcaaaaacaaattgagaccattcaggctgatctcaaccatgtaacggaagagctacagacgcaatatgctacatcgcaaaaaacaaagaccattcaaagtgatttaaatctctcgttgcataaattggatttggctaagcgtaatctcgacgcgaatccatcttcccaaataattgcgaggaatgaagaaattttgagggacattggagaatgtgagaatgaaatcaaaaccaagcaaatgagcttaaagaaatgtcaagaagaagtttcgaccattgaaaaagacatgaaggagtacgatagcgataaaggatccaagttaaatgaattaaagaaggaattgaaactattggcgaaagagctggaggagcaggaatcggagtcagaacgtaaatatgacttgtttcaaaacttggaattagaaacagagcaattgagctcagaactagattctaataagacgctattgcaaaaccatttgaaatctattgaaagtttgaaattggaaaattctgatttggagggaaagatacgaggtgttgaagacgaccttgtaacagtccagacagaactgaacgaagaaaagaaaaggttgatggacattgatgatgaactaaatgaattagaaacattgataaagaaaaaacaggacgagaaaaaaaacagtgaattagaactacaaaaattggtccatgacttgaacaaatataagtctaatacgaacaacatggaaaagagaattgaagatctacgacagaaacacgaatttcttgaggattttgatctggtgacaaatatcgtcaaacaaaatgagggtatcgatttggatacttacagagaaaggagtaaacaattgaacgagaagtttcaagagcttagaaaaaagttaatccaaatattatga

SEQ ID NO: 79917 - DNA, 2007 bp, Saccharomyces pastorianus
atgaaggtagaggaattgattattgatggtttcaaatcatacgctacaagaacagtcattactgattgggaccctcaattcaatgctattacaggtctaaatgggtccggtaagtcgaacattttggacgccatttgcttcgtgctcggtatagcatcaatgagcactgtgcgagcatctagcctgcaagatttgatctataagcgtggtcaagcaggtgttaccaaggcaagcgtaaccattgtttttgataataccgataaatcaaattctcccattgggttcactaactctcctcaaatctctgttacaaggcaagttgtgcttggtggaacttctaaatatctgataaatgggcatagggcacctcaacagtcggttttgcaactatttcaatccgtgcagttaaatatcaataatcctaattttttaatcatgcaaggtaaaattaccaaggttttgaatatgaaaccctcagagatcttatcactgattgaagaggcagcagggacaaaaatgttcgaggatcgtagggaaaaggcagaaagaacaatgtctaagaaagaaactaaattacaggagaacaggactctgttaactgaagagatcgaacctaaactggaaaaacttcgaaacgaaaagagaatgttcctagaatttcagtctactcagactgatttggaaaaaactgaacgaattgttgtatcctatgattactataacattaaacataaacatacatcaataagagaaactctggagaacggtgagactcgtatgaaaatgttaaatgaatttgttaagaaaacttccgaagaaatagacagtttgaatgaggatgtcgaggaaatcaaacttcagaaagaaaaagaactacacaaagaaggcacaatctccaagttggaaaataaggagaacggtcttttaaatgaaatttctcgtttgaaaacttcactgtcgataaaagtagaaaatttgaatgatactactgaaaaatcaaaggctctggagtcagaaattgcaagttcctctgcaaagctaatcgaaaaaaaatcggcatacgctaacactgaaaaggattataaaatggtgcaggaacaactcagtaaacaaagggatctttataaacgaaaagaagaattagtttccactttaaccacaggtatttcctcgaccggtgccgcagacggtggttataacgcacagttggccaaggcaaagactgagctgaatgaagtctccttggcgataaaaaaatcaagcatgaaaatggagttgttgaagaaagagctattgacaattgaacctaaattaaaggaggccacgaaagataacgagttaaatgtgaagcatgttaaacaatgccaagaaacgtgcgataaactacgagcccgactagtcgaatatgggtttgatccatcacgaattaaagacctgaagcaaagagaggataaattgaagagccattattatcaaacatgtaagaactctgaatatttaaaaagacgcgtaacaaatctggaatttaactatacgaaaccttatcctaattttgaagccagctttgtccatggggtggtgggtcaacttttccagatagataatgataatattcgctatgctactgctttgcaaacttgtgccggaggtaggctattcaatgttgttgttcaagattctcagacggccactcagctattagaaagaggaagattacgcaagcgtgttaccatcatacctcttgataagatatatacgaggccaataagttcacaagtgcttgatttagccaagaaaattgctcctgggaaagttgaattggcaataaatttaataaggtttgatgaatctatcactaaagcaatggaatttatttttggaaatagtttaatctgtgaagatccggaaacagcaaagaaaattaccttccatccaaagatccgtgctagaagtatcacccttcaaggtgatgtatacgatccagaggtacatgtctggtgtagtaga

SEQ ID NO: 79918 - DNA, 156 bp, Saccharomyces pastorianus
atgaatccagttgatcaccctcacggtggtggtaaccatcaacatattggtaaggcttctaccatctctagaggtgctgtttctggtcaaaaggccggtttgattgccgccagaagaactggtttgttacgtggttctcaaaagacccaagattag

SEQ ID NO: 79919 - DNA, 546 bp, Saccharomyces pastorianus
atggagtcgccttcgcctacttcctcgccttccttgcctacacgtttcacgccatgtcctgtggccgtattgccgtcttcgtcatcgccctcctggtccttctccactagttgtatgcccgagtctacttgctccgagatcagtaccagtttcttcgacacattcaactcctccagcgacttgttcaggtcaagaatctgtttactcagtgataatcggtcgttcagcatcttttcagattccttcacatatttcagtttttccatctccagttgcgtttctagatcgcacagctttgtaaacttgctctctaatttctccatggtcagcttgactaactcttggattatcgcttggctttcttcaatgtacttttcggagatctctctcgacttatcagagaccttacccaatttgtcgtcgccttgcagtagcgtctggacagcatcattcacgcattccatcaacttcgaaccggacacactaccatcgcggctgtcgccacccttaccattcagcgttgaaccaacaacttcttggatgtag

SEQ ID NO: 79920 - DNA, 1257 bp, Saccharomyces pastorianus
atgggatatttttaccgcttttggtacaatattttctcttttctaaggctaaatgagctctgctgttcgctacattccaagttgggacctttattaaatcatctaaggattgcctggtactatttaaagccatatacagacaatgtgaagaatgtactagagaatccatttaactcctctacggattggatgaaatacggctccttcagcgctgatggcacgctcaccaaacccatttttgagacagactcggaaacagaggattatgaggatgaagatgaggatgaagatgaggatgaggatgatgtcggaattgaggatgaaaataaagaatacgagttcgatggagtacaggatggccacgggaactcacaactcgtcactgctgctattttgcaggatttgtcaaagattatcattggttccaatagccatgcagaattggaaacttacgaggcagaatcattaaaaatggaatatgaagcatggattaaggctatagattcgaaaatacacagtgcgatggcacttttggattcagagatacagtctgtgttcgaggccgaggtgcgaaataaatctatagaaatcactaggaatcttgatgaccttaacactaccgttaatgagcaattagtgtttctagatttaaaaatcaaagatattaattgtacctctaaattcgatcctgtgcaaaataaaataaagtattttgatgaatcgggtcaagttgaactggaagcttacattaccaaatcatctatcacatcgatactgaagaattataaaatacatttgttagactttgaaaaatcactgtttcattcattagattcttttcttaccgaaatggctaaactggcagaatcgattcgtcttgaaaacgtcgaagtgtacgaagagtggggcgatgtaatgataagtcaatggtcgcaaagaatggcatatatggacgtcagaggtctccatttggaagatcaatacgatccagcctatatagaagagaatcattccaactggctccgtttcatggaattgaaaaagaaagttatttctgagaggaaccgtctggtaaaacatgatctggatatgactttgatactggaatggattactaaactaaaagctgatttccagaacacaaaaaataatattcaagatacctttctgcaacgaatgaatactgcggatactttattcaaaaaccgtgaactaaaggaacaactagaggaagaatttgtacggcaagaacattga

SEQ ID NO: 79921 - DNA, 192 bp, Saccharomyces pastorianus
atgaaggccgttttcaaagtaacgactgctttgctggcttgcgtgtttattgcaaggtatctggtctgtcagcaaatggtctgggaaactttgccacagatttacagcccatttgccggcatactgaattttcagttggctcactattcgattctaaattggttgagggttcagcggtttctgactatttag

SEQ ID NO: 79922 - DNA, 3012 bp, Saccharomyces pastorianus
  modified_base (2860)..(2917): a, c, g, t, unknown, or other
atgtcgttttggccatttggacagaatcttaatcactctaatattaataagatcctagatgaatattttcatgtgctacacgaactggaaaggattaacccaagcgttggtaaggccattcccgctattttcaacaacgttcaggagcgaggtacaagtgactccctagattctattccggaggagtatagtcatggtgatgaagtgaaaacggcacgtggagatcagaagagtcgatttgagaaggatgatcagcaagaacggtatgagaaagaggaagaggaacggagcatgaactctagcgaatcttccactacatctttttcttctgggtcaacttctaaaacagatctagatgaggaggatatcaacaatgctactgctcccatgatggtcaccacaaagaatttggataactcttttattgaaagaatgcttgtagagacagagctgctgaacgaattatcgagacaaaacaagacgctacttgacttcatttgctttggatttttctttgataagaaaactaataagaaagtgaataatatggaatatctggtcgaccaactgatggaatgtatctcgaagattaaaaccgccaccacagtggatttgaataacctgatagattatcaagaacagcaacagcttgatgatagctcgcaagaggacatttatgtggaatctgatacggagcaagaagaggagaaagaggacgataataacagcaataacaagaagagacgaaaacgcggaagctcctcgtttggtaacgatgatatcaacaacaatgacgacgacgacgatgcgaatgaggacgatgaatctgcctatttgacaaaggccaccataatatctgaaatcttttccttagacatatggttgattagcgagtcattagttaaaaaccaatcatacttaaacaagatttggtctatcatcaaccagccaaatttcaattctgaaaactctcccttggtacccatattcttaaagattaaccaaaatctgttgttaaccaggcaggatcaatatttaaattttattcgaacggagagaagctttgttgatgatatgttgaagcatgttgatatttccctgttgatggattttttcttgaaaataatatccacagataagattgaatcacccacgggaataattgaattagtatatgatcaaaacttgatcagcaaatgcttaaactttctaaataacaaagagtccccagctgacatccaagcatgtgtgggtgatttcttaaaggctctgattgccatttctgctaatgcacccttggatgatatttccattggtccaaactccttgacgagacagctagcatctcccgaatccattgcaaagctagtcgatatcatgatcaaccaaagaggtgccgcattaaataccacagtttcgattgtcattgagctgataaggaaaaacaattcagactacgatcaagttaatcttttaaccactactataaagactcatccaccttcaaatagagatccaatatatttaggctatctacttcggaaattttcaaaccatttgtccgattttttccaaatcattctagatattgaaaatgacgccaacatcccattacatgaaaatcagttgcacgaaaaatttaaacctttaggatttgaaagattcaaagtggtggaattaatcgccgagttactgcattgctctaatatgggattaatgaattccaaaagggcagaaagaatagccagaagaagagataaagtaagaagccagttatcccatcatttacaagatgcattaaacgatctgagtatcgaagaaaaggagcaacttaaaacgaagcactctccaacacgtgacactgatcacgacctaaaaaataacaacggtaaaatagataacgacaataatgataatgatgatgaaagtgattatggcgacgaaatagacgagagcttcgaaattccatacatcaatatgaagcaaaacataaaacttaggaccgaccccacggtcggtgacctattcaaaatcaaactatatgatacgcgaattgtttccaaaataatggaactattcttaacacatccttggaacaatttttggcataatgttatattcgacataattcagcaaatcttcaatggaagaatggatttttcctataattccttccttgttttgtctctgtttaacttaaagagctcctatcaatttatgactgatatcgtcatatcagatgaaaaaggaacggatgtttcccgattttctcccgttattagagacccaaattttgatttcaaaataactacagatttcatattaaggggctaccaagattcatataaattttatgagctaaggaaaatgaatttgggatatatgggccatattgtcttgattgccgaagaagtggtcaaattttctaaattgtacaaagtagaactaatatctcccgatattcaagtaattttacaaaccgaagaatggcaatactactccgaagaagtcttaaacgaaacaagaatgatgtactctaaaattcttggcggtggaagttatattgatgatggaaatggtaacatcattccgcagctgcctgacaatactactgtattaactccaaatggtgatgcaagtaataataatgaaatccttgattcagataccgggagtagtaatggaacaagtggtggcggccaattaatcaatgttgagtctctagaagaacagttgtccttatctacagaatctgatttacacaacaagttaagggaaatgttaatcaatagggctcaagaagacgttgataataagaacacggaaaatggggttttcatactggggccgccggaggacnnnnnnnnnnnnnnnnnnnnnnnnnnnnnnnnnnnnnnnnnnnnnnnnnnnnnnnnnnacaacgataataacgataataatgataatgacaatgataatactcgtaattataatgaagatgctgataatgataatgattatgatcatgaatga

SEQ ID NO: 79923 - DNA, 510 bp, Saccharomyces pastorianus
atgaagcctaagacttggttcctgctggcctttatttggatagtcgttaatattgggcagtatatcatttctattattcaatatcgttctcaaagatcaagaattgaaaacttcatcagtcagtgtaaacaacaggatgataccaatggactaggcgtaaaacaactaacgtttaaacaacatgaaaaggatgagggtaaaagtttggttgtaaggtttagcgatgtctatgttgtagagcctgatggaagtgaaacactaatttcgccagataccttggataaaccttcagtaaagaactgtttgttttggagaatacctgcttcggtttggaacatgacgtttggcaaatctgttggtagcgcaggaaaagaagaaataataacggatagtaaaaagtatgatggtaaccaatcaaaaaaggggaacaaagtaaaaaagggttctgcaaagaaaggccaaaagaaaatggaattgcctaacggtaaagtgatctattcacgtaaatga

SEQ ID NO: 79924 - DNA, 3141 bp, Saccharomyces pastorianus
atgcaatcagaggcttttcctagtatttatgagagtaacgagaactgcataatttcttcaccaaccggatcaggcaagactgtattatttgaattggcaatattacgtcttataaaggaaacaaatagtgataccaataacaccaaaattatatacatcgcgccaaccaaatctctatgttacgagatgtacaagaactggtttccttcctttgtgaatctttctgttggtatgcttactagtgatacctcttttctggaaactgaaaaggctaaaaaatgtaacataataattacgacaccagaaaaatgggatttgttaacaagaagatggtccgattacagccgattattcgaattggtcaaacttgtcctagttgatgagattcataccataaaggagaaaagaggagcatctttggaagtaattctgacaaggatgaatacaatgtgtcaaaacattcggtttgtcgctttaagtgcaacagttccaaatatagaagacctagcattgtggctcaaaactaacaacgagcttcctgcaaatattctttcttttgacgaatcgtacaggcaagttcagttaacgaagtttgtttatgggtactccttcaattgcaaaaatgacttccaaaaagatgctatatataattcaaaattgattgaaataattgaaaagcatgccgataatcgtcccgtactaatattttgtccgactagggcttcaactatatcaacagcaaaatttttattaaataatcatattttttcaaaaagtaagaaaagatgtaatcataatccctccgataaaatattaaatgaatgtatgcaacaaggtatcgctttccatcatgctggaatttctttagaagaccgtactgccgttgagaaagaatttcttgcaggttcaattaatatattgtgttcaacttcaacgttagctgttggtgtgaaccttcccgcatatttggtcattatcaaaggcaccaaaagttggaactcttctgaaatccaagagtattcagacctagatatactgcaaatgattgggcgggcaggaagacctcaatttgaaactcacgggtgcgcagtaatcatgacagactctaaaatgaagcaaacatatgaaaacttaattcatggaactgacgttttggaaagttcattacatttgaatttgatcgagcatttagcagcagaaacctctttggaaactgtatattcaattgaaactgcagtaaattggctacgaaacacattcttttacgttagatttgggaagaatccagctgcatatcaagaggtgaacagatacgttagttttcattccgttgaagactctcagataaatcaattctgtcagtatttgcttgacaccttagtaaaagtgaaaataatcgatatcagcaatggggagtacaaatctacagcgtacggaaatgcaatgacgcgacattatatatcctttgagtcgatgaaacaattcattaacgcaaaaaaatttctatcattacaagggatactaaatttactggccacttctgaagagttttcagttatgagggtgaggcacaatgaaaaaaaattgttcaaagaaatcaatttatcgccacttttgaaatatccatttttaaccgagaagaaacagagccaaataattgacagggttagtcaaaaggtttctcttttgattcaatatgagttaggtgggttagaatttccatcatacgaaggcgcttctaaactacatcaaactcttgttcaggataaattcctcgtttttagacattgttttagattactaaaatgcatggtagacacatttattgaaaaaagtgatggaacatcactgaaaaatactttgttcttactgcgaagcctgaatggtcactgctgggaaaacacgccaatggttcttaggcaattgaaaacaattggactagtttcagtaagaaggctaatacgacatggaattaccaatctagaagaaatggggcatttgtcagatactcagattgaatactatcttaacctcaagattggaaacggcacaaaaattaaaaacgacatttctttgttgccttgtctgaatattagaacaaaactagaaaattgcaaaatagaaaatgaagagttgtggttgacatttaaagttgagattagtgcaacattcaagtctagcatttggcatggtcagcacctctcattagatatcgaaaccgagaaaagctcaggagagttaatcgactttagaagattgcaacttaacaaactacagtcaccaaggggctttagaatttcagcaaaaatatcaccaaaactagaaaaaatagaattctcaattcattgccaagaaatcgccggactcggcaaaacaatcgtatattccactgatcatttggcatcacagttctctgcgaagacaccaaatataaggaaagatctaaatagtttagaaaaatgcctcttctatgaaagcagtagtgacggagaagtggggaaaacgtctagggtttcccataaagatggattagaagaatcgctatcctcagatgatagtatactagattatttgaatgaaaggaagaaatcatcaaaggcggttgaatctgcagcagttattcacccggaggcacactcttcttcacattttagtaatggccgccaagtaagatctaatggcaattacgagtgttttcatagctgcaaagacaaaacgcaatgcagacatttatgttgtaaagagggtattccagtaaagtatataaaagaaaaaggaccctcctcaatcaagccagtatcaaaacctgatcaaatacgccagccactgcttgcaaaaaatatcaacacaacccctcacctggaaaaaagactgaatagtaaaccaaagcagtggcaagaagaaaatacagatattgcgacagttcatacacttccttcaaaaatttataatctatcgcaacagatatcgtctatggaagcgggtgaacaagtcctaaaatcaggccccgaaaactgccctgaaataattcctattgatcttgaatcatccgatagttattctagtaatacagcggcgagctcaataagtgatccgaatggtgatctggatttcttgggttccgatatagagtttgaatga

SEQ ID NO: 79925 - DNA, 447 bp, Saccharomyces pastorianus
atgaaagacttagcggatcccaaaaatatggttaaatgtactagatatgttcagaaattaacacctattacgtactcttgtaatgcaaaaatggagcaattaatcaagttggccaatttggttattgggccacactttcatgacccttcgaatgttaaaaaaaattataaatttgctgtagaagtgacaagaagaaatttcaatacgattgaaagaatggacatcattaatcaagttgtgaagctggtcaataaagagggttctgagtttaatcatactgtggacttgaagaactatgataaattgattctagtggaatgttttaagagcaatatcggaatgtgtgtagtcgatggggattataagaccaaatatcgtaaatacaacgttcaacagctttatgaatcgaaattccgaaaggatgaagataagagtgtaaaacaataa

SEQ ID NO: 79926 - DNA, 297 bp, Saccharomyces pastorianus
atggtcgaaaaatccaatacagatgagagatacaattttacaagaacgaaaaaatggtttttattgatgacctcagaatattacaaactaatgaaaaacagacttttaatgttttgcattatcgcttgctcttttatttgtgctatccaatttcttttctttataattatttggaccaacattgttccacggaagacgcaaagggcaataactaacctaaattacgattatttaacagcccatctaaaagagcaatgcgttccatatgcgaaaattcttgaccaatgtattctctag

SEQ ID NO: 79927 - DNA, 1941 bp, Saccharomyces pastorianus
atgatccctgatatttacaaaatacttgggtactttttaccttctagatggcaagctcaaccaaataacagcttgcagctatctcaagatggtattactcatttacaacctaatcctgattatcactcatacatgacttatgaaagatcaagcgcttcttctgcctctaccagaaatagactgagaacctcttttgagaactctgggaaagtggactttgcagtcacttgggcaaataagtcattgccagacaataagttaactatattctattacgagattaaagttctcagtgtaacgagtacagagagtgctgaaaatagtaacattgttatcggatacaagttagtagagaatgaattaatggaagcgactacaaaaaagagtgtttctcgttcaagcgtggccggttctagtagtagcttaggtggtagtaataacatgagttccaatagagtaccttctacttctttcactatggaaggtactcaaaggcgtgattatatttatgaagggggcgtttcagccatgtctcttaacgtggatggttccataaataagtgtcagaaatacggatttgatcttaatgtatttggctattgcggatttgacggtttgataactaattctacagaacaatctaaggaatatgctaagccttttggtagggatgacgttattggttgtggcataaattttatcgatggctcaatttttttcacgaagaatggtatccatttaggtaacgcattcaccgacttgaatgatctagaattcgtcccatatgtggccttacgacctggaaattctatcaaaacaaattttgggttaaatgaggattttgtatttgacattattggatatcaagataaatggaagagtttggcgtatgagcatatttgtcgtggacgccaaatggacgtttcaattgaagaattcgactctgatgaaagtgaggaagatgaaactgaaaatgggcctgaagaaaataaatcaacaaacgttaatgaagatttgatggatattgatcaagaggatggtgccgctggtaataaggatacaaagaagcttaacgatgagaaggagaacaatctgaagtttcttttgggagaagataataggtttatagatggaaagctagttagaccagacgtgaacaatattaacaacttaagcgtggatgacggttcattgcctaatacattaaacgtgatgataaatgattatttgatccacgaaggattggtggatgttgcaaaggggtttttgaaagatttgcaaaaagatgcggttaatgtcaatgggcaacattctgaaagtaaagatgttatcaggcacaatgaaagacagatcatgaaagaagaacgtatggtaaagataaggcaagaattaagatacttgataaacaaaggtcaaattagcaaatgcatcaattatatcgataacgaaattccagatctgttaaaaaataatctagaattggtatttgagttaaaactagcgaattatctggtgatgattaaaaagagttcatccaaagatgatgacgaaattgaaaatttaattttgaagggtcaagaattatctaatgaatttatctacgatactaaaattccacaatctttgagggataggtttagtggacaattgagtaatgtctctgcattgttagcatattccaatccacttgtggaggcaccaaaggagatatcaggatatttgagtgacgaatacttacaagagagattatttcaagttagtaacaacacaatactaacatttttacataaggatagcgaatgcgcattagagaatgtaatatcaaacactagagctatgctttctacattacttgagtataacgcgttcggttcaaccaactcttcagatccaagatattacaaagctattaacttcgacgaagatgtgttgaatttatga

SEQ ID NO: 79928 - DNA, 939 bp, Saccharomyces pastorianus
atgtctgaatatatggatgacgtagaccgcgaattcattaactgtttgttcccgagctacttgctgcaacagcctgtggcttatgatttatggattttatatttgcaacatagaaaactctttcacaaactgaagaacactaacttaatcaacgctgatgaaaatcccactggcgttggaatgggcaggacaaagttaactgctttaacaaggaaagaaatctggtctaaattgatgaatttgggtgttctaggcacaatttcgtttgaagctgtcaacgacgattacctgattcaagtctataaatatttctatccagacgttaatgattttactttgagatttggtgttaaagattcaaataaaaattcagtgcgagttatgaaagcttcctcagacatgaggaaaaatgctcaggaactattagaacccgttttatccgaacgtgaaatggcgcttaactctaataccagcctggaaaatgacagaaatgacgatgatgatgacgatgatgatgatgacgatgatgacgatgacgatgacgacgacgacgatgaatccgatctggaaagcttagaaggggaagtggatactgacacggacgataacaacgaaggagatggctctgacaatcacgaggaaggtggagaagaaggaagtagaggagctgatgctgatgtgtccagtgcacagcagcgtgccgaaagggttgcggacccatggatatatcaaagatctagatcagctattaatatagaaacagaatcaaggaatttgtgggatacatctgacaagaacagtggtctacaatactacccccctgatcagtctccaagtcttccttttcttctcctagagtatcgtctggtaacgacaaaaatgacaatgaggcaacaaatgttttgtccaacagtggtagcaaaaagaaaaactcaatga

SEQ ID NO: 79929 - DNA, 417 bp, Saccharomyces pastorianus
atgatgcaagaccggggtcatatcgacgaggagtttgaatcttttgccagaacttttatcgccaatcccgatagcaattttacaaacacaaatataaatataataaacacgacggcagctgacttggctgttcccgctgagaccctacaacggcaaaatttttcccaaaaaaaagtaaagtggacgagtcccgaccttagtcccagccctatgattgaaccacaaccggagctagaaccagaactacaccaagatcaagacgccattgcaagtgaagtggacgtaagtatgcaagataccacattcaatgagcaggggccctcgaccccctccgctccgactacagcggttccaagaaggaagatgcgctcctcccttcttactcatcaaagtctactggccactgccaggaaataa

SEQ ID NO: 79930 - DNA, 351 bp, Saccharomyces pastorianus
atgtataaacacaaagcggtagtagttaccatcgttacatttttgatagtggttttaggagtttatgcgtatgatagaagagtgaggagaaaagcgcgtcacacaattttagttgatccaaataatagacaacatgacagtcccaataagacagtttcatgggcagatgatctggaaagcggactcggggcagaagatgatttagaacaagatgagcagttagaaggcggagcacccataagtagcacttctaacaaagcaggatctaaattgaaaactaagaaaaagaagaagtatactagccttccgaacactgaaatcgatgaatcttttgagatgactgatttttaa

SEQ ID NO: 79931 - DNA, 144 bp, Saccharomyces pastorianus
atggcgcaagcctattggattggcccaattgctgccaaatttggtgaatatggtggtgatgtcgcaatgtggttaagtatggcgttctcaggtgttgtataccctccttgtagatacttagagctacgtaaatttggtcgttaa

SEQ ID NO: 79932 - DNA, 1488 bp, Saccharomyces pastorianus
atgaatagggacaacatggacacaacaaagcgcaaagaagatcatacaaagcatactactgatgtaatagaattttacgaagaaggaaccgcagcttcttctttaaacatagccacagaaaaggccaactcaagtccgtccattttgagaagaattatcaacagggcggcatggctttctaagaaagtggacgcaatgggagtagagtctaccggtattcagaggatatctccctatgaacgaggaacatcaaagaaacaatttttgcatgtcgcggggctatggttgagtgccacaggtggtttgtcttccatgtcgtcgtttttattaggccctctgcttttcggtttaagctttagagaatccgtagcctccagtttaatatcggtaacaattggttgcttaattgctgcctattgctcgaccatgggaccgcagtccggttgcagacagatggtaacagctagatacctgttcggatggtggtttgttaaattagttgcattagcttccattatcggtgtcatgggttggtctgtggttaattccgtggttgggggtgaaatgttagctgctatttctaatgataaagtacccctatgggtagggattgtcatagtgaccgtatgctcctttttagttgccattttcggtatcaaacaagtcattaaagtggaaacttacttatccgtacccgtcctgacagcatttttactactgtacatttcatcaagtgataaatacagcttcgtcaatgcatacgtttcaaagggaaatttggactcttccacccgaaagggcaactggatgagttttttttcattatgctatagtattacggctacttgggggtctattacagcagactattatatattgttcccagaagatacaccatatattcaaattttttgcctaacgttttttggaacatttttgcctacctgtttcgtcggaatcttaggtctcttactagcttctgttgccatgtcgtataagccttggtcagtcgagtacgattcccatggaatgggtggtctactttgggcaggttttcagcgttggaacggcttcggaaagttctgcgtggtagtactggtattcagtttggtatccaacaacatcatcaatacgtattcggcagcattctccatccaactttctagtgtgttttgtgcaaaaatccctcgctggttctggtctattgtttgtactataatttgtttggtatgcgcattaataggtcgtaatcattttagtactattttgggaaatttcctaccaatgataggctactggattagcatgtactttatcttattattcgaagagaatttagtattcagaaggtttttcttacatttgtacaccaaagagtttcctacagttacaggagaaataaatggaccggaacttgttggatcttcaaaagaagtggagaaagatgcagttactaatatccatttgttaaaaagaaacataaggtga

SEQ ID NO: 79933 - DNA, 525 bp, Saccharomyces pastorianus
atgatcgttaaagatttagtgcaacaaatgattgatgaagacggcgtcatttcggtggaaaaatgtggtaatattaacatctactggtgctttaaaaatcagacactgcaaaaattgtatgattcaagcgagttgataaaaaaaaagatacaggaagtaaagtgtgatattgccacttataaacaagaactagacaaaacgctagcaactggaaggcgtaaaaaatttacggtaggccaaaaatcatacaatagggaggctctactggaaaagagaaaaaaaattcaggatgaaattaagaaaaagagtaatagtctccaaaaaatagaaagcattagatgggatgcagcaaaaatacaagagaataaacaacagatccgcctaaaaaaagtgcatctggagaaaactactgataacattgagattctcattgattatttatacaagaaattctttttgaagccagaacagataagaaaagaatttggaattccagaagagttcaaggaatttacggaggtttaa

SEQ ID NO: 79934 - DNA, 2505 bp, Saccharomyces pastorianus
atgtcttacaatcatcagcctcaactatctattaactccgtccaatcactcttggagcccgtgacccctccgcctttgggccagatgaacaacaaaagaaaccatcaaaaggctcattcgcttgatctctctggttttaatcagttcatatcatcgacacaatctcccttggctttgatgaacaatacatcaacatcgaattctgctaactctttttccccgaatcctaatgctgctagcaactccactgggctttcagcctcaatggcaaatcctccagccattctaccattaatcaatgagtttgatctggaaatggatggtcccaggagaaaatcaagccacgatttcacggttgttgctccttcgaactctggtgtcaatacctccagtttaattatggaaacaccatcctcttcagtgactcctgctgcatctctcagaaattttagcaatagtaataatgctgcttccaaatgtggagtggataattcgtcatttggtttgagtagctctacgtcttcatctatggtcgaaatcagcgcactaccccttagagatctggattatatcaaacttgccactgaccagtttggctgccgttttcttcaaaaaaaattagaaacccccagtgaatccaatatggtgagagacttgatgtatgaacaaattaagccatttttcttggaccttattttggatccgttcggtaactatttggttcaaaaactatgcgattatttaactgccgagcaaaagacattattaatacaatcaatatatccaaatgttttccaaatatcaatcaatcagtacggaactcgttccttacagaaaattatagacactgtcgataacgaagttcaaatcgatctcattattaagggattttcccaagaatttacttcgattgagcaagtggttactttgataaacgatcttaatggtaaccatgtgattcaaaagtgtattttcaaattctcgccatcaaaatttggtttcatcatagatgctattgtagaacaaaataatatcattaccatttctacccataaacatggttgttgcgtactacaaaaattactaagcgtttgtactttacaacaaattttcaaaatttctgtgaaaattgtgcagttccttcctggattaatcaacgatcagttcggtaattatatcatccaatttctattagatatcaaagaattggacttttacttattggctgagttatttaaccgtttatccaatgaattatgtcaactatcttgtttgaagttctcctcaaatgttgtggaaaaattcattaaaaaattatttagaatcattactggatttattgttaataacaatgggggtgcctcccaaaggactgcagttgcttctgatgacgtgattaatgcttctatgaacattcttttgactaccattgatatattcacagtcaatttaaatgtgctaatcagggataattttggtaattatgcgttacaaacgctattagacgttaagaattattctcctctgcttgcttacaacaaaaatggtaacgcaattgggcaaaacagctctagtacattgaattacggtaacttttgtaacgatttttcattgaaaattggtaacttgattgtccttacaaaagaattacttccaagtattaaaactacatcctatgcaaagaaaattaagttgaaagttaaagcttatgcagaagccacaggtataccattcactgacatatctcctcaagtcactgcaatgagtcataacaatcttcaaacgattaacaacgaaaataagaacccccataacaaaaatagtcataatcataatcataatcataatcataaccatgctcacaataataataacaataataatcaaaagagtcatacccgtcatttttctttaccagctaatgcttaccatagaagaagtaacagctctgtaaccaataatttctcaaaccaatatgcacaagatcagaaaattcactctccgcaacaaattatgaacttcaaccaaaacgcatatccctcgatgggagcaccttctttcaattctcaaactaacccaccattggtaagccataactcgttacaaaacttcgacaaccgccagtttgcaaatttaatggcacaccctaattctgctgcaccaatccattcgttctcatcatctaacattaccaatgtgaatcctaatgtttcaaggggatttaagcagcctggatttatgatgaatgaaaccgacaaaattaatgctaatcacttctcgccatactctaatgcaaatagtcaaaacttcaatgaatcttttgtgcctcgtatgcaatatcaaacggaaggtgcaaactgggattcaagtttgtcaatgaagtcgcagcatattggtcaaggcccatataatcaagttaatatgagccgcaacgctagtatttccaatatgcctgccatgaataccgctagaacatctgatgaacttcaattcactttgccataa

SEQ ID NO: 79935 - DNA, 291 bp, Saccharomyces pastorianus
atgagcaaaaaaaaaaaaaaaaaagaaaagattcgaagatctatgaaaaatttatgcagattcgttgagagttataaggattttactctttatggttataggtttcattctaaaatcaagcataaattttgtgttttgtcttcctcttttcctgtcctctttttttgccatcctctgtcgccattgaagtcgaactttatagatagatttactcttgattctcacgcatctcaggccacctggacactgtacatggttgtgattgttctctttttcagttatcgaaattga

SEQ ID NO: 79936 - DNA, 519 bp, Saccharomyces pastorianus
atgtacgataggattaacgtagatgtgattcatgcagaaagaacagccttacaaagagacaggattattgaacgatttaaatctggtgaattatggtgtttgatctgtaccgacgttttagctcgtggtattgacttcaaaggcgtcaatctggtcatcaattatgacgttccaggatcgtctcaggcttatgttcacagaattggtagaacaggtagaggtgggcggtcaggtaaagctatcacattctatactaagcaagactcagtagctattaaaccaataataaatgtcatgaaacaaagtggttgtgaagtatctgagtggatggataaaatggctaaaatgaccagaaaggagaaagaaagtataaaaaacgggaaagcgcataaagaaagaaagcagattactactgtgcctaagatggatagggccaaaagaagacgtcaacaagaaatgattgcagcatccaaaagaagaagaaatgaagaactttcaaaaaaacactcctcgaaataa

SEQ ID NO: 79937 - DNA, 1038 bp, Saccharomyces pastorianus
atggatatttttagagtattaactagaggagcttccgtgaagaaagagtcaggcccaaaggctaaggcagcagattacagcgttataaatggaaaggatgagaatcataaggaagataataatgaaagccagatcgtgaaagaacttgatttctttcgaaacaagagaatcattagcaaggtagaggatgatagagagaagacaaccgaaaacgattctccaaacaaagaggagaagagcggcaatgatgatggtctgataaaaccagtgattaccaataccgttgaggcatccgcgttgagaaaatcatataagggaaacgtgtcgggtatagatataccacttccaataggttcgtttgaagatttaatttcaaggttttcattcgataggcgtttactgaataacttgattgaaaacgggtttactgagcctaccccaattcaatgtgaatgtattcctgttgctttgaataatagagacgttttggcatgtggtcccacagggtctggtaagacgttagcattcttaattccgctggttcagcagattattgatgacaagcaaactgcagggttgaaagggttaatcatttcgcctacaaaagaattagcgaaccaaatttttattgaatgttttaagctatctcacaagatatttttggagaaaaaaaggcctctgcaagttgcactcttatctaaatctttaggcgctaaattgaaaaacaaggtagttagtgataagaaatatgatataatcatttctaccccattaagactaatcgatgttgtgaaaaacgaagctctcgatctctccaaagttaagcatttgatatttgatgaagctgataaattgtttgataaaacattcgttgaacagagtgacgatattttgagcgcctgtagagagccatcgttgcgtaaagcgatgttttccgcgaccattccatccaatgtggaagagattgcacaaagtataatgatggatcctgttagagttattattggccacaagggaagcagcaaatacaaatattga

SEQ ID NO: 79938 - DNA, 1158 bp, Saccharomyces pastorianus
atggattctcaagaagatggcaatactagtgaggaaagtaaaagaaatagtccagtaaaacataagtccccaaaagatgaagaaaagtcatctaaaatggggactgcaagcaacatattccatgaaaataaagatatacacgaaagatctgaacacacggacgattttaataatggcttaaaactggctccggactctagtccaagcttgaaagagtgtcaatttaaaaattgggaaagtttttggtgtaatacagaaggttacaaaactaaacacatgcagccctttcattttacaagcggattagaagaaataaaggaaccggtcatggaattgaatatttccacttcaccatacaagggacagaggccaaattcagctccaaccgagtattcagctgccacaacagcgtttaccaaaacacaattagaggtgagttttctaaaaaccaacttgcttacatacattaaaaaagagattgacatttgcttgtcaagtgttccattttttgacgacgcagttcaaatgcaaaagaaattcttggaatacagagatattgacttggatgaagaatatgagctcaaaattttgggggaacttttgaatgatttaaacttctttcatatgcaagaaaactctttgctaaatagagagctagcagttcgtagattctccaatcaacctgaaagtcaaaatttaccttccattagggattttagaaatccacttttgccaatgaataaccgcccttctcccccattaggattgaaaagaaacggaaagtccttcgaggaaacctatgatttcacgtccaatacatcaaatttttggggagaaaaagcagaattacaaaactccataaccggtggaacgtcctattttttccactctaacaatatacatcaaacaaaaccttttatgtcatttgaaaatcaaaatgaacttctattccaaagaaaaaattcagattacaagcagcattttaactctggaagaaatatacataatggagtggaatcgaaatcttacagaggtgtggggttaaacgatagttatcaaaagggttatgcagcaatgacaaagtcgtttggaaatatagatttaaatagaatgcccagaagaagtaatgaagaaatgtatagctggtcacgtaattga

SEQ ID NO: 79939 - DNA, 420 bp, Saccharomyces pastorianus
atgaaacgtttactaaccaccgcggcctgtatcatcgttgggacagtttacatttttgttaaagagatggccgaagatggtaaagtaactgctagagatactactatgacatttacttgttttgttttttttgatatgtttaatgctttggcctgcagacataacacaaagtcaatcttcgaaatcggctttttcacgaacaaaatgttcaactacgccgttggactgtctctgttaggtcaaatgtgcgctatatatataccatttttccaaagtatctttaaaactgagaaacttggtatctctgatatactattgttattgctcatcagcagtagcgttttcatcgttgatgaactgagaaaattgtggacgaggaaaaagaatgaagaagactcaacgtatttctcaaatgtttga

SEQ ID NO: 79940 - DNA, 654 bp, Saccharomyces pastorianus
atgccttcgtgggcggcgtgctggcgtgcgcgccttcagcctgccgagcgtcggcaaagccggcggcacgccgcatatcgacctgggcgtgaagggcgaacccgaggcggcggccgaggcattggccttcctgcgggccgaggtgctgcgcctgggtgcatgtgtgcctctgcacgacggccagctgttggcagcgaggaagatgaaacacgatgtcgttgtgatgagggtgaaccttgtaaatgtcataccaagaggaaaagcagccggaaatcaaagggagggtcatgccacagaagggcaaatgatgaagcagcgcatgtcaatggtctcggtgttgcagatctggacgttcttttgggcctaaatggtcgctcgtcggatgtagacatgacaaccacattgccgagtttgaagccacctctgcaaaacggagaaattaaggccgacagcattgacaatcttgatttggcttccctcgatccgcttgagcaaagccctagtatatctatggaacctgttagtatcaatgaaacaggaagcgcatatacaactacgaacacagcactaaacgatattgacattccattctccatcaatgagttgaacgagctatacaaacaagtatcttcgcataactcacattcacaataa

SEQ ID NO: 79941 - DNA, 2550 bp, Saccharomyces pastorianus
atggcaagacgcagattaccagacagaccaccaaatggaataggagccggtgaacggccgagactggtacctaggcctattaacgtacaagactcggtgaaccgactaacgaaaccgttcagggtcccctacaagaacacgcacatcccgcccgctgctggtagaatcgccaccgggtctgataatatcgtaggaggaaggagcttgaggaaaagatcagcgactgtatgttattccggcttggatataaatgcggacgaagcagagtacaacagccaagacataagtttttctcagttgactaaacgacggaaggatgctcttagtgctcaaaggttggccaaggatccgacaagactgagtcatatccagtacactttgagaagatctttcactgtgccaatcaagggatatgtacaaagacacagtctgccattaacgttaggaatgaaaaaaaaaattactccagaacctcgacctctacatgaccccacagacgaatttgccatagtgctttatgacccgtccgttgacggtgaaatgattgtccatgacacatccatggataacaaggaagaagaatcaaagaaaatgatcaagagcacacaggaaaaggataatattaacaaggaaaagaatagccaggaagaaagacccacacaaagaataggacgccatccagctttgatgacaaatggtgtgagaaacaaatcgttacgtgagctactcggtgattcggaaaactctgcggaaaacaagaagaaatttgctagtgtccctgtggttattgatccaaaactggccaagattttaagaccccatcaagtcgaaggggtgagattcttatatcgttgcgttacagggcttgtcatgaaagattatttagaagctgaggcgttcaacacttcaagtgaagatcccttaaagagcgacgagaaggcacttactgaatctcaaaagactgaacaaaacaatagaggggcctacggctgcatcatggccgatgaaatggggctgggtaagacattgcagtgtatagcacttatgtggacattattaagacagggcccgcagggtaaaagacttatcgacaaatgtatcattgtttgtccatcttctttagtcaacaactgggctaatgaattgataaaatggttgggtcccaatactctaactccgttagcggttgatgggaaaaaatcttcaatgggtggtggtaatacaacagtttcgcaagctattcatgcctgggctcaggcacagggaagaaatattgttaagcccgttttaatcatatcgtatgaaacattacgtcgaaatgttgatcaattgaaaaactgcgatgtgggtttaatgctggcagatgaagggcaccgtttgaaaaacggtgactctttaacattcacagctttggatagcatcagttgtcctagaagagttatattatctggtacacccattcaaaacgatctttccgaatattttgctctactgagtttttcgaatcctggcttattaggttccagagcagaatttaggaaaaattttgagaatccaattttgcgagggcgtgatgctgatgctactgataaagaaatcacaaagggcgaggcgcaattacagaagctatctaccattgtctccaaatttattatccgtcgtactaacgatattttggccaaatatttgccttgcaagtatgagcacgttattttcgtaaacttgaagccgttgcagaacgagctctacaataaattaattaagtcaagagaagtgaaaaaagtagtaaaaggtgttggtgggtctcagcccctgagggctattggtattttaaagaagctatgtaatcatcctaatctcttgaattttgaagatgaatttgacgatgaagatgatttggaactacctgacgattataatatgccgggttcaaaagccagggacgtacaaacaaaatattcagctaaattttccattttggaaagatttctccataagataaagaccgaatccgatgataagattgttttgatctccaactatacccaaaccttggacctcattgaaaaaatgtgtagatataagcactacagtgctgtacggttggatggtacaatgtcaattaacaaaagacaaaaattggtggataggttcaacgatcctgaaggccaagagttcatcttcctcttaagttctaaagcaggtgggtgtggtatcaatttgattggtgcaaatcgattaattttgatggatccggattggaatcctgctgctgatcaacaagctttggcacgtgtttggagagacggtcaaaaaaaggattgtttcatttacagattcatatcgactggtaccatagaggaaaaaatctttcaaagacaatctatgaaaatgagtttgagttcatgcgtggtcgatgcgaaagaagacgttgaaaggttgtttagttctgacaacttaagacagttgtttcaaaaaaatgagaatacgatatgtgaaacacacgaaacataccttgtaaacgttgtaatgctcagggtaaacaattaa

SEQ ID NO: 79942 - DNA, 339 bp, Saccharomyces pastorianus
atgcaagtattgaatagagatgagcactcggagcgcaatagaagcttcaaaagtgttcctgaattgatttccgtttacgggtacgctaacttgatctggatacccgtttgtgttatattgaatatattggatatgtccaagcgcctgaggactgttcaagcaattcaatgggcaattgtggctcttgggtgggcacagtcgtcttatttcttgaattctcaaatatcgagtaataataatacggagacacaatcgaacgggaaattttcgctgtccatcatcgttgtcgttgcgctgcatactttattctgtctattgttcaggtttataatattttga

SEQ ID NO: 79943 - DNA, 1125 bp, Saccharomyces pastorianus
atgagaagatacaactatcgtttgttttacatcgtacataacctggtgaacgtggccttcatcttactcaccccaatacactctaggccaggtgttaagttcccatttcttctactaaactgtaccctattattcattcatattatcaatagaatagtatttgcgaaatccttgatgattttgaataagaatgcgaattattcaaaaacaaatttagtccatgtaagattgcccagggctattcttccagattattttgaaccagggtcgcatattagaataagcccttacagaagaattaatcccctctattggttgctaccatcgcatccatacacaattgcgtctttagcagaagacaattcaattgatcttattataaaggaaacctctacagccgagccaggtagccagatagagtctcttcgtagtaatccaaaatcctttcatttagatcaagaaaaaacctatactttgattaatagttatcctccctctgtacccgaagaatgttattctcaaggcacgaatatagctattatatgtggtgggtctggtatatcttttgccctaccactatttaggcatttttttaacaaggagaatgtaaaatacttgaaaatgatctggctgataaaaaattactctgaatatgaacttgttttggattatctcaagacaaatgggttgacttttgagaaaaaactctcgaataataagaggatttcagtatttattagtggagaatacacggcggaaacacggttagacgaaattacgaccaatatcgacgatgaaaactcagaatatgaaatgggatctttcaacaatgaagacgaagacctttcgatttctaatttcaattcagaaaatgcggacagcaatgacaatacgccagagacaagtcatagccccacaaaagagaatggaagcttgatcgaggtaaaatccaaacacagttttactctttccagcgaattgaagagcttcaacaatgaaagtgcacaagtgaaccaaaatgaaacatggttgttttcatgtggtcctccctcgttattacaattgtctaaaaaatattgtaacgatgaaaggatcaactttgtctgtgagacttacggattatga

SEQ ID NO: 79944 - DNA, 435 bp, Saccharomyces pastorianus
atgaaagaatcccctctcataacgttggttaaaagacattccgagacacattttgccaatatcaagtatgggtattatgtgttgataatatcattggtctatctcattggattggctcttttgagagctttcggaaggagaaccccatccagatcgtcgtcagcttttaaaaataagataatttatcggttgtatgatatagatcctgcaattcacttaggtatattgttttttgcagtcttgattccattttattaccattactctttgactacccaatctacggtctatctcaaaagattagggaggttgagttacaccttgatcccgctgaacctattcctcactttaaggcctaattggttccttaggaaaaatgcacctacactgattttataccgttccataaatggttttcacgtattatcaccgtga

SEQ ID NO: 79945 - DNA, 423 bp, Saccharomyces pastorianus
atgtttgcagattcgctaaaacatggcataaatacctcctcaggtatcgtatctgagttaattcattccaaggtaggtggagaattttataattactgtggcccatttattgacgtgcgtgacgtttctaaagcccacctagttgcaattgaaaaaccagaatgtaccggccaaagattagtattgagtgaaggtttattctgctgtcaagaaatcgttgacatcttgaacgaggaattccctcaattaaagggcaagatagctacaggtgaacctgcgaccggtccaagctttttagaaaaaaactcttgcaagtttgacaattctaagacaaaaaaactactgggattccagttttacaatttaaaggattgcatagttgacaccgcggcgcaaatgtcagaagttcaaaatgaagcctaa

SEQ ID NO: 79946 - DNA, 876 bp, Saccharomyces pastorianus
atgaaagagcccaagaaagacggtatcgtaggcgatgaagtatcgaaaaaaattggcagtactgagaatagagcctcacaggatatgtatctctatgaagcgatgccaccaacgctgccccacagggattggaaggactattttgtgatggctactgccacagctgggctgttgtatggtgcatatgaagtaactagaaggtatgtgataccaaatatattaccagaagcaaaaagcaagttggaaggggacaaaaaagaaattgatgatcaattctccaaaatcgatacagtcctcaatgccatcgaagcggagcaagctgagtttaggaaaaaggaaagcgaaacattaaaggaacttagtgacacgattgctgaactgaaacaggcgcttgtgcagacaacaagaagcagggaaaagatcgaagacgaatttagaatagttaagctcgaggtggtcaatatgcaaaatacgatcgacaaatttgtttcagataatgacggcatgcaagagttaaataatatccaaaaagaaatggaatctctgaaaagcttaatgaataaccgtatggaatccggtaatgcgcaggacaatagattattttccatatctcctaatggtatacctggcatagatacgattccatctgcgtctgagattcttgccaaaatgggcatgcaagaagaaagtgataaagaaaaggaaaacggcagcgatgctaataaagatgacaatgctgttccagcgtggaaaaaagcaagagaacaaactattgatagcaacgcctccattccagaatggcaaaaaaataccgccgccaatgagatcagtgtccctgactggcaaaatggacaggtcgaagactccatcccatag

SEQ ID NO: 79947 - DNA, 111 bp, Saccharomyces pastorianus
atgagtgacgtggtcagtaaagatcgtaagacattgttcgactcagcagtatcctttttaaaggatgagtccattaaagatgctccacttttaaagaaaatcgaattttaa

SEQ ID NO: 79948 - DNA, 705 bp, Saccharomyces pastorianus
atgacgaaccaaattaactcattctggagtctccacagcagcacatattataacttagattatctatttgagttaattgaattggttaccccaaaaagtttcctttttgatgttttgaaaacattagaatataaactagccacttatggggtccctggttctgaaaataagaggggatcattggattcagagcatgttttcgattatttcttctactttcttgtactatatgatgtgaaaaccgcggaggaagccagtcaactaatagaatatatggagaacgacgcaaaaaaaggtaagggggacgttgatataaagggagaagacttacatgagaaaaatgactcagctgaggtgaggcaagaaactcaaccaaaagctgaagctacccaagacgatgatttcgatatgctttttggcgagaatgatacaagcactcaagcttacgaagaagaagaagagaatgaggataacgacggcaataatagaacaaacaatgtaccaatgataaaagcagaagaaactcctagtaaaactaataagatatccattttaaagagacattcgtttgcggtacttctgcatgaaagaaaattattgaatgatttagctttggaaaacggcgaaataaccaagacagaaaatgagaaatttatcagttatcacgataagtacttgtgtatgctgaaaacatgcgtattctga

SEQ ID NO: 79949 - DNA, 177 bp, Saccharomyces pastorianus
atggaaaaagaatcagtatacaacttagcactaaaatgtgctgagcggcaattgacctccatggaattttcgaacctttacaaggaattctttaatgaaaagttcccgtctttgattcaagaggaagaagaagatacaacaacaactgcaaatatcaatgaggtcaagaaagcgtcc

SEQ ID NO: 79950 - DNA, 783 bp, Saccharomyces pastorianus
atgataaaatgctttctgcctaaattgaattccgttaggaactccttgctattggcccattttttctccaaatcttgttcattctttgccaaattatcagatactttgataattgatcaagtacgcaaggatttgggcaacgtcatagtaccgaatatcttaagtctagacatgaatagtatgaataaagaattgattgccatagtatcaaagcttttgcaaacaactttaaaactctctccttcaccaattcttttaacttctgccagctgtaaaaatgggtcttttacgctactaaatcagttgtctcaaaccaacaagttactttttaaaagggtttcacagacttttgaggaaaaattacatttcaaagataccaagccatttttaaacaaagattccactaacgaatttgtaggttctccttcattaacctcccctcaatatatcccaagtccactttcttcaacaaaacctccaggatcagtcaattctgctgccaaatacaaagacatgaaacttcttcgttactataaaaacatttggctgaacaataaaattatcaattgggaaatatcgaacccagacttcctatcaaaatattctgcgattacttcttccatattccaagagagctttaattcagttcaaaacttggaccagttactcacagacttgattgagacatcgtttacttgttttgctcaattcgttagcaataagcaatatcatcaggcaaattctaatttgactctgttagaaagaagtgggtcatatttataa

SEQ ID NO: 79951 - DNA, 975 bp, Saccharomyces pastorianus
atgttaaatttacagcctgcgtccgttatcaacaattacttaagagaggaccaaatgatcgacaccagtattttacctaccagtgatgatttggttgttcgtaatttgcaaggcattcaagaagtcgtccataataccaacagtttcatcatttcatccttagatactttagagttagaatcgataaccgaatcgatcacacatgattcgagtaacggactatttcaagtattacacaattttgaatctgtagctccgacaaaacaacgtgagatagtaaaagcctttttatctatatttgaagatgcaataaaagaattgaattataatagaatagccaagatatgtgctcttttgtttttcaacttttcacattcattgaccacaattctatcattttcttcgccagcagcactaatgaaaacattgataaaattcgttgatttgtctggaaatggcagaaatggctcaaacggtaatgatgaaagttcagaatatgaaacgataaatatatctttgtcattttcttgggcaattttactgataatcaacctaacacaaacatatgacatatctgtggtggatgtggcacttaagtatcctgaattgagcataaaaaattcctttataatcaatttcatttcaaatctacctaatgtctcagataagtactatttggaagaatcaaatgtgaatgattcagatatgctaacaaagtctcataataccgttcaaagctggctttgtgatctttttgttaatgggtccataacagatcaattgatccaaaatattgaaacaaggcaattggctaatctcataccatttattgttaaacaggttttgctatctgttgaaataggcgttttaacggatatttcaagtctgataggtggcttcgatatttcttacacctttactattagttgggctaatcaaactttatattggctagaacatgtggggatcctctag

SEQ ID NO: 79952 - DNA, 480 bp, Saccharomyces pastorianus
atggaagaatacttgacctatagacaatataatcatattacactggatggttcctcaaagttggaggaccgtcgagatttggtccatgattggcagactaatccagaaatctttgttttcctcctaagtacaagagcaggtggtctaggtatcaacctgaccgcagctgacactgttatattctatgattcagattggaaccctactattgattcacaggctatggatagggcacataggttgggccaaacgaggcaagtcacagtgtacagattacttgttcgtggtaccatcgaagaaagaatgagggatagagcaaagcaaaaagagcaagttcaacaagtcgtcatggaaggtaagactcaggaaaaaaacattaaaaccattgaagtgggtgaaaatgattccgaagtcactcgtgaaggtagcaaaagcataagtcaagatggaattaaggaagcggcaagtgcattggcatga

SEQ ID NO: 79953 - DNA, 2895 bp, Saccharomyces pastorianus
atgaactcgctgtctttaataacgtccaagaaaataaataaaaatattaccatcaacagtgataggccgaagattgtacgtgaacttatcaaaatgtgcaacaaaaacaagcatcagaagattaagaagaggaggttcaccaattgtattgtcaccgactacaatccaatcgattccaagttgaacatcaaaataactttgaaacagtaccacgtcaaaaggttgaaaaaactgattaacgatgcgaagagagaaagagaaagggaagaggccttgaagaacaacgttggtttggatggtaatgatttggataatgatgaggatggatctgaatcccacaagagaaggaaattaaacaataatactgctaacggtgccgatgatgctaataagagaaaattcaacactagacacgggttgcccacttacggcatgaaaatgaatgctaaggaagcccgtgctatccagaggcattacgacaacacctatataactatttggaaagacatggctcgtaaggattctacgaaaatgtcaagattggttcagcaaatacaatcaatcagatctacaaattttaggaaaacttcctcactttgtgctagagaagccaagaaatggcaatccaagaacttcaaacaaataaaggacttccaaacgagggccagaagaggtattagggaaatgtccaatttttggaagaagaatgagcgtgaagaaagagatctaaagaagaagatagaaaaggaggctatggaacaggcaaagaaggaagaagaggagaaggaatccaaaagacaagctaaaaagctgaactttttgttaacacagacagaattgtattcgcatttcattggaaggaaaatcaaaactaacgaattggaagggaacaatgtttccagtaatgattctgaaagccagaagaatattgacatttcagctttggctccaaataaaaatgactttcacgccattgactttgataacgaaaatgacgaacaattgagactaagagctgctgaaaatgcttccaatgcactggcagaaacaagagcgaaagcgaaacaatttgatgatcatgccaatgcgcatgaggaagaagaggaggaagatgagttgaacttccaaaacccaacctctttaggtgaaataaccatcgagcaaccaaagattttggcatgtactttgaaagaatatcagctcaagggtttgaattggctagctaacctttacgaccagggtatcaatggtatcttagcagatgaaatggggttaggtaaaactgtgcaatctatttccgttttggctcatctagccgagaaccataatatttgggggccctttttggtggtcacacccgcttctactctgcataactgggtcaatgaaatatccaaatttttgcctcaatttaaaattctgccatactggggtaatgccaatgaccgtaaagttcttaggaaattttgggacaggaaaaatctgaggtataataagaatgcgccattccatgtcatggttacatcctatcaaatggttgtcactgatgctaactatttgcagaaaatgaaatggcaatatatgatactggatgaggcccaagctatcaaatcttcacagtcatctagatggaagaacctgttgagttttcattgtcgtaatagattactattaacgggtactcctatccaaaacagtatgcaggaactatgggcacttttacattttatcatgccttctctttttgattctcacgatgaatttaatgaatggttctctaaggatattgaatctcatgcagaagctaataccaaattaaaccaacagcaattacgtcgtttgcatatgattttgaaaccgttcatgttaaggcgtgtcaaaaagaacgtccaatcagaattgggcgacaagattgaaattgatgtcttatgtgatttaactcaaaggcaggctaaattatatcaggttttgaaatctcaaatctctactaactatgatgccattgagaatgccgctacgaatgattctacttccaattctgcttcaaattctggttctgatcagaacttgattaacgcagtcatgcaattcaggaaagtttgtaaccacccggatctttttgaaagggcagatgtagattctccattttccttcactacttttggtaaaactacctcgatgttaactgcatctgttgctaataacaatagcagcgtaattagcaacagtaatatgaatctctctagcatgagcagtaataatatttccaatgggaaattcactgatttgatttactcttcaaggaatccaataaaatatagcctaccaaggttgatttatgaagatttgattttaccgaattacagcaatgacgtggacatagccaataaactgaagaacgtgaaatttaatattttcaacccatcaactaattatgaactgtgcttatttttatctaaattaacaggtgaaccctcgttgaatgaattttttagagtttctactacacccttactcaagcgagtaatagaacgtacaaatggtccaaaaaatactgacagtttaagttttaaaaccattactcaagagctactcgaggttactagaaatgcaccttccgagggcgtaatggcttcattattgaacgttgaaaaacatgcctatgaacgtgagtatctgaactgtatacaacgtggttatcatcccaatgtttcagctcctccggtcaccattgaagttcttggttctagtcatgttaccaatagcataaataatgaactgtttgacccgttgataagtcaggcattatccgatattccagcaataacgcaatataacatgcacgttaaaaagggcatacctgttgaagattttccaaagacaggactattccct

SEQ ID NO: 79954 - DNA, 594 bp, Saccharomyces pastorianus
atgagcatgatcaataaagaatgggcggaataccaatcttttaaaaatgcaaatttatcggacataatcaatgaaaaggacgctgacgaggatgaagaagatgatgaagacgagcttgaagatggtgaagaagacatggaagaagatgaggcaagtactggtaggcataccaatgggaagagcatgcgtgggaatggtattcaaaaatcgagaaagaaggatgctgctgctgctgccgctattgggaaagccataaaggatgatcaaactcatgccgatactgttgttactgttaatggagacgaaaacgaggatggcaataacggtgaagacgaagacaacgacaacgacatgaaaacaacaacgacaacgacaacgacaacgaaaatgaaaatgacaatgacagtgacaatgatgacgaggaagaaaatggagaggaggacgaagaggaagaggaaatcgaggatcttgatgaagaagatttcgccgcctttgaagaacaggatgacaatgacgatgaggactttaatcccgatgtcgagaaaaggagaaagagatcttcctcttcttcttcatccaccaaactatctatga

SEQ ID NO: 79955 - DNA, 897 bp, Saccharomyces pastorianus
atgatatcttgtgagcaattacagaaactaaaggagaacagcgaaaaatcaccggttataaatgatgcttcaacacctgtgaatcaagatttcttcaataaaactttcatttcgcctctgactaaaatgttgagtatactggcgccacaaaagtttcctacggagaatggttccgaaattcctaaagtatcatttttcgagtcagcaagctcaattctccttcctcctttacctgaaagagcgtacataatggatccagattcaagagatcctgtaattattcatgataagatatacaatgaggatgacattccacaatccgaatttgatatcgaagacggtttttttgataaaaagaatatactccttcaggctttttttgcaggaaagaaagaacgtgcgaagtatcgaaatttggaagaaacgattgctcgaaggtggcatgaaggaatggcatggagaaaggttgtcgttgctttaaaacctgatgctcacaacaacattatagtccgaagaaagtttgccaacgcatacggttggcccgttatcgatcatctgatagatgtccacttcaatggtgatgacgatgacgataacgatgaaaatgacgatatcaattccacacaagttgttgaacctattcagagcgtaaccgaaggaaagaaaaagtataggaaagctgaaaacattcctcaagaatatggatggttgaataaggttgaaacaaacggtgtctttgacgaaggtcctacgggaatgatatcaactgttggtgaaatagtcgaggcgttagctaaaagaggatttagcgccgtaatcgacaggagaaatgcctcggaagatccgaatgatgaggtccttcggtttgaagaaatgaatagtgatttggtacaatga

SEQ ID NO: 79956 - DNA, 1176 bp, Saccharomyces pastorianus
atgtctctcacaccaactaatgaaatattgtttcattacaagtcttcagtgaaggttggtgaacttgagagatatgtaattacttatcatctttatgacggtgaggaaattccaccagatttgaatttaaattccttgtggttaaaggtgagaaatatgaatccgttatcgtatagagctgcgtacctaatgggtccattcatgctttattgcgatgtaaaaactgccgaatatcatcattcccaaaaaatagttgcttcagttgattaccccaaatttgaaccgaatgtgcaaactcaacaagatttcgtggctgaactttcagtacataacatacgacagaaacacgtatggattgctgatgtgatgagtcaaatattgttcactacaaatacgaacgtcacttacgaagtcactattggaactagtaaagagtcagtagaaaatccgcatgatctgccatctcatctaggtgcttatagccctaaacttacagtgaacaggttaactaccttggatttgtggaatcttcccgttcagattaccacaccacagaaaaagaaacatcttgtagttttgacacatggtttacattctaatgtgtcgaccgatctagtgtatattatggaacagatatacaaagcacaaaagaattatccccacgaacaaattgttgtgaaaggttataggggaaacgtctgtcaaactgagaagggagttaagtatttaggtactcgtttggccgaatatattattcaggatttgtacgatgaatccatccgcaagatttcttttgtaggtcactcattgggtggcctaatccaagctttcgcaatagcgtacatttatgaagtctacccttggttttttaaaaaggtgaatccaataaattttattactttagcttcaccgcttttaggtatagtcacagataatcccgcctatattaaagtactactttcattcggggttattggaaaaacaggtcaagacttgggtttggaaaatgatgttgaagtaggcaaaccgcttctctacttgctatctggtctgcccttgatagaaaatttgcgtaggttcaaaaggaggacagtatatgcgaacgctattaatgacggaattgtcccattgtatacggcattggttttgttcctagaatattatgattcttggagc

SEQ ID NO: 79957 - DNA, 1419 bp, Saccharomyces pastorianus
atgcttgcagcaatacttccctcccaagatgatatattgactagtttcgccaagagatgtttagctgtcggctatggtggaggggtagcattaatagttcaagtctttttctttccattgaaggcacgggaacaattaaatgaagagatttcttttgtctgtggctgtatatcggaaatggaacttctctacgccaccggactggaaggagagcaagtcgcaagtagtatgagtgaagagaaatacaaaaaaatcgaaaagatatcaaaaagtgctaaagaggcgttagcccgtgctacggcctataaaggactaaccagacaagagccgagattaaagggtgaatataccgagttggaaaatgttttcactcaagttatatttattcagaagcaaataatagagaggatagatacaatttccttgctgagaaagcaaaatggaagtgcggttattgaagaatttaacagtgttgtatatccatatcgacgccaaatggttggaagtatttcttgcctaatgagagcacttcaagaggcatttataaataagaccccgttaccgcaatttttgcccagcgcaagaattgcacatagaaggctgattaataaagtgcgccaaactctgcgaataagatatcctgggcagatttcaaatttaagtgataaagcaagaaagccaaatgaaggagattacgctgacggcaaggatgaagatgacgatgataacgaaggtttggtaatgaaaatgaatagaaggggacaggccaacacaacagctaatcctcatgaatatgttttaaaagaaaaatttttaagttggaacgcatctagtgctgcatcggaagaaataattgagtatattgaagagctgttgaatttaactaaaattctggtcggtgtaaatgagtttaaatacgggtttttatcgcgtccactttacgaggactgggctgcagaggcagtaacaggatttgataatttcattaacgggaaaagtaatcctatgaatacacggcgcaatcggaccccatttgatggtacttccatcatttccgaaggaaatgaaagtttacaaagtacaaattctaatgaatctcaaatttctcctgattccacaagaagttatgagccggaatgtccagtggcatacgaaaaaaatgataatccggcagcgttgaatttattacggattgcttctcataaagcaggccaaaacgcggatggcttaccaaagacatttagaaatagagcattttccattgcttctacctccggccaactttcaagcttaagcagacacagcacccttggtaatgcggatcctaattatctgaacgatgatgatgaaagctctgatgatgatttgccattagctttgaaaatggtgctaagtcacatgaaagaaaagaaggactaa

SEQ ID NO: 79958 - DNA, 504 bp, Saccharomyces pastorianus
  modified_base (36)..(36): a, c, g, t, unknown, or other
aaggaggggttggtcactttagctaaagatgctganacgaccggtaaattcaatttggcttttaatgcatattggatcgctggcgatatacaaggcgctaaagatcttctaatcaagtctcaaaggttttccgaagccgctttccttggatcaacatacggtttaggagataatgaagtcaacgatattgttacaaaatggaaggaaaatttgatactcaacggtaagaatactgtatcagaaagagtttgtggggccgaaggtttaccaggctcttcgagttcaggagatgcccaaccactcattgacttagattccactccagccccagaacaagctgacgaaaacaaagaagctgaagttgaggacagcgagtttaaagaatccaactcagaggcagttgaagccgaaaaaaaagaagaggaagctccccagcaacaacaatcagaacaacagccggagcaaggagaggcagtgccggagcctgtggaagaagagagttaa

SEQ ID NO: 79959 - DNA, 1647 bp, Saccharomyces pastorianus
atgtgcgtcgcattcaatccaaaggatcctagtacgtttgcatctgggtgtttggaccgaaccgttaaagtttggtcattgggacaatcgacaccaaatttcacgttaaccacaggacaagaaagaggtgtgaattatgttgattattacccgctacctgacaagccttatatgattactgcatcggacgacttaaccatcaaaatttgggattaccaaacgaagtcatgtgtagccactctagaaggtcacatgtccaatgtttcttttgctgttttccatccaactttacccattataatttctggttccgaagatggcactttaaagatatggaattcttccacttacaaggtagaaaagactttaaacgttggtttagaaagaagttggtgtatcgctacccatccaacaggacgtaaaaactacattgcatccgggtttgataatgggtttaccgtactttccttgggaaatgatgaaccaactttatcacttgaccctgtcggtaagctagtatggtcaggtggcaaaaatgccgcagcttcagacattttcactgccgtcataagaggtaacgaagaagttgaacaagatgaaccattatctttacaaactaaggagctgggttccgttgatgttttccctcaatctttagcccattctccaaatggtaggtttgttacagttgttggggatggtgaatacgttatttatacggcgttggcttggagaaacaaagccttcggtaaatgtcaagactttgtttggggccccgactccaatagttatgctttaattgatgaaactgggcaaattaaatactacaaaaactttaaagaagtcacatcatggtctgtcccaatgcattctgctattgatagattattttcaggtgccttgttgggtgtgaagtctgatggcttcgtctatttcttcgattgggacaacggtacgctagttagaagaattgatgttaatgctaaggatgtcatttggtccgataacggtgaactggtgatgattgtcaacaccaatagtaatggtgatgaagcaagtggttacacattattattcaacaaggatgcttaccttgaagcagcaaataatggcaatatcgacgattcagaaggtgttgatgaggcttttgacgtattgtatgaactaagtgaatccattacatcaggcaaatgggttggtgatgtctttatctttaccacagcaactaacaggctgaactacttcgtaggtggaaagacttataatttagcccattacacaaaggaaatgtatctattgggctatctagcacgtgataataaagtatatttagttgacagagaggtccatgtttatggttacgaaatatctttagaggtgctggagttccaaacattgactttaagaggggaaattgaagaagccattgaaaatgtactcccaaatgttgagggtaaggactctttaacaaaaattgctagatttctggaaggtcatgagtattatgaagaagcactgaatatttctcctgatcaagatcaaaaatttgagctagccttgaaagtcggccaacttactcgtgttggcgatcagttgacagatgagtgcgccgagatgaaatggagagccttgggtgatgcttcctta

SEQ ID NO: 79960 - DNA, 1851 bp, Saccharomyces pastorianus
atgaaagtttacaagaacccaaattcatttgtgaaaatgaagcggtattccatgacattccacacgcaactctacaagatggctgtgagatcatatcgaaagaatgactttcacccagagacgatgcaacgagatcttgagctatttatagaggacaacaaagaggtaagaaaagccatccctgaacaaaagccagaaagagcgaaaaacacaaaggacgaatttcccgtgaacataattcgacaatcacctggtactatcaaaaaaagtgatacaagccgaaatcgcaagtgcaacgatgtatttatcgagaaggctagtaataacaatattcctaaaatcactaatgcttcgaatgatttgatagaaatttcaatgaaaacaggcggcagttcttctggttcagtgtctgtagataaaggttttaaatttgtcaaatttgataacaaaacatttcagcgattacggaatagcttaaagttagtgaataataagctgccaaaatataatgaaccttcaacaaagaagatcaaaatgatcaatgacattgcgttaaataatccgttaaacgaaccaaacggggcatcgtacaattatatagttatttcacattctaaggaaacttctgtcgcccttgaaaaataccatgatggtaataaaccgagcaaaatgttagagaaagacatgattttgaaacacagtaagaataaaccaaaaaatcctgatacagcatgggcaaataatagcgcaaggactttttgtagtgtctgcaaagaaaaatttaacgacaatgacaactatgaggtagtatgtggtaattgtggactgacagtacactacttctgttatgctattaaactgccgaaagatatgaagaaaaacactaaccttaagacatttaaatggttatgtgacccttgttcaaatgacctcaatcctataatatcaacgacctaccaatgtagtatgtgtcctacgaaggactatgactatgatagatataggagccaatcatttaaaatatgtccagacgcattgaaatgcacgagcttagggacatgggtgcatttggtttgctcacttttcaatgaagatatcaaatatggaaacggacaatcaatgcaacctgcccttaataccactgctgtgcttattaaaaatagtagatttacatgtggtgtgtgcaggataaatggaggtgggttagtgaagtgtgacaaatgccaatataggtatcatattacatgtgcacagaacagctccaattttaagcttatgtttgaaaagaaaaatatgtcagtagacaccactctaccgtgcataaaggatgtcaagcttaacgatacatacactttgagacctatactaatatgcgatagacacgatatcagcttagaaggaaacgaactttatccattatcgtacaagcctcaacatactctgtcatacatagaacagtactgcagatattataagtgcgaatctgaccatagtctagtggagttgagatattttgaacagcttagactgcggcacggcgaaatgccaggaaactcgcacgactctgctattaaacccaaaatttacgtacttcctttcgaaaggacttgcccacattgtggtacaaacaaaagtttatactggtatgaagataatatttgccattcttgcaatttgagatcaggtgcccaagaactcgattttgatagcgcatctgctaatatctctaacgataacggtttaccagtcgaaattacccagaaattgatggaaggaattgagccagctatgtttgatatcgatatttcagaagctggtaccgacaaaaatacgcatccatcaagccagtaa

SEQ ID NO: 79961 - DNA, 2346 bp, Saccharomyces pastorianus
atgcctaaagaagaagatttccaattacctagaagaagagaggctgctaaaaacgtgaattataatgaaatggaaatagatactaaattagttcaacaaatacaaatagcggaaaaaagtggtgctaagaccaagggtagcaatagccaaactcccaggaattgtaaaagcacaagcaatccagctagtagaaacgagaaattcaagtaccaaaaattccttcatgataagaatacttgctggaactttatccctacattacccccttcgttcagaaagaatagcagattctctaacatacttgatctagatgatgccatgattgacttaaaaaaaatgtctcttttcaatacagaatctgtccttttatctgcgaacgacactatttatatgatatcagagcctgctggcgagccttattatattggcagagttgtaaattttgttagtaaaccagaattttctaacactattcatgaagctataaagacaacatcggtcttccctgctaaattttttcaagttagaatgaattggttttatcgtcctagggatattcaagagcacgtaaatacttttaacccaaggttggtgtatgcatcattacaccaggacatatgtcctatttcatcatacagggggaaatgtagtatatttcataaagacgaagtttttgatgttcttcctaatgagaaggaatgcattatacgacccaatatcttttactttgatgaactttttgacagatatactttgaaatattacaaagtttacagcacggataaaatattaaatcaatggaacagtaagtcgccatttctttatgttttgaataggagatttcgttatatctatacagaaccgaagtatccattggagaacgttttgaagaaatacgttttccatgaactagaggtaaacgaattaagtcctgcagactaccaatgggataaaagatgtcagttctgtaaagaatggtgtatccaaaaggagagcctttcatgtgatgaatgcggcgtttgtgcacatctatactgtatggatccgccacttgacaggaagccgaacaaagacgtcgtttggacctgcttcagttgcttacagaaacaacaaggtactaaggactcgcatgttaggtttctagaagaacaagcactggaactggattttattcgctctgtaagacaaaaaattgaagaaatttctaacaaagctatcaaagagaatgttggttataataccgaaaattgctggtttcaatacttaggaatatattccatttctcatattggtgacgcattaaatgattctatgttttttccatatcctttcaaaccctctagggtaggagtgaagtatcaatggaacggatgtaataataatgtgccctggaggcggaactcgtatataagtgcaaattcagaagaagagcgaggctcaacgaaaacttcggaactagcatgggtacttgatgcatcaaaaattactactcgaaaattaagtgaatatattgaacaatgcaaaagcgaaatatgccctattctcaatgtgagaggtgagacttgtaatttcattgatgtagtcctaaagaatttattatttacaaattatgatacagcagaggcatttaaaaaatgtaaaagggagctttccagaaaatttttaaaagagccaagttttacagccgtggagatccgaaagtttgaggaagctgtcgagaaatttgggagtgaattacgcccagtttgtgagtatgtgggcactcaacctatgtcgatgattgttagattttattacaattggaaaaagactgaaagaggccttaccgtgagagggaaattgagtaagttatcaaagaataaaagaaaaaaagaaatcactaatcatgaaaatgacgtagagacaaagtatatagatgattcttcttttgatactgagaaactctctttaacagaatcctccttccaatgcatgttttgtaaaacagattactctccgatgtggtataaagttactggaggttcagatgatgaaaagatcaagataagaatgcagacaggagtcaacgaaaaaacagaaatttcagagaaatcgcctgcccatagcaaaaagaatgaaaaacttggcgctctttgcattcgttgtgctcgtatgtggcgaagatacgcaattaagtgggtatcaccgcttgaaacattgagaaaaataacgggaaccagtcagaatagtttttattcagcgatagaagggattatagaggagaataacacaaacaagtttacgttatccccctttcaagctcataataaactactagaatgggacttagagatccccggtaccgag

SEQ ID NO: 79962 - DNA, 1353 bp, Saccharomyces pastorianus
atgctacgtatgtcaacttcaagattcattgggcaaaggctgttcactacggctcgatctctccaggctgctaaaccggcaccaaaaggtaaaactcaaggattttccaaaaaatcatcttcagtctcatcttactcatctgcaaagagagttactcctggttcattgtataaaaactggacaaacaccacgcacaccgctcaattacaacagaccgccgttcctttggcattacctatcttcaactttgatgatatttccaagactttgaataaagtagtatcatattccaacaaacagtacaaatcccttcaccatttgggttccttcaagaagtcgcagttcaatgaactttttcaaaaaccggtttgtctagttcgtgaagatgcaacgaatagctttttgaagaaactagtatctcatcctgttaaaaaatttataatcactggagagccaggggtcgggaaaactgtactactctctcaagcgcatgcatatgcagttgattccaagcaaatcattattaacatatcatatcctgaattattcctgaacggtaggaatgacttttcttatgatgatgatttaaagcttttcatccaaccgatgtatttgaaaaagcttataaggaaaatattgaaggcaaatgaccctgcattgttaaaatctattgagctatccaaagactacaagttctcgaatgcaaacccaaagaatgcctctgtaaaaccatttgtcacattaaacaaaaccaaaaatacagttttagatttgttatccgtaatgacccacccgcataatcgtggaaaactaatgaaagccattattgatgagttatctgtccaatccaaggtgccaatcatgtttacagtggataatttttcaaaagtgttaactactgcatattctgcgtacagaaatacagagaataaacagatatattccctggatttacaaatgggtaaattgatgatggacattatttcaggagagacgaaatttgctaatggtgagagttctactatattagctatatccggcgttgacaggacaaacaaaactttacccgtggcattgggcaagatcccagtagacccctatgttactagatatcactatgaaccgaagttcgtagaattactccaaaaaggtaatgtcaccgaattcgaggttcctaaactgaacaaacaggaagttaacgaaataatcgattactacaaacaatcaaatgttttattagacaaggatatcacaggaaaaaagtgggagaacttgattgacgaaaaatatttcctaagtggtaacggtaacccaagagaattattgaaaagtttagtcctttcccataggtga

SEQ ID NO: 79963 - DNA, 852 bp, Saccharomyces pastorianus
atgccaggacacgaattggaagacgtaataaatcaacgtttgaacctatatgatgtattggaattaccgacccccctggacgtccataccatctacgacgatttgccccaaattaaacgcaaatacaggacccttgccctgaaatatcatcctgacaaacacccggacaatccatcaattatacacaaattccacttattatcgaccgcaactaatatcctcaccaatgcagacgtcagaccccattacgaccgctggttaatcgagttcctacggaaaacaaacgacattgaaagaaataaacttatacaaaagctggaagaatctgaatcgagtacgatacccaccaccacaccacatcctgatttattgcaaatccaacgccacggcgagctactcaggaaactaaaacatttcaacttgccctatggtgactggaaacatctcaacacacaagaccaagaaaatgcttcgcaacatccgtattacgattgctctactttgagaattgtccttgacaacttcctgcaatcaaataataaatcaaactgcttatctcatttgcgcaatcaagtattcatcacgctacgtgctaatgaaatctacgacatctacttctctgaaagaaacaactactcggaggatgattcaatcatcatatatactgtattcgatactcccatcacagcgcagcacgtattccgaaactggtcaagtgggaacctcatacccacggtcaaggatatttcgcccttgatcccgctacattactactctgattttaatttggagacggaactgaatgacgatattgcaagactggtctctaatgaacctatcctactcgactag

SEQ ID NO: 79964 - DNA, 162 bp, Saccharomyces pastorianus
atggtaggaatggcgtgggtgacgcccacttttgaattgtatctgattggaaataatggcattgttgacaaaagggttttattcaagagtgcgagaaaagtagctaattggtgtcaaaaacacgagtcgagactatttataagtgatgggcccgtgttttaa

SEQ ID NO: 79965 - DNA, 732 bp, Saccharomyces pastorianus
atgctagcggtgatgttaattgggtcctttgagttccaatgttctcaagaaatactaactatagtggccatgctatcggttccaaacgtgtttattcgcccaacaaaggacaagaagcgagcagatgatgccaagaatatcttcgctcatccagacggtgatcatatcaccttactaaatgtatatcatgcgttcaaatcggatgaagcttatgaatatggtatccataagtggtgccgtgaccactacctaaattacaggtccctttccgctgctgataatatccgctcccaattagaaagattaatgaaccgttacaacctagaattaaacactacagactatgaaagccctaaatactttgacaacatcagaaaggctcttgcgtctgggtttttcatgcaagtagcaaaaaaaagatcgggagctaaaggatacatcacagttaaagacaaccaagatgttctgatccatcctagtacggttcttggccacgacgcagaatgggtcatttacaatgaatttgtgctcacatcgaagaactacataagaactgtgacctcggtcaggcccgaatggctgattgaaatagcgcctgcatactacgacttaagcaatttccaaaaaggtgatgtcaaattatctttggaaaggatcaaggaaaaagttgatagactaaacgagttgaaacaaggtaaaaacaaaaagaagagtaagcactccaagaaatag

SEQ ID NO: 79966 - DNA, 1527 bp, Saccharomyces pastorianus
atgggttccaaaagaagattctcgtccgaacacccggatccagttgagacctctattcctgagcaggccgccgagattgcggaagaattatccaaacagcatcctcttccatccgaagagccacttgtccatcatgatgctggtgaattcaagggcttgcaacgtcaccatacttcagcagaagaggcccaaaaacttgaagatggaaaaataaatccatttaccggtagggagtttacaccaaaatatgttgatatcctgaaaattagaagagaattgccagtacatgcccagagagatgagtttttaaaactttatcaaaataaccaaattatggttttcgttggtgaaacaggttccggtaaaacgacacaaattcctcaattcgttttattcgatgagatgccacacttagagaacactcaagttgcatgtactcaacctcgtcgtgtcgcagcaatgtctgttgcacagagagttgctgaggaaatggatgtcaagttgggtgaagaagttggttattctatcagattcgaaaataaaacttctaataaaacgatattgaagtatatgactgatggtatgttgttgagagaggcaatggaggaccatgacttgtcgcgttattcatgtatcattctggatgaagcgcacgaacgtacactagctactgatattttgatgggtcttttgaagcaagtagtcaagaggagacctgatttgaagataattattatgtctgctactctggatgcagagaagtttcaacgctacttcaacgatgctccattacttgccgttccgggcagaacatatccagttgagctatactatacaccggaatttcaaagggactatttagattctgccattcgtactgttttgcaaattcatgccactgaagaggctggcgatattttgttatttttaactggtgaagatgaaattgaagacgctgtcagaaagatttccttagaaggtgatcaattggttagagaagagggatgcggacctttatccgtatacccactgtatggttcattaccaccgcatcaacaacaaagaatattcgagcctgctccagagtcacataatggtagaccaggcaggaaagttgttatctccacgaacatcgctgaaacttctttaacaattgatggtattgtctacgtcgttgacccaggattttcaaagcaaaaagtttacaatccaagaattagagttgagtctttactcgtttcccctatctccaaggcttctgcccaacaaagagctggtcgtgctggtcgtacaaggcctggtaaatgtttcagattatacactgaagaggcattccaaaaggaactgatagagcaaagttacccagaaattttacgttccaatttatcctccaccgttctagaactaaaaaaattaggtattgatgacttggtccatttcgattttatggatccaccggctccggaaacaatgatgagagcgcttgaagaactaaattattttggcatgtctggacgacgaaggtaa

SEQ ID NO: 79967 - DNA, 381 bp, Saccharomyces pastorianus
atggcgctattttatatatcacttaccttttctttttataaaaaaatgttacgtgtattatggcatatattgttggtgtacggaaaacacgcggggaagagaaagtatagaaaagtgatgacagaaacaaatgactcattatatatgaaaagaaataactgcagcggtgaatatgccacactggcattatcaacaaggagctgttcatttaatatgcaacagaatgattgggtaactatggaaggactatttccttttgtgatggttttgtgtcatttggaaacgaagccaatgaaactaggtatccagcttatactacaagtccctttcatgggtttaggaattcacaaagagaataaagaattctacttgatattgtga

SEQ ID NO: 79968 - DNA, 96 bp, Saccharomyces pastorianus
atgccacctgagccagtctggcacatatctgcagtaacagaaaagtttcctactcatggcgctattttatatatcacttaccttttctttttataa

SEQ ID NO: 79969 - DNA, 819 bp, Saccharomyces pastorianus
atgcaaaacttgttggaagtgtcgagcactgacaagttagaaataaatcacgatttggatttacctcatgaagttattgagaagaagaaaaaggcacctgcgggtggcgctgctgacgctgcagccaaggcagaagaagatgttagtaagaaggctaaaaagcaagatcatccaagaggtaagcctgatgaagaaacccttaagaaattgagagaggaggcaaaggccaagaaggcagctaagaaggccgccaacgcccaacaacaacaagagcaacaaaataagggcccagaaaagccaaagccatccgcaatagatttccgtgttggttttattcaaaaagccatcaagcacccagatgccgactccctatatgtctctacaattgatgtcggtgatgaagaaggcccaagaactgtttgttctggtttggtcaagcattttcctttggacgctatgcaagaacgttatgttgttgttgtatgcaacttgaaaccagttaacatgagaggtattaaatccactgctatggtattgtgtggttctaacgacgacaaagttgaatttgtcgagccaccaaaggactctaaggccggtgacaaggtgttctttgaaggtttcggtgacgaagctccaatgaagcaattgaatccaaaaaagaagatctgggaacaattacaacctcatttcactacaaatgacgggttggaagttatcttcaaagacgaagaagaaaaggaccatcctgtaagaaagttgaccaacgctaagggcgaatcattcaaggttgctagtattgctaacgctcaagtccgttaa

SEQ ID NO: 79970 - DNA, 351 bp, Saccharomyces pastorianus
atggccggtggtcaacatcaccacagaattaacatggataaataccatccaggttatttcggtaaggttggtatgagatacttccacaagcaacaagctcatttctggaagccagtcttgaacttggacaaattgtggacattgatcccagaagacaagagagaccaatacctgaaatctgcttccaaggaaactgctccagttattgacactttggctgccggttacggtaagatcttgggtaagggtagaattccaaatgttccagttatcgtcaaagctagattcgtctccaagttggctgaagaaaaaatcagagctgctggtggtgttgttgaattgatcgcttaa

SEQ ID NO: 79971 - DNA, 465 bp, Saccharomyces pastorianus
atgtacagaatgggtttaactaccatgctgattacggacaagaatgttgatcgtaacaaatgtatcagaatcgcacttgttcacgattttgcggagtcattagttggtgatattacacctaatgacccaatgacaaaggaagagaaacatcgcagagaatttgaaactgtcaagtatctctgtgaaagcataataaggccctgcagtgaaagcgcatctagggaaattcttgatgactggttagcatacgaaaagcagacctgtttggaaggaagatatgtcaaagatattgataagtatgaaatgttggttcaatgttttgagtacgaacaaaagtataatggcaagaaggatttgaaacaattttggggagccatcaatgatataaaaactgatgaagttaaaaaatggacacaatctttactggaagatcgacaagcctttttcgacagtttgaaggagtaa

SEQ ID NO: 79972 - DNA, 1062 bp, Saccharomyces pastorianus
atggacgccgatgactcaagtgatgacgaagatggtgatttgaacgaattggaatctacgcccgctaaaatcccaagagagtcatttcctcccttagcggagggacacaaggtcgtgcaattggcagctacagacaatatgagttgcgccctgttcagcaatggcgaggtatacgcatggggtactttccgttgcaatgaaggtatcctagggttttaccaagataaaattaaaattcaaaaaactccatggaaagtgcctacattctctaagtacaatattgtccaattagctcccggtaaggatcacatacttttcttagatgaagagggtatggtgttcgcctggggtaacggtcagcaaaaccaattaggaagaaaagttatggaaaggttccgtttaaagactttggatcccagaccatttgggttaagacatgtaaaatacatcgcatctggcgaaaaccattgctttgctttaacaaaagacaacaagttagtaagctgggggttgaatcagtttggtcaatgtggtgtttcagaggatgtggaagacggtgcgcttgttacaaagccaaaaagactagcgctacctgataacgttgttatcagaagcattgctgctggtgaacatcactcattgatcctatcccaagatggcgatttgtattcgtgtggtagactagacatgtttgaagttggtatcccaaaagacaatttacccgaatatacttacaaagatgttcatggaaaagcacgtgccgtgccacttccaactaagttgaataatgttccgaagttcaaaagcgttgcggcggggtctcaccattcagtcgcggtagctcagaatggcattgcctattcttggggttttggtgaaacctacgccgttggattaggcccttctgaggacgacactgaagttccaaccagaatcaagaatactgctacacaggatcacaacatcattttagtcgggtgtggaggccaattttccgtgtccggtggtgttaagctgtctgatgaggacgcagaaaagagagcggatgaaatggatgattaa

SEQ ID NO: 79973 - DNA, 429 bp, Saccharomyces pastorianus
atggtcaaaagaacagtcgccaccaatggagacgcgtctggcgctcatagagcaaagaaaatgtctaaaactcatgcttctcatatcataaacgctcaagaagactacaagcatatgtacttaagtgtccaaccattggatatattttgctggggtactggttctatgtgtgagcttgggttgggtccactagccaaaaataaggaagttaaaagaccaaggttaaacccatttttacctcgcgatgaggccaagatcatttcttttgcagtcggtggtatgcacaccttagcccttgatgaagaaagcatgtatggtcctggggttgcaatgacgtgggtgcgttgggcagagatacttccaacgccaaggaacaactcaaggacatggacgccgatgactcaagtgatgacgaagatggtgatttga

SEQ ID NO: 79974 - DNA, 219 bp, Saccharomyces pastorianus
atgaagatattttatgatcagtataagcactgtcgtgaagtggccgcatgttgtaatgttatgtcccaagagattgtatcaaaaatattggagaaaaacaatccttcaataggcgattcgaaggccaaattgcttgagctccccctagggcagccagaaaaggcatacttgaggggtgagtttgcccaggatttaatgaagtgtacatataagatataa

SEQ ID NO: 79975 - DNA, 2388 bp, Saccharomyces pastorianus
atgcaagacgaacaagattcatcgaaaaatgagccaattgcaaatgctgatagtgtcactaacattgacaggaaagaaaatagagataataatttggataacacttatttgaatggaaaggagcaatcgaataacttgaataaacaagacggcgaaaatactttacaacatgaaaagtcatcaagttttggttattggtgttctccttccccagaacagctggaacgtttgtcattgaagcaattagcggccgtttcaaattttgttatcgggagaagaggttatggttgtattacatttcaacatgatgtggatctcacagcttttaccaaaagctttagagaagaactattcggtaaaattgtaatatttcgttcctctaagacagtagaagtatatcctgacgaagccaccaaaccaatgattgggcatgggttaaacgttcccgctataatcactctagagaatgtttatcctgtagataaaaaaacaaaaaaaccgatgaaagatactacgaagtttgctgaatttcaagtttttgacaggaaactaagaagcatgagggaaatgaactatatatcctataatccctttggcgggacttggactttcaaagtcaatcattttagcatttgggggttagtcaatgaagaagacgcggaaatagatgaagacgatttgagtaaacaagaagacggcggtgagcaaccattaagaaaggtgcgcacgttagcgcaatcaaaaccatcggataaagaggttatcctcaaaacagatggcacttttggaactctatcaggtaaagacgactctatcgttgaggaaaaggcatacgaacctgatttgtctgatgcggactttgagggaattgaagcttcccctaaacttgacgtttctaaggattgggtagaacaattaattttagctgggtcttcactacgttctgtgtttgccacttctaaagaatttgacgggccatgtcaaaatgaaatagatttactcttttccgaatgcaatgatgaaattgataacgcaaaactcatcatgaaggaaagaagatttacagcctcttatacgtttgcaaaattttcaacaggttcaatgctactgacaaaagatattgttggtaaatcgggcgtttcaattaagcgtttaccaactgagttgcaaagaaaatttttattcgatgacgtctatttagataaggaaattgaaaaggttactatcgaagcaaggaagtcaaacccatacccacaaattagtgaaagctctttactctttaaagatgctttagattatatggaaaaaacctctagtgattacaatctatggaaactttcatctattttattcgaccccgtttcctatccatacaagacggacaatgatcaagtaaaaatggcattattaaaaaaagaaaggcattgtcgattaacttcgtggattgttagccagataggtccggaaattgaagagaaaattaggaattcttctaacgaaatagaacaaatatttctatatttgctcttgaatgatgtcgtaagggcatccaagttagcaattgagtctaagaatgctcatttgagcgttttgatatcctatttaggttcaaacgacccaaggatacgtgatttagcggaattacaattgcaaaagtggtcaactggtggttgtagtattgacaagaatatctcgaagatttacaaattactaagcggttcaccttttgaaggtttattttctcttaaggaacttgaaagtgaattcagttggttgtgccttttgaatttgacactgtgctacggccagatagatgagtattccttagaatctcttgtgcaatcgcatttagacaagttttctttaccctatgatgatcctattggagttattttccaactatatgctgctaatgaaaatacggagaagctctataaggaggttagacaaagaaccaacgctttagatgttcagttttgctggtacttgattcaaacattgagatttaatggaacacgcgttttttcgaaggaaactagcgatgaggctacattcgcatttgccgctcaacttgaatttgcacaattacatggccactctctttttgtttcttgctttttaaatgatgacaaggcagcagaagataccataaaaaggcttgttatgcgtgaaataacattgttaagagcctctaccaatgatcacattttaaatagattaaagatcccttcgcaattgatattcaatgctcaagctttgaaagatagatatgaaggcaattacctttctgaagtacaaaatctactcctgggttcgtcttatgatttggcagaaatggctatagttacgtcattaggaccaggctggtgtttcaaaccatcctgtcag

SEQ ID NO: 79976 - DNA, 1332 bp, Saccharomyces pastorianus
atgtttaataaaagtgtaaatagtggtttcacctttggaaaccaaaacacatccacaccgacatccactccggcacagccttccagttcccttcaattccctcaaaaatctactgggttatttgggaacgttaatgttaatgcgaatacttcaacacctagcccatctggtggattattcaatgccaattcaaacgctaattctataagtcaacaacccgccaataattcattatttggaaataaaccagcacaaccatcaggtggcttatttggcgctacaaacaatactacttctaaaagtgccggaagcttattcggaaataataatgccacagcaaattctacgggctctacaggtttattcgggaataatcacaattcgtccggtggtttattcagtggtagcaataatatagcccctagtacccaaaatggtggtttgtttggtaatagcaacaataacaatataacttctaccacgcaaaatggtggtctgttcggtaagcctactacaacccctgctggtgctggcggcctgtttggaaattcctcgtcgacaaactcaacgacaggactatttggatcaaataatacacaaagttctacaggtatttttggtcaaaagccgggagcttcgacaactgggggattgtttggaaataatggtgcttcattcccaagatccggtgaaactactggaaccatgtcaaccaacccatatggaattaacataagtaatgttcctatggcggtggctgacatgccaagatctattacgtcttctctatcagatgtgaatggcaagtcagatgcggaacccaaaccaattgaaaatagaagaacatattcgttttcttcctcagtttcagggaacgctcctttaccactcgcctcacagtcaagtttagtgagtagactaagcacgagactgaaagccactcagaaaagcacgtcaccgaatgaaatattttcaccgtcttacagtaaaccgtggctgaatggagcaggttcagctcccttagtagatgactttttttcttcaaagatgacttctttggctccaaatgaaaacagcaactttcctcagaatggttttaatttcctatcctcccaaagggccgacttgacagagctgcgtaaattgaaaattgattccaacagaagtgctgcaaaaaaattaaactcctctctggtactcccgccatcacaaaaaaacatatgcaagacgaacaagattcatcgaaaaatgagccaattgcaaatgctgatagtgtcactaacattgacaggaaagaaaatagagataataatttggataacacttatttga

SEQ ID NO: 79977 - DNA, 303 bp, Saccharomyces pastorianus
atgaccaaatggaacggcactattttagggccccctcatagtaatcatgaaaacagaatctattccctttctatagattgtggcccaaactatccagattctcccccaaaggtcactttcatttccaagataaatctaccatgcgtcaatccaactacgggggatgtccaaactgacttccacaccttacgtgactggaaaagagcctacaccatggaaactttattacttgatcttagaaaggaaatggcaaccccagcgaacaagaaattgcgtcaaccgaaggaaggagaaaccttttag

SEQ ID NO: 79978 - DNA, 1074 bp, Saccharomyces pastorianus
atgaatgataagttaagattggacaataacaatttaaagctactgaatgatgaaatggctttagagagaaaccaaatactagatttgaacaagaattatgaaaacaacatagtaaatttgaaaagattaaatcacgagttagaacaacagaagagtttatctttcgaagaatgtcgattactgcgcgaacaattagatggactatattccgcacaaaataatgctttactagaggtcgaaaatagtgaaacacatgcgtcaaacaagaacgtaaacgaagatatgaataatttgatcgatacttataaaaataagacagaagatttaacaaacgaactaaagaagctaaacgatcagttattatcaaattccaatgatgtagaaacacaaagaaaaaagaggaagttgacaagtgaccaaattggtttaaattattcacagaggctcaacgaattgcaactggaaaatgtaagtgtctcgagggagttgagtaaagcacaaactacaattcagctactacaagaaaaattagaaaagttaactaaactaaaggagaaaaaaatacgtatactgcaattacgtgacggccccttcataaaagatcaatttatcaagaaaaacaaattacgtcttctagaaaaggaaaatgcagatttacttaacgaattgaaaaagaataatccagcagtggaaacagtacccatttctgtttatgattcactaaatttcgagttgaaacagttcgaacaggaagtttttaagtcaaataaaagattttccagactaaagcaagttttcaataataaatctttggagtttattgacgttgtaaactcattattaggttttaaattggaatttcaacaagatagtcgtgtgaaaatattttcctgtttcaaacctgaaaaatatttgattgctgatctaaatgaaaacactttgaaatctaaccttgatgcagatatagaaggatgggatgatctcatgaatctatgggtggaagatagaggtcaacttccgtgctttttggcaacaataacattgcgtctgtgggaacagcgacaagccaaataa

SEQ ID NO: 79979 - DNA, 1026 bp, Saccharomyces pastorianus
atggatgtgagagcggcattgcaatgtttcttcagtgcattgagtggacgattcactggaaaaaaattgggactagagatctattctatccagtacaaaatgagcaatagtggtgggtcctctcctttcttggaaagccctggaggttcgcccgacgtaggcagtacaaatggacaaagtaatcgtcagattcaggcgttacaattcaagctcaatactctacaaaatgagtatgagattgaaaaattgcagctacaaaaacagacgaatatcttagaaaagaaatataaggccacgattgacgaattagagaaagcattgaatgatacaaaatatctttatgaaagcaatgataaattggagcaagagttaaagagtttgaaagaaagatcagctaattcgatgaatgataaagacaaaggcatagaggaattgcgaacaaccctccaaaacaaagacttagaaatggagactttaaggcagcagtatgattcgaagttatcaaaggtcactagccaatgtgaccatttcaagttggaagcagagagctctcattcgctactgatgaaatatgagaaagaaataaagaggcaaagtgtggatatcaaagatttgcagcatcaagtgatggaaaaggatgatgaattatcttcggtaaaagcatctaagatgataaactcacatccaaactactccaccgaagagttcaacgagctcactgaaatgaacaaaatgatccaagaccaagttcagtatactaaagaattggaactagcgaacatgcaacaagccaatgaattgaaaaaacttaaacaatcccaggacacttctactttatggaaattagaaaatgaaaaactacaaaacaaattaagtcaattacacgtactcgaaagtcaatatgaaaatcttcaattggaaaacatagatctaaaatcgaaattaaccaaatgggaaatttataatgatagtgacgatgatgatgataacaatgtacacaacaatgataataataatcatcactaa

SEQ ID NO: 79980 - DNA, 453 bp, Saccharomyces pastorianus
atggagtacctctccttactacgatgtgtactagtggaagctttccttgagtcatgtaaaaaagaggaagaaggaaccggcgatgctgctgactgcggatccaacgaggggttaataatatcttcaatggctgtggaagatgtagtacttgcatcggtacgatcggtcgtaaagatatcgttcggttgtaagattttttcaatgtcatcatcattcaagcttggtaaaggctcaatacggggagcatcgctcacgtttgactcattggtcgtccctgtatttgcagcattattcatggcgccaacaatacagctgtctttttgtcttttttgtttcctttcccttccagcgctgttcgtaaagcacacctctaactctttgcctttatctaccggaacagtactgctatttggtatttgctgccaagtggcaaaatctctcctaaaaatttaa

SEQ ID NO: 79981 - DNA, 351 bp, Saccharomyces pastorianus
atgccaaatgataatgacaccgagcacgcaagtacaagtgtcaatcaaggcgaaaatggaagcagattaacgcccttcctcacggtagatgatcacacactaaacgacaataacactaatgagggaagtacaagggtgtcccccgatataaagttcagcgccactgaaaacactaaagtgagtgataacctgccaagctttaatgaccacagctattccacccaggccgacacggcgcccgagaacgctaagaaaagatttgtggaggaaataccggaaccggctatagtcgaaatacaggacccgacagagtacaacgatcaccgcctgcccaaacgagctaagaaatag

SEQ ID NO: 79982 - DNA, 1677 bp, Saccharomyces pastorianus
atgttaaacgatgattctaatacgaaacttatacagtgggcggaggatggaaaatcttttattgtcacgaatagggaggaatttgtgcaccaaattttaccaaattattttaaacattccaatttcgcttcctttgtaagacaattgaacatgtatggatggcataaagttcaagatgtcaagtcaggatcaattcaaagtagttcagatgataagtggcaatttgaaaatgaaaacttcattagaggtagagaagatttgctggaaaaaataatcaggcagaaaggttcctccaataaccatagtagccctagtggtaacggtaatccagcgaatggtagcaacatccctctggacaatgccgcaggaattaataatagcaataataacatcagtagtagtaattcattttttaacaatggtcatttattgcagggtaaaacactaagattaatgaacgaagcgaatcttggagataagaatgatgtcaccgcgattttgggggaattagagcaaataaaatataaccagattgcaatttccaaagatttactaagaataaacaaagataatgagttattatggaaagagaatatgatggccagggaaagacatagaacccaacagcaagccttggaaaaaatgttcagattcttgacatctatagtcccacacttagatcccaaaatgattatggacgggctgggagatccgaaagttaataatgaaaagctaaacagtgcgaataacattgggttaaatcgcgacaacacaggcactatagatgaactaaaatccaacgattctttcataaacgatgatcgtaattctttcaccaatgctacaaccaacgcccgtaataacatgagtcccaacaatgatgacaatagtattgacaccgctagcactaataccaccaacagaaagaaaaatatagatgaaaacatcaaaaataacaacgacataattaatgacattatatttaataccaaccttgccaacaatctcagcaattacaattccaacaataatgctggctcgccaataaggccctataaacaaaggtatcttttgaaaaatagagccaattcctcgacatcgagtgagaatccaagcctaacgccctttgatatcgaatctaataatgaccgcaaaatttcagaaattccttttgatgacgaagaagaagaagaaacggattttaggccttttacctcgcgagatcctaataaccaaacgagtgaaaacacttttgatccaaacagatttacgatgctctctgatgatgatttaaaaaaagattctcataccaatgacaatagacacaacgaaagtgatctttttttggacaacgtacatagaaatatagacgaacaagatgcaagactccagaacttggaaaatatggttcacatactttctcctggatatcctaataagtctttcaacaacaaaacttcctcgacaaacactaattccaatatggaaagtgctgtcaacgttaatagccctggtttcaacttacaggattatttaactggagagtctaattcccccaattctgtcattctgttccctccaatggcagcggctccataccgttgcccatgccaaatgataatgacaccgagcacgcaagtacaagtgtcaatcaaggcgaaaatggaagcagattaa

SEQ ID NO: 79983 - DNA, 1218 bp, Saccharomyces pastorianus
atggaaggcttcaatccggctcacatagaacatgcgtcaccgattaattcatctgacagccattcatcctcctttgtatatgctctacccaaaagtgctagtgaatatgtagtcaaccataatgagggtcgtgcaagtgcaagtggaaatccagccgcagtgccgtctcccataatgacactgaatctcaaaagcacacattccctcaatagtgatcagcatgttcatacctcaacatcgccgacggaaactattgggcatattcatcatgtggaaaagctgaatcaaaacaatttgattcatctggatccagtacccaactttgaagataagtccgatattaagccttggttgcaaaagattttttatcctcaaggaatagaacttgtgatagaaaggtcggacacatttaaagttgtcttcaagtgtaaagctgctaaaaggggaaggaacgcgagaaggaaaagaaaagataagcccaaaggacaggaccacgaagacgagaaatccaagatcaatgatgacgaattagaatatgcgagtccttctaatgccacagtaaccaatgggcctcaaacatcgcccgatcaaacatcctccataaagccaaagaaaaaaagatgtgtatcgaggtttaataactgtccgtttagagtacgagctacttattcgttaaagaggaaaagatggagcattgttgtaatggacaataaccattcacatcagctaaagtttaaccctgattccgaagagtacaaaaaattcaaagaaaaattaagaaaggataatgacgtagatgcaatcaagaaattcgacgaattggaatacagaactttggccaatttgcccattccaacagctacaatcccctgtgattgtggtttaacaaatgaaatacaaagtttcaatgtcgtattgcccactaacagtaatgttacttcatcagcatcctcttcaactgtatcgtccatatcccttgattcatcgaatgcatctaaaaggccatgcttaccctctgtaaataacaccggtagtatcaataccaataacgtaaggaaaccgaaaagccagtgtaagaataaagacacactcttaaaaagaaccaccatgcagaactttctcacaactaaatcaggctgcgtaagaccggtacgccaacatcttcgcaacactcatctacagcattttcaggatatattgatgatcctttcaatttga

SEQ ID NO: 79984 - DNA, 2019 bp, Saccharomyces pastorianus
atgggtgagtcaattgaaacaatttgtaaaagccttgtcagggctttccaagaggagaaggatgattttgtctcacttgtaacaatcattgatatgtacaacgagcaggtgaactctggaaagtctataaaagaaaaggaacgttatttggatgccctattgaaaatacttaaggataatccagttaccttaaaggaaattggctgggatctgccaaagggtttattgcagtttttctcacgcaaaaacatcaatgtcaatatacatctagtttttagtccccttgtttctagtgtgatggaatgcttcaatgagctagccatcaatggaaatccgaaagaatgcttgttgaccgcttgcgaattggtgtcaacactccatatagtcttaactgaaactggcgactccgatgaagagaatgaagatttaaaggactccaatagaaatgatgcgtcaaacattactgatgagctgtcagttatcactccggagattgggcagtatatggccaaaaatacagtagaattcattccaaatttgaaaatttacgttctctttgaatttatgagtttattgttgaaacgtgtggacactttatatccatctaaatttctagccatggtaacttctgcaattattaagtatgtaacaaccaacgttcagactatggatgatccacactttattttgcgcatagtgtacaatttttgtactaattactctccagctcaaccatctgctagtctgaccgatggtattagtacaaacgatcttgaaaaaattcatgatgatgaatctgccttacagaaaaaactactggctaatctgagcgtattcgtgattagcaactgcctaaaaaatcatccaggtaatattgacaagatatatttcaaaacattgatgcataaaaaaacagatgaaaatgaaatcgatgcttcagttttacagacatgccaccaatactacgagtatgtcacatcattggatgtccacatgaaagaacttttagaaaagtgcctggtagaatcaagaagcatctataactctcttctcatgaacccggccgcttccacgcccgaattcaaagaagaaattaaccaactagtatatgaggtatcttacgcatatcaaatcaagaaactagctgacgaaaagaacttagagcttgaccaatatggagttgtgattctatctgcaatacattattctaaaaacggtactcacttattgccgcaaattgatatccaaagcgcaatttacctctatctacggtgtacaacagcttctttattttcagaaatatacgagaataagtttttggaaagttcagtacgctactggctatgggtatccacaaccgagacttccacagagaaaataaagtgtgccttacaagaacttccagggcacattaccacggcctttttgcagatgttactgatgaaaacttgcaatgaatctaataacgacactaagttgaccgaaattactcttctgaggaggttactctatctcatgcccgaaagcacatcttttacgttcatctttgaaactctactacattgtccatatataactgcaaagattgctgttcttgacattctaagagatatgatgattagatctcctgaggctgctaatcgtgacgaaactgtcggtttaatcgaacaacagaatcctgggaataccgctaatagtgtaccgataatgccaactctacctccaagaccttacatcactattaatgaagatcgcatggcttccattcatagcattgctttaatatgtttttctgccgccaagcaaaagaaaagaacgcaaggtgatttactcttggtactaacatatatgaaattttttgttagtttaaggaacaaatgggatttgggtctgttaacactcatcaataaagaaatctccgaatcatttcaaggagaaggtgagcctgaattagcattcatcaacatttccaataatactctgggagaatatatagaagagatgaacatacgctcgtaa

SEQ ID NO: 79985 - DNA, 1230 bp, Saccharomyces pastorianus
atggactttaataactggcaccaacatttgaactggttgaacatggttcttgtttgtggtatgccaatgattggttggtacttcgctgtctctggtaaagtacctttgcatttaaacgttttccttttctccgttttctactacgctgtcggtggtgtttctattactgccggttaccatagattatggtctcacagatcttactccgctcactggccattgagattattctacgctatcttcggttgtgcttccgttgaagggtccgctaaatggtggggccactctcacagaattcaccatcgttacactgataccttgagagatccttatgacgctcgtagaggtctatggtactcccacatgggatggatgcttttgaagccaaatccaaaatacaaggctagagctgatattaccgatatgactgatgattggaccattagattccaacacagacactacatcttgttgatgttgttaaccgctttcgtcattccaactcttatctgtggttactttttcaacgactatatgggtggtttgatctatgccggttttatccgtgtctttgtcattcaacaagctaccttttgcattaactccatggctcattacatcggtacccaaccattcgatgacagaagaacccctcgtgacaactggattactgccattgttactttcggtgaaggttaccataacttccaccacgaattcccaactgattacagaaacgctattaagtggtaccaatacgacccaactaaggttatcatctatttgacttctttagttggtctagcatacgacttgaagaaattctctcaaaatgctattgaagaagccttgattcaacaagaacaaaagaagatcaataaaaagaaggctaagattaactggggtccagttttgactgatttgccaatgtgggacaaacaaaccttcttggctaagtctaaggaaaacaagggtttggttatcatttctggtattgttcacgacgtatctggttatatctctgaacatccaggtggtgaaactttaattaaaactgcattaggtaaggacgctaccaaggctttcagtggtggtgtctaccgtcactcaaatgccgctcaaaatgtcttggctgatatgagagtggctgttatcaaggaaagtaagaactctgctattagaatggctagtaagagaggtgaaatctacgaaactggtaagttcttttaa

SEQ ID NO: 79986 - DNA, 165 bp, Saccharomyces pastorianus
atgccaacttctggaactactattgaattgattgacgaccaatttccaaaggatgactctgccagcagtggcattgtcgacgaagtcgacttaacggaagctaatattttggctactggtttgaataagaaagcaccaagaattgtcaacgttttggttctttaa

SEQ ID NO: 79987 - DNA, 1542 bp, Saccharomyces pastorianus
atgctggcccataacaacgtgaagcaatttcgtatagacatagacgaaccgcatagagtatggaaaccgaatgaaaacataaccggagaagcggtcattgacataaagagagacataactaacgtagcgatcaaattatcgctagtatgtgaggttcgcgtgaaaacggggaacagtccaacctccaagaataagagaattgagaaaaccttagagaagtcgacgtttctttatggacaggactacgtaaagacagctttttcggctaaggaaaagaaaccgcatgttgataaaaccaccattctcaatggtttaagcaagggggaacacaggtttccttttaggatacgaataccacgaggcagaggaatgttgagctctataaagttcgaaaggggctcgataacatacttcctctcttgcactttagaatccctcaacaacatcaacggattaaaaaaaccagaagcaagatgcgaacgtgagtttgcagtcatagttccgctggacgtctcgaggctgcccaagccgaaaattaagacagtggttttacaatcagcatccatggtccaaaacaaaaagaacaaatctacagaggacgaatcctcatcgtatacacaattaactcaaaagtctactacttctaattcttctagcagttcagtaatctccaagacgtcccccttaccaaataaaacggtgactatatccgtagacataccgcaggctggattcatgattggtgaaattatccctatagacgttaagattgaccactataagcctttctatgcccctgcgggtctcaccaccactttggtgaggatatgtagggtgggcggtgcaggcaaagatgatcctatggagactttcagaaaagatatatgtcagagtatctctcctatatatattaaccctgaaacgttgcagtttcaatctagagtttatctgaaagtgccccttgatgcattttcgacccttactactgtgggaaaatttttctccttccaatactatatcgaggttatggttaacttatcaaaaaaaaacgtggtttacacagaatctaatagaataataggaactcctattggagaacaaaatggcttgggcgtagagaataatatcaaccgtatccaaaggaaaatgctacgtatggtcaatccagaaacgttggagaacgattctgagggttatgaatccagtatatttttcaaagatatggtaaatgtggaaaagctaaagagactgaggaatgtaactggtatgtccatagaaaccgtcataggaacgacgagatccgaacagcagcaatctgatgcaagcatcccatcccaatcctcaatcacggctcctcaaaattctccatcgaatttaagagattggttggccccattaaatgcatatgatagtgacgatgttccagttccaaagtattcgccaaatgataaagtcagtgtaccgtcggaagacaaacaagaacttgaacagaaaagactacaacagttagaaagcgatcctcccccttgtgatgactattaa

SEQ ID NO: 79988 - DNA, 804 bp, Saccharomyces pastorianus
atgcctgcaggtcgtgtggaagtcaacaagtttaaaaaatccactaatgtagagatcagcaagctcgtgaagaaaatgattagctcttggaaagacgcaattaataaaaataagcgttccaggcaagcacagcagcatcatcaagatcatgcgccaggcaatgcagaggacaagacaactgtaggtgagtccgtgaatggtgttcaacagccggcctcctcccagtcagatgccatgaaacaagacaagtacgtcagcactaaaccaagaaatagtaagaacgatggtgtggatacagctatataccaccacaaattacgtgatcaggtactaaaagcactctacgacgttttggccaaggaaagtgagcatccacctcaatctattttgcatactgcaaaggccatagaaagtgaaatgaataaagttaacaactgtgacaccaacgaagccgcttacaaagccaggtatcgtataatttattcaaacgtcatatcaaagaataacccagatctcaaacataaaattgccaacggtgatataacacctgaattcttagctacatgcgatgccaaggatctggcaccagcgcccttaaagcaaaagatagaagaaattgccaagcaaaacttatacaacgcacaaggtgccaccatagaaaggtcagtcaccgatagatttacttgtggtaaatgtaaagagaagaaggtatcttactatcaattgcaaacaagatctgcggatgaaccattgaccactttctgtacatgtgaagcatgtggtaacagatggaaattctcttag

SEQ ID NO: 79989 - DNA, 102 bp, Saccharomyces pastorianus
atgagggaatttaaattggaattggaaaaatctggcatacagttaggacctgaacaactggccccgctaatgaccgttttaggccttgagaagaaaaaatga

SEQ ID NO: 79990 - DNA, 414 bp, Saccharomyces pastorianus
atgctaagagttatatggaagcatagttccagagtcactcgttcgatagaactatcgaacatttctaccactaatcacaccaggagtttaaggaggctttcctggatttctccgagaagattttacgctcaatcttgggacgacagacagcctaatgacaaaatagatgcacacataaaggtgcagaaactcatggatcaaataaattcgaggcctaatgttctggaaaagttagaaaaggttagcaatatcatgatcgaaaaaaaattggttaatctagatgggacttctgccaatgaagaaaatacgatgaaaccatggcaaatgattaagatcttaatggacagagatctgagacacgctatgagggaatttaaattggaattgggatcctctagaaacgaccggcaatga

SEQ ID NO: 79991 - DNA, 1176 bp, Saccharomyces pastorianus
atgcagctttatctcgttccattatttacttcattattattggcccaacaattaaaagaccgaggccaagaacgagatgaaggacataaagagaaagaggaaaatataaatctcatcgggtcttcctcagtcaagaaattattttctcaactaattttttttagctctttgaaattgtgtgaaaatttggtcataaaggaaaaaaatttagcactatatcatttgatcaaattcgcgacaaaggtttctctggatgatttgattttacaaaaaatatccataaacttattgaatcatttgttcttccatcaaattagggatggaagtgatgatgataatttaattaaaaagttatgtttaaaaaatcaactttctttccaagctttgaaagattacatcacattgtggaatgacggttctgaagtttataatgcattttataaggagcttttctatgaagagcaaccaaagattaagccaataaaactaacaacatctgacttgctgaaattattccctgaggatgttcaatttgtgatatccactccaccaaatacaataacttcagcatcaacaagcgataattgtacatcatcacaatcagctgcgcagaaaaatattgaaaactttactacgttatcgaagtacgatgcctactcgtccacatctttcataccgtccacgtcgaaaaacactaacactaacgttaataagcagcagcagcagcagcctcaaaactctactccatgttcttccaacaggtttttgttcaacaaaagcagcctaatttctcaggaacgtaatggtagcaacaataacagcggcacacaaggacctggttccatgaatgagagttattctcttgacaattcattcaacacaaccaataccaatatgacgagacaaccaaccaccttaactagagcaaccgatgctatgactacggcacctacgacaccaactccatacaagaacactagtggaagcagcagtaacaatctatggattgaatcccccatgacaaatttcaagggttccaccatcagtaaaagtactaataagagcaaaatggttaatactggtaaaaattatattttagggggccacaataaagttaaaaacaacagtagagctcaatcaatacatatagatgactttgaaaatgagaacaattaa

SEQ ID NO: 79992 - DNA, 1419 bp, Saccharomyces pastorianus
atgcagaagtgtgctggccatgcaccactgatgactgcagcctcgcgggtctcccaagacaccgtagacgctcttttgcaagctattttaaaggccttccataaattagcttcgatcgacagtcacattaatgatcctgttgaaatagccttcaagctcataaactcttttaagtatctgccaatttcaggctcttctgtaaaagattttgagtcggaactgcgggagttagacgttttttctccccttttgcagtcagccgttactgctgctaataatagcaatatcatatgggaccttatagcggtgttatttgcatacatttccatccataaacagctccatcctttgatcctgcacaatctgaacatatggaaggattttatggcagataatgacgaagaaacggcgacaaccacggacggggactcaatgaatttcggcgtactgtcgcttctttccattgttcaaaattttgaagaaataacgccaaatctatttgagtttctaaagctcggtttgagatccactttactcaagatatgggtagcacaatggcaaagatacgatccttcggcaacgaacttaatcaacggtgatgagaaaatttctagctggataacaaaggattaccaggtggatttttttatcatcacttcattagcatcaacgtcctcattagaagttttgccatctcattattttgtgtacaagatctctaaaaggatctctcacttcccaaatttaattgatcctaaactatatcgatctgcaatttctacaataatggaaaatgggatttcagacaatggtggtggtgagaactccagcgacaaaattgatccgactgatttgtcctttcactttcaagttttaatggaagttattgaccatcctgagttgaattatttgcaggaaaatcgattaattttgttgctcgacattgcattaaattatttaatcctggttcctactcactgtttacattcaaaccttggtgaattgggctctactcaaagtttagcatccactttaaatatcattcagttccttctatcgaaattcttaatcaacatgggcagtatttcgcaattaattaatcaatacaacaggaaatgcatcactactaataacatcaataataacaacattaacaacaatggcgttattaatggtagtactaacaccactagtactactactactaccaccactaataacaataataatagcaataatagcagtattagtaataataacagaaaaatagactggacgcaatcatatcaaacgaggtaccaaattccatactggtttgaggactcaattttgccaccaattccgcctatttcgaaatcgcttttcacttttgacaagaacctagaccatgagtcggattcaattatgattgtaaaatga

SEQ ID NO: 79993 - DNA, 138 bp, Saccharomyces pastorianus
atgttgtccaagactaaggtctactacttccaaggtggtaacaacgaattgggtactgctgtcggtaagttattcagagtcggtgttgtctctattttggaagctggtgactctgatatcttgaccaccttggcttaa

SEQ ID NO: 79994 - DNA, 1407 bp, Saccharomyces pastorianus
atgcagatcccatttgtcggtttcctacctatcaggtctaacaaccacatggccgcattgggtgttttcggtttgattcagattgtcgccttcggtgacttcgtgaagggccaaatcagcacagctaagtttaaagtcatcatgatggtttctctgtttttgatcttggtccttggtgtggtcggactttctgtcttgacctatatggggttgattgccccttggactggtagattttattcgttatgggataccaactacgcaaagacccacattcctatcattgcctccgtttccgaacatcaacccgtttcgtggcccgctttcttctttgatacccactttttgatctggctattccccgccggtgtattcctactattcctcgacttgaaagacgagcacgtttttgtcatcgcttactccgttctgtgttcgtactttgccggtgttatggttagattgatgttgactttgacaccagtcatctgtgtgtccgccgccgtcgcattgtccaagatatttgacatctacctggatttcaagacaagtgaccgcaaatacgccatcaaacctgcggcactactggccaaattgattgtttccggatcattcatcttttatttgtatcttttcgtcttccattctacttgggtaacaagaactgcatactcttctccttctgttgttttgccatcacaaaccccagatggtaaattggcgttgatcgacgacttcagggaagcgtactattggttaagaatgaactctgatgaggacagtaaggttgcagcgtggtgggattacggttaccaaattggtggcatggcagacagaaccactttagtcgataacaacacgtggaacaatactcacatcgccatcgttggtaaagccatggcttcccctgaagagaaatcttacgaaattctaaaagagcatgatgtcgattatgtcttggtcatctttggtggtctaattgggtttggtggtgatgacatcaacaaattcttgtggatgatcagaattagcgagggaatctggccagaagagataaaagagcgtgatttctataccgcagagggagaatacagagtagatgcaagggcttctgagaccatgaggaactcgctactttacaagatgtcctacaaagatttcccacaattattcaatggtggccaagccactgacagagtgcgtcaacaaatgatcacaccattagacgtcccaccattagactacttcgacgaagtttttacttccgaaaactggatggttagaatatatcaattgaagaaggatgatgcccaaggtagaactttgagggacgttggtgagttaaccaggtcttctacgaaaaccagaaggtccataaagagacctgaattaggcttgagagtctaa

SEQ ID NO: 79995 - DNA, 276 bp, Saccharomyces pastorianus
atgttttttggtggtgcaccattctctattgccagacagaccaaatcgatgtggataaccgctgttctttgtggtatgttgtctttgattatgggattattggtaaggatagtccctgatgaagtagcattgaaagcatttccggttgcttatgttcaaaaatttaaatatgtatttggacttgagtttctcagaagaaagcaactcgcaaaaaatgacgacgaagaagcgcttttggacgaatctgatacaccagagtctacggcgttctactag

SEQ ID NO: 79996 - DNA, 267 bp, Saccharomyces pastorianus
aatgaaggcaccccaataaacaatgtctactttgcagccggagcgttatttgtatcttctggattcgacaccagtattaagcttgacattatttcagacccagaaagtgaacggcccgctattgaatttgagacgcccacctttttagtttccaatgacgatgaggtcagccaattctgttacctttctgatgatgaatcaaatggggaggtgcttgaagttggaaaaaaaaacttctgcgctttgtataacttaagtaatccttaa

SEQ ID NO: 79997 - DNA, 1032 bp, Saccharomyces pastorianus
atgactaagaccatcacagttgctcatatccagtatgattttaaagctgttctggaagaaaatgatgaaaatgacgatgaattttacatcaatgttgacaaaaacctaaatgaaatcaaggagcataagatagtagtgttaggaaatagcaggggtgtagatgcaggcaaaggaaatacatttgaaaaggttggctcccacttatacaaggcgcggttggatggacatgattttttattcaatactatcataagagattgttcaaagatgctcaagagggcggattatactgccgtagacacagctaaacttcagatgagacggttcatattaggcactacagaaggcgatattaaagtattggattcaaatttcaaccttcaaagagaaattgaccaagctcacgttagtgaaataacaaaactaaagttttttccaagcggtgaagctttgatatctagttcacaggatatgcaattaaagatctggtcagtaaaagacggctcaaatcctcgcacgttaattggacacagggcgacagtcacagatattgccataatagaccgaggaaggaatgtgctctctgcctctttggatggtacaatttgcctttgggagtgcggcacaggaacgacaattcacacgtttaacagaaaagaaaacccgcatgatggtgttaacagcatagcgctgttcgaagggacagagagacaattacatgaaatttctacttccaagaaaaataatctagagtttggaacatatggaaaatatgtgattgctggccacgtttctggtgttattactgtacataatgtattttccaaagagcaaactattcaactcccaagcaagttcacatgttcatgtaattcattgacagtcgatggtaataatgcaaactatatttatgccggatatgaaaatggaatgctagctcaatgggatctaagatcaccagaatgcccagttggtgagtttttaattaatgaaggcaccccaataacaatgtctactttgcagccggagcct

SEQ ID NO: 79998 - DNA, 135 bp, Saccharomyces pastorianus
atgtctgaagtcatatccaaagtttattctgacacaagaataacaacttttcttcctgaacattctaatggtttgagtaacgaatttaggtgctacgcaaattttgaatgtagttcatggaaatttgcttcttga

SEQ ID NO: 79999 - DNA, 438 bp, Saccharomyces pastorianus
atgaagcttttcaaggaagattggcagctttcccagttttggtacagcgatgacacagccgcaattttagcagatgccatattggaaggtgcggacgaaaacactgtaattgcaatagttagtgcgccatccgtctatgctgccattcaaaagaaacctactaatgaaattccaaccgaacatatctacttgttcgaatttgataagagattcgagttgttagctggaagagatcatttctttttttatgattacaataaaccactggacttcagtgatgaaattaaaggaaaagttgatagattgttaattgacccaccttttttaaatgaagattgtcaaacaaagtgtatgtatatcataaacatatccctactcattttttttatctttttaccagtattttttcatcttactaactgttattcattgatataa

SEQ ID NO: 80000 - DNA, 876 bp, Saccharomyces pastorianus
atggtgcaaatgataaagaaggttctaggaactttttttacctcaaaattggagattatgctgcgagatatatctttatcctctgaaatgtatcaagcattccaacactcaacaaccaacagcatagaatatttgagttttgcaccacaagttttgacgagaacgagctggccctttcagagtactaatccaattgatgaaggtatttcactacctcctagaatgtcacaaattttagctggctttgagggctattacagcttaaaatacaaagaaagagtgctaaagtgggctcatcatctaagtgtaattgaaattggctgccaatttaatagcggttactacgaaataagtttttctgtttacgctggagtgattttccttctatttgaagactatgaagaattaacgttgggggaaatatatgaactaactcatattcccatagatgacgttaagtctcttgtaatgtcaatgtcgacaatacccagatgtaagattttgaaaaaatcatccagttcaggaaatatgaaattttcagttaattatttcttttcttctccaaacaggaaagtgaaagtgccggttattgcatgccctctaccatctcagaaatcagataatttggcaaccgcaagttccgtagacacttatgataatgaaattgttatggagcttagtgctattattcttcgtatcatgaaaacagaaggtaagctaagccatcagcaattacttgaaagaactacgaaacggacacagtctcggctcagtcttacaccgagcatttttaaacgaagcattcagcttttaatagagaaagaatacattcagagaaacgcagatgacccctcttattaccattacctttcctaa

SEQ ID NO: 80001 - DNA, 1341 bp, Saccharomyces pastorianus
atgataactaataagaaaataaagataagtgtcccagaaaaactcggtttgtcagaagaatcttttgaggaatcctgggaaacagttaaatatgccgttgatcatatatacagcgatgacatggccgacctttccttcgaacaagtgtacaagaccatttatactatcgttttaaataaaaaggggccaatactttataacagattgaaagattatttaatccaaaaattagcgcttttgagggaaacgatagtcaaggacaatactcatgattatgagtttcttggaactatggcacggttgtgggatgtggaatgccattgttttaaaataacaggagacttaatgatgtatatggacaaagtttattgcaaaccaaatagatgcatggaggtatacgacatgtgcctcgatcttttccgaatcgaaatattgcaaaaatgctcatcttctctcatctcagcactgatatctgatatagaaaggattcgtaatttaggatctgtcgactccgaacatactagtttgtggaaagtactaataggaatgatggagacattacatgacaatagagatagttttttcttaaccgattttgagccggttttgattagcgcgacagaagaatactacaataaagctattgatattgaattattaacgccaattgagagcctggataagattaggaagttaaggcagtttgaaagtatgctagactcctcttttctaaatgtggattctcataataagttgaagactgtattagaaaatgtccttatatggggaaagttgagtgatattattgaagatctaacgcacgaagcaatggtaatttcaaatggaaagctactccaagaaatttatgacttgtcaagcgaggaaaaatatcgcgttactgtcattgaatctattaaatcttacatcaataaaaatgccataaatattccttttaatgaaggtaaccgcaaaaaagggcagaatgcgattacttggtcttcggaaattgtagagctatatcgcagtcaacactcgtttttggaaagtattgattttggttctgttcgtcttaataatttgaccggggatgtatctaatgcaatacttggcgatgttttctcaatgtatttctctaaagaaggagcattaccatctgagtatctttctacctacgtggaccattgtatgaaacgaaccaaggaaaaagatgctgaaatagtgaagatcaagcaagatttgcttgatagtaccaaattaatcggactcctaactgagaaggatatatttgaaaagatttacaaaaaacaactctccagaagataccccaggagaggtctttag

SEQ ID NO: 80002 - DNA, 312 bp, Saccharomyces pastorianus
atgatttttgctttcaagtatatcataagaaggcggattcaaagtcaagaaattatcaagaacccagaaatttccagtatcagttcaagtgaatttggtggagagaaaaattacaataatgaaaagagaatgagcgttcaagaatccataacacaatctatgcgaattcaaaattggatggatgatagttactatggtcacgggttgacaaataatgactcaactccaaccaggcacaatacatcgagttccataccaaaaatttcaagaccaattgctagccaaaactccctgggttggaacgaagtttga

SEQ ID NO: 80003 - DNA, 3474 bp, Saccharomyces pastorianus
atgcagtttccattcgcttgtctcctatcgacccttgtaattagtgggtcattggcccgggccagccccttcgactttatattcggcaatggaacgcaacaagctcagagccaaagcgagagtcaaggtcaagtttctttcaccaatgaagcttctcaggatagttccaccacctctttggtaacagcctattctcaaggtgttcattcgcaccagtctgcaacaatagtgagtgccacaatctcttccctcccatctacttggtatgatgcgagctccacttcccagacttctgtgtcatatgccagtcaagaatccgactatgccgttaatcaaaactcttggagcgcgtctactaatcaactgccatctaccagtacgacaagctactatgcgccaaccttcagtacatcggccgattttgctgcttctagtgtaaatgcagcttctgatgtctccactgccagtgttcccattgatacgagtgctaattctatccctttcacaactacaagtaacatagagactacaacgagtgcacctctcacttcggacactccacttatttccactagtacgatgtccgcagctgataacgtattttcgtcagcaaaccctatttctgcctccctaacaaccaccgatagttcagaaagttttgaccaaacttcgactgctggtgccattccggtgcaaagttcagcagattttagtagttctagtgaaattttagtacaaagttcggtggatttcagtagccctagttctccaactactaccgatatatcgctatcagctgccccactgcaaacaagtgaatcaagcagttttaccactgcatcagcagctctaccagtaagttcaacagacgttgatggctcaagcgcctcacctgtagtgagcatgagcgccgcaggacaaatagctagctcaagcagcacagataatccaactatgtcagaaaccctttcgttaacatctacagaagttgatggttccgatgtttcatcaacagtgagcgcattattatcggctccttttttacaaacaagtacttccaacagtttcagcattgttagcccatcggtatcttttgttccatcacagagttcctcagacgttgctagctccagtactgcaaatgtagttagttcatccttttctgatattccaccgcaaactagtacctcagggagcgtagtttcggtagcgcaatccgcatctgccctcgcatttcaaagttcaacagaggtatatggtgccagtgcctcgagcacaatgagttcattattatcaactacttcgctacagtctactactttggatagctcaagtttagctagctcctctgcgtcgagttcagaccttacagattatggcgtctccagtacagcaagcataccgctgttgtcagcctcagaacaagcaagtacttccagcagttttagcgttgttagcccttcggtatcttttgttccatcacaaagttcctcagatgttgctagcaccagtgctccaagtgtagttagttcatccttttcttatacttcactgcaagcaggtggctctagcatgaccaatccctcttcatcaactatagtatattcaagtagtactggcagttctgaggaatccgctgcatctacagcttctgcaacactgtcgggctcctcgtctacttatatggcaggaaatttgcaatcacagcctccatccacttcaagtttgctttcggagtctcaagctacaagcacttcagctgtgctagctagcagttctgtttctacaacttcaccctataccactgcaggtggtgcatctacagaggcctcatccctcatatcatctacatctgcggaaacttcccaggtaagttattcacaaagcacaactgcattgcaaacttcctcattcgcatcgtcttcaacaacagaaggaagtgaaacatctagtcaaggtttttctaccagctctgatttagttcaaatgccttcttcgatttccagcgaattctcaccctctcagacgacaactcaaatgaattctgcaagctcatcatctcagtacactatatcatccactggtatactttctcaggtttcagacacatcggtgtcttatacaacttcaagttcgtctgtttctcaagtttcagacacaccagtttcttatacaacttcaagttcgtctgtttctcaagtttcagacacaccggtttcttatacaacttcaagttcgtccgtttctcaagtttcagacacgtcagtaccttctacaagttccagatcgtccgtttctcaagtctcagacactccggtgccttctacaagttcaagatcgtccgtttctcaaacatctagctcactacagcccaccactacatcctcccaacgtttcaccatttccactcatggagcgctttctgaaagtagttctgttagccaacaagcttctgagattactagctcaatcaatgcaacagcttccgaataccatagcatccagacgaccgcggctactcaatccacaactctatcttttaccgacgcaaacagcagttctgcttccgctccattggaagtggcaacgtctacgccaaccccatcttcaaaggcatcctctctgttgcttacaccatcaacatcctctttaagtcaggttgctacaaatactaatgtacagacgagtttaacaacggaatcgacgaccgttttagaaccatcaacgactaacagttccagtacgtttagtctggtcacttcaagtgacaacaattggtggattccaactgagttaatcacgcaggcaccagaagctgcatccactgcatcttctaccgttggaggaacacaaactatgactttgccccatgcaattgcagccgcgacacaagttcccgagcctgagggctacaccctaatcacaatagggttcaaaaaagctttgaactacgaatttgttgtatcagaaccaaaatcatcggctcaaatcttcggatacttgcctgaagctctgaacacaccttttaagaacgtattcacaaacattacggtactacaaatagtgccattacaggatgactcactaaactacttagtaagtgttgctgaagtatactttccaactgcagaaatagaggagctgtcaaatctaattaccaactcttcaagcgctttttacacggatggaatgggtacagcaaaatctatggctgcaatggttgattcctcaataccgctaacgggcctcttacacgatagtaacagcaactctggcggatcttcggacggatcctcctccagtaattcgaactcaggatcttcaggttcaggatctcaggatctaattcgaactccggtgtgtcttcatcttccggaaattcctatcaagatgccggtactttggaatattcatccaaatctaactccaacgtatccacttctagcaaatcaaagaaaaaaatcattggtttag

SEQ ID NO: 80004 - DNA, 96 bp, Saccharomyces pastorianus
aaggcgagaaacgctcgagaactacagaaactgaccacagcgctcgaggacatcgacgaagtgacgtcgttgtacactaacgctagcaacgcttaa

SEQ ID NO: 80005 - DNA, 513 bp, Saccharomyces pastorianus
atgttttgtgttcagcctaaaaaaacggatttcattgactctgacggtaaaattgtcactgcttatcgtagtaacattttcaccaaaatatggtatttcttgctgggtaaaaaaattggtgaaacagaaagattcagctcagattcccccatcggcagcaataatattcaaaattttggtgatatcgatccagaagatatacttaacaatgacaacccctacacccctaaacacgctaatgttgaaggctacgacgacgacgacgacgacgacgacgacgctaatgatgaaaacctatcatccaacttccataacagaggcatagatgatcaatactcacctactaaatctgcatcatattcaatgtcgaatagtaatagtcaagattacaacgacgctgatgaagtaatgcacgatgaaaacattcatcgtgtttatgatgacagcgaagctagcatcgacgagaactattacacgaaaccaaacaacggcttaaatatcacgaactattaa

SEQ ID NO: 80006 - DNA, 840 bp, Saccharomyces pastorianus
atggcaagctgcaatccgaccaggaagaagagctctgcttcaagcctatctatgtggagaacgattctcatggcgttaacaactctaccgctaagtgttctttcgcaggagttggttccggctaatagcacaacatcgagcacagctccttccatcacttcgctttccgcagttgagtcatttacgtccagtaccgatgcaacgagcagcgcaagtttatcaacgccgagtatagcttcaatatcctttacttccttcccacaaagttcttcactgcttactctttcgtcaacattatcttcagaactttcctcttcgtccatgcaagtttcgtcgtcttcaacatcgtcgtcttcttcggaggttacgtcatcatcgtcatcatcatcaatatctccttcctcttcatcatcaacaataatatcatcgtcatcatcactgccgacattcactgtggcatcaacatcttcgacagttgcctcctccacactttccactagctcatcgttggttatctctacgtcttcgtcaacgtttacgtttagttcggaaagttcaagctctttgatttcctcttcaatttcaacatccgtttcgacttcttcagtgtacgttccctcctcttcaacttcatctccaccttcgtcctcatccgaattgacatcatcctcgtactcatcatcctcatcctcatccaccctcttttcctactcctcctcattttcatcatcctcatcctcatcatcctcatcatcctcatcatcatcctcatcctcatcatcatcatcatcatcatcatcatcattcttttcattatcattttcattattaataggttga

SEQ ID NO: 80007 - DNA, 354 bp, Saccharomyces pastorianus
atgcctggctcaagaacatacaggaaggttgaccctcctgacgtagagcaactaggtagatcttcatggacgctgttacactctgtagctgccagctatcctgctcaacctacagaccaacagaagggtgaaatgaaacagttcttgaatatcttctcacatatttatccttgcaactggtgtgctaaagactttgaaaaatatatcagagaaaatgcaccacaagttgagtcaagagaagaacttgggaggtggatgtgtgaagcccacaataaagtcaataagaaattgaggaagcccaaatttgactgtaatttctgggaaaaaagatggaaggacggctgggacgaataa

SEQ ID NO: 80008 - DNA, 141 bp, Saccharomyces pastorianus
atgaaagcaatagataaaatgacggataatccaccacaagaaggcttaagtgggaggaaaataatatatgacgaagatggcaaaccgtatgttggattacgcaaagcaattcaggatctactgatccaatcaagcttgtga

SEQ ID NO: 80009 - DNA, 171 bp, Saccharomyces pastorianus
atgtcctgtgtcatttgcttcaatttttcctgccatttatttgtagttatatttatatctagatcaaccgaaactataccaacgacgaagctgcttcttagtaaatatattttctactgtgtcaacgcattggaactgacattgttcttattctataagtcatacagttga

SEQ ID NO: 80010 - DNA, 174 bp, Saccharomyces pastorianus
atgtcacagattacatcaaaaggtcggcgtatactggataagaaaatccgaacttttccggtgggctttaccagcaaaaaagtggccgggcatgtaattaaatatatcaccgtattttctgctggctttttcttatgcagagaacaaaggccagagtgccttcgaggaaattaa

SEQ ID NO: 80011 - DNA, 87 bp, Saccharomyces pastorianus
atgaatacgtataggaagggaagtttgggacagagacagagacagagagagtacgggcgaaatgggaatgaatcacattctacgtaa

SEQ ID NO: 80012 - DNA, 864 bp, Saccharomyces pastorianus
atgagcaatgtggctggggaattgaagaatagtgaggggaaaaagaaaggcaggggaaataggtatcataacaagaatagaggaaaaagtaagaatgagacggtagatcctaaaaagaatgagaataaggttaataatgctactaatgctacccacaacaatagcaaaggcagaagaaataacaagaaaaggaacagagagtattataactataaaagaaaggctagattgggtaaatcaaccgagaatgaagaatttaagcttgttattagattgctacctccaaatttgactgcagatgaattttttgccatcttacgagataataataacgataatggtgataagcaagatatccagggtaaactcaagtacagtgactggtgtttttttgaaggtcattattctagtaaagtattcaaaaactcgacatattctcggtgcaatttcttgttcgacaacttatcagacttggaaaaatgcgcaaatttcattaaaacttgtaaattcattgataataaggataatattacaattccagatatgaaactgtcgccctacgtaaagaaattcactcaaacatcaaaaaaggatgccgcgctagtaggaacaattgaagaagacgaaatttttaaaacatttatgaattcaatgaaacagctgaatgaaaatgacgagtactcattccaagattttagcgtattgaaatctttagaaaaagaattctcaaaaagcatagagttagaaaataaaatagcagaaagaacagaaagggtgttaacagagctggttggaactggtgataaggtcaagaataagaacaaaaagaagaaaatacaaacgccaaaagaattcaagaagagg

SEQ ID NO: 80013 - DNA, 873 bp, Saccharomyces pastorianus
atgaatatgacaatactgcctaaccataaagacactttttattctatgatctgtttaagccttttccacgtccacgtattgactcaaaaaatcgggacagtcggttttcccagttacgattatgtttacgataatttagtaacgtatttcattgtcatggatgacttgtctaaaatcactacagttttggaactaatgaaaagaaacaacaccaaacaagatccaaataaattagtgttttacatcaattttctaaacaaaattactaattactatgggtgtcgcattcgtttgccgtttattactgagtttatcgaacctttactgcatttcgatgtattttttagcgggaagacgggcaatgccttggatattgaaatcaaagaatctatacacacattgacaatcactgtactgtctatagactcttcttattcctcacaggttgcacaatggcaagtatcccgcatactcgtctatttaaagatgtcgatggaccaatttattgcaggtaaattgtccgcaaatcaaattttacttatattcggccatctatccacacaacttccctcactacataattataacaagcatttgcttagggactctttgcacgagacgtatatcagaattgttaatgtaaaaaacccagaaaagaagaatgtactgattgaatgtctgattgtacaaatagcctttatcaacaatcctcatcatttgatcggctggttgaacatctgtctccagctaatcaatacacataacaaaaagctacttcaacaattgtgggaaatggtttcgagtctagaatcctccctagccatcgactggtggtacacaacggtcttatcaagtcaatcttctaaattatag

SEQ ID NO: 80014 - DNA, 240 bp, Saccharomyces pastorianus
atgcgacaaggtaaggaactggaagcagcctctaagttttataaggcactgactgtataccctcagccagccgatttattgggaatttaccaaagatctattcctgaagccatttacgaatatattatattaatgattgccatcttgcctcctgctaatgtggcttctttcgttaaaggagttgttggaagcaaggccgaatctgatgcggttgctgaagctaacgatatcgatgactga

SEQ ID NO: 80015 - DNA, 1311 bp, Saccharomyces pastorianus
atgtccgccaatatctcagaaactacatcaatgattacagacattgctacagccccttcagaaatcgataggttgatcaggacaacatttataacacaaaggcccagctacttggggttgccagcgaatttggtagatctaaaggttcctggttctcttttggaaaaaccgattgatctatcattaaaacctaacgatcccgaagctgaaaaggaagttattgataccgtactagaattgatccagaattcgaaaaaccctgttatactatcggatgcctgtgcttctaggcacaacgttaaaaaagaaacccagaagttaattgatttgacgcaattcccagcttttgtgacacctctaggtaaagggtcaatagatgaacagcatcccagatatggcggtgtttatgtgggaacgctgtccaaacaagacgtgaaacaggccgttgagtcggctgatttgatcctttcggtcggtgctttgctctctgattttaacacaggttcgttttcctactcctacaagactaaaaatgtagtggagtttcattccgattacgtaaaggtgaagaacgctacgttccccggtgtacaaatgaaatttgcactacaaaacttactgaaggttattcccgatgttgttaagggctacaagagcgttcccgtaccaaccaaaactcccgcaaacaaaggtgtacctgctagcacgcccttgaaacaagagtggttgtggaacgaattgtccaaattcttgcaagaaggtgatgttatcatttccgagaccggcacgtctgccttcggtatcaatcaaactatctttcctaaggacgcctacggtatctcgcaggtgttgtgggggtccatcggttttacaacaggagcaactttaggtgctgcctttgccgctgaggagattgaccccaacaagagagtcatcttattcataggtgacgggtctttgcagttaaccgtccaagaaatctccaccatgatcagatgggggttaaagccgtatctttttgtccttaacaacgacggctacactatcgaaaagctgattcatgggcctcacgcagagtacaacgaaatccagacctgggatcacctcgccctgttgcccgcatttggtgcgaaaaagtacgaaaatcacaagatcgccactacgggcgagtgggatgccttaaccactgattcagagttccagaaaaactcggtgatcagactaattgaactgaaactgcccgtctttgatgctccggaaagtttgatcaaacaagcgcaattgactgccgctacaaatgccaaacaataa

SEQ ID NO: 80016 - DNA, 1962 bp, Saccharomyces pastorianus
atggttggtcaaaagtccgattttccaatcaccaaaagaaaagtgtactctaacacaggaggtaaccatttcaactttgattttgtaagagtaaaattgattgttaacccctctgaatgtgacaaattagtcaccaagggccctgctcattctgaaactatgtctacagaagcagccgtttttaagaatttttggggaattaaatcttccttaagaagattcaaggatggctccatcacccattgttgtgtttggtctacatcctcatcagagcccatcatttcctcaattgttaactttgcattgcagaaacatgtttcaaaaaaggcacaaatatcaaatgagactatcaagaagtttcataatttcctaccgttgccaaacttaccctcaagtgctaaaacatcagttttgaacttgagcagctttttcaacttaaagaaatcctttgacgatttatacaaaataattttccaaatgaagttaccgctttctgtaaaatcaatcttaccggttggctctgcatttagatacacttccttatgccaaccagtaccattcgcatactctgatccagatttctttcaagacgtcattttggaatttgaaacctcacctaaatggccagatgaaattacttccttagaaaaggctaaaacagcttttcttctcaaaattcaagaagaattaagcgctaactcttcaacttataggtcgtttttcagcagagatgaatccatcccatacaatttagaaattgtaaccttgaacatcttgacacctgaaggttatggattcaaattcagagttctaactgaacgtgacgaaatcctttatttaagagctatagcgaatgctaggaatgagttgaaaccagaattggagaccacattcctaaaatttactgcaaaatatctggcttccgtaagacatactcgtactttggagaatatatctcattcgtatcaattctactcccctgtggtaagactattcaaaagatggttggacactcatttattactaggtcatataacggacgaattagcagagttgattgccattaaaccttttgttgatcctgcaccatatttcattccaggttctcttgaaaacggtttcctcaaagtgcttaagtttataagtcaatggaactggaaagatgatccattgattttagatctagtaaaaccagaagatgatataagagatacatttgaaacaagtattggagctggctcagagctagactccaaaacgatgaaaaagctttctgaaagattaaccctagcacaatataagggcattcaaatgaacttcacgaacttgaggaacagtgatcccaacggtacacatttgcaattttttgttgcctctaagaacgatccaagcggtattctttattcatcaggtatcccactacccattgctacaaggcttacagcattagctaaagtagccgtgaatcttttacagacacacggtttaaaccagcaaactatcaatcttttattcacgcctggattaaaagattacgattttgtcgttgatttgaggacaccaataggtttgaaatcatcctgtggtatactttcagccacagagttcaagaatataactaacgatcaagccccatcgaactttccagagaatttgaatgatttaagtgaaaaaatggatccaacataccagttagtgaagtatttgaacttgaagtacaagaatagtttgattttatcaagccgcaagtatataggtgtgaatggtggagagaaaggagataaaaatgtcatcacagggctaataaagccactcttcaagggagcccacaaatttagagtaaacttggattgcaacgttaaaccagtggatgatgagaatgtgattttaaataaagaagccatatttcatgagattgctgcattcgggaatgacatggttataaattttgagacagattag

SEQ ID NO: 80017 - DNA, 1059 bp, Saccharomyces pastorianus
atgccaaaggagttgttcgaaaaaaaagatttcttaaatttcaggtgcttacacaagaggagcgtttatttagcatacctaacccaccacctattgatattattgaaaaaagataaattagactcatttttgcaactcgagtattcttattttgataatgatccgcttttaccaattttaagaattagttgttccaaaccaacgggtgattctctttctgattataacttttacaagaccagattctctatcaacttgcttattggtttcccatacaaagtctttgaaccaaaaaaactgttacccaatagaaactgtattagaatagcacaagaaagcaaagagcaatctttaccagccactcctctttacaatttttcagtgttatcttcttcaacacatgaaaactacctgaagtatttatacaagacgaagaaacaaacagaatcttttgttgaagctactgttttaggtagattatggctgcagcaacgtgggttttcatccaatatgtcgcattctggttcattgggtggattcggtacttttgaatttactatcttgatggcagcgttattaaacggtggtggtataaatagtaacaagatattacttcacgggttttcatcataccaattgtttaaaggtgtaataaaatacttagccactatggatttgtgccacgacggccatttacaatttcattctaatccagagaattcctccagttcaccagcttctaaatatattgatgagggtttccaaactccaaccttatttgataagtcaaccaaggtcaatattcttacaaaaatgactgtttcttcttatcaaattttgaaagaatatgccggtgaaacattgagaatgctaaacaacgttgttcaagaccaattctcaaatatttttttgactaatattagccgttttgacaatttgaagtacgatctgtgttacgatgtacagttacctttgggtaagtacaataatttagaaacttctttagctgctacatttgggtcaatggaaagagtaacatttattactctggagaattaa

SEQ ID NO: 80018 - DNA, 300 bp, Saccharomyces pastorianus
atgtcttattttgcagatataaactttagtactttgaggtcaatgatcccgccttttacaccccaactagacagcgaaactgatgccggttattttgatgacttcaccagtgaggctgacatggccaaatatgctgatgttttcaaaagacaagacaaattaacggctatggtagatgactcggcagtatcatcaaaacttgttgggttcactttccgacatagaaatggtaaacagggttccagtggcatcttattcaacggactggaacactcagaccccttttcaaccttttactag

SEQ ID NO: 80019 - DNA, 555 bp, Saccharomyces pastorianus
atggaatttgtaccaggcggtgattttcgtacattattaataaatactagatgcttgaaaagtggccatgcgagattttacatcagtgaaatgttttgcgctgttaatgcgttacatgatttaggctatacacatagagatttaaagccggaaaacttcttaatcgatgccaagggacatataaaattaacagattttggtttggctgctggtacgatttctaatgaaagaattgaaagtatgaagataaggttagaaaaaatcaaggacctggaatttccagcgtttacagagaaatctatagaagatagaagaaaaatgtacaaccagttgagggagaaggaaattaattatgcgaactccatggttgggtctccggattatatggctttggaggttttagaaggaaagaaatatgactttactgtggattactggtcgttgggttgtatgctgttcgaaagtttagttggttatacaccatttagtggatcatcgactaatgagacctatgacaacttaaggcgctggaaacaaactttaagaagaccgtag

SEQ ID NO: 80020 - DNA, 516 bp, Saccharomyces pastorianus
atggacatagacgaagtatctcaacctgatatggatgtctcgaactctcccaagaagcttccaccaaagttttacgaaagagcaacttcaaataaaacacagagagttgttagtgtttgcaaaatgtactttctagaatattactgtgatatgtttgactatgtaattagtagaagacaacgcacgaagcaagttctagaatacctgcaacagcaaagccaacttccgaattctgaccagattaaactcaacgaagagtggtcctcttacttacaaagggaacatcaggttttgagaaaaagaaggttgaaaccaaaaaatagggattttgaaatgatcacacaagtaggtcaaggtggttatgggcaagtttatttagccagaaagaaagacacaaaagaggtgtgtgctttgaaaattttaaacaaaaaactattgtttaagctcaacgagacaaaacacgttttaactgaacgagatatcctaaccacgacaaggtctgaatggttagtataa

SEQ ID NO: 80021 - DNA, 210 bp, Saccharomyces pastorianus
atgctatcaaaatcagaaaaaaatgtcgacctcttggcaggcaatatgagcaatttgagtttcgatgggcatgggactcctgggggcactggactgtttcctaaccaaaatataacaaagaggaggacaaggcctgtgggtatcaatgattcaccttcgccggtaaaccatccttttttccttacgaagatacttccaacatggacatag

SEQ ID NO: 80022 - DNA, 1278 bp, Saccharomyces pastorianus
atgggtacttataaattagcaaatggaatcactctttcatattttatttatccggatgatactcttcaaggggagaaaaaaagcatactggacgaatttggcaaaagtgaggatcaggtagacattctccttacaaaagaatggggcctttcgatctctgagagatgtggaaggttgtctggaagtgaagttgttgatgaatgggcgaaaaagttacaagcaaggtaccattttgccttttcagatgaaataaacttttacgaattagagcctttccagtgggaaagagagcgcttatcgaggttcctcaatattccaaaatatggatctggaaagaaatgggcctatgcattcaatatgccaataggggacaacgaactaaaggatgaacctgaaccgcccaacttgatagctaacccgtataatagcgtggttacaaacagcaataaaaggccactagaaacagaaacagagaattcgttcgatggagacaaacaggtacttgctaatagagaaaagaatgaaaataaaaaaattcgaacgattttgccgtcaagttgtcatttctgcttttcaaatccaaacctcgaggatcatatgataatatcaatcggcaaactagtgtatttaaccacagcgaagggacctttaagtgttcctaagggtgatatggatatctcaggccattgcctcattattcccattgaacatattccgaaattagatccaagcaagaacgcagagttgacacagagtattttggcttatgaagctagtcttgtgaagatgaactacataaaatttgatatgtgcacgattatcttcgaaatacagtctgaacgttctattcatttccacaaacaagttattcccgttccaaaatacctcgttctaaagttctgcagtgccttagatagacaggttcatttcaataacgaaaaattcacaagaaatgctaagctagagttccaatgttacgattcacactcttccaaacaatatgtggatgtaattaacaaccaatccaataattatttacaatttaccgtctacgagactcctgaagcggacccaaagatatatttggccacatttaatgccagtgagacaatagatctgcagtttggacgacgtgtactagcctttttacttaacttgccacgcagggtgaaatggaattcttcaacctgtttacaaactaagcaacaagagactatagaggctgaaaagtttcaaaaggcctacaggacctatgacatttctctcacagaaaactaa

SEQ ID NO: 80023 - DNA, 768 bp, Saccharomyces pastorianus
atggaggtggccagaagcatgataaagaacgaaggcatccggtccttttggaagggtaacatacccggttctttgctgtacgttacctatggctcagcgcagtttagttcatactccctttttaatagatatttaactccatttggactagaggcgcgcttacatagtcttgttgtcggagcctttgctggcataaccagttccatcgtttcctacccgttcgatgttttacggacccgactagttgccaacaaccagatgcactcaatgagcatcacgagagaagtgcgtgatatctggaaactagaaggtctccccggatttttcaagggctccatcgcgtcaatgacaaccataactctaaccgcatctataatgttcggaacatacgaaacaatcaggatatactgtgacgaaaacgaaaaaacgaccgccgcgcataaaaaatgggaactggctactttaaatcacagcgctggtaccattggcggcgtcattgctaagatcattactttccccctcgaaacgatccgtaggcgaatgcagttcatgaattcgaagcatctggaaaagttctcccgtcattcgtctgtatacggttcttataaagggtacggattcgcaagaatcggtttacagattttgaaacaagaaggtgtgagttcgctttacagaggtattctggtggccctttccaagacaatacccaccacttttgtgagtttctgggggtatgaaactgccatccattatttgcggatgtactaa

SEQ ID NO: 80024 - DNA, 939 bp, Saccharomyces pastorianus
atggccacttcaggtaacacaactccttcttattcatcgggctcaagacctcaaagcatgtataatgggtataacccggctgtatcaataacgagtaatgggatgatgctccaacaatcaacagcaaataataatactaattcaacaactaatttgcgccaccaaagaaatatttcacaaacaagttccctacctggattttcatacacatccccatccctaccagtgaattctccaggtagctctaattcagaatccagctcaggcggttattttgccattccgcttcatgggaacaacaacaataataattacacccagagaaactctgaaggctctagcccatgttataatgacgaccaaatacgacaacaacagcaacctttacaaatgcaacctttatcaagaacttcaagttcaagtgttaatgtcacagcgatgagaagtacatctgcaggtaattcaattacagcgaacgctcccgttgtacctaaggtgatggtcaataaccaaaatgttaaaactgttgctgccgatcagtctgctacagcaccttcttcacctaccatgaattcgtccgtcacaacgatcaaccgcgaatcaccataccaaaccttaaagaaaacgaacagcacaggcaatgttccttgtttgactgctgaaaagactcatgcgcaccctgctttctataaacggggcaataatagcgcccaaaatttgactacctctagttcaacagcttctagggtgcaccctatccgaaaacacaagaaaaacgtatcatttagttctttgaatagtttaatgttttcaaaaaagggtgcaaatcacggtggtaatctaatgactaaccaatttatgagtggtggaattcaagaagatgatggtgattcaactaataatgatactataaagctaaaccagtcgatttattcttaa

SEQ ID NO: 80025 - DNA, 123 bp, Saccharomyces pastorianus
atgaaatcacaccgattcaaggcgggacatatgtcaagaaacagcgtgaacataggttcccatacaccttgtttaacagatagcacattcaccattacaagatcggtactacgacgtccgtca

SEQ ID NO: 80026 - DNA, 2175 bp, Saccharomyces pastorianus
atgtctgattactttagttccagaccttcgcaaacgctcacgccgatgggcaataagccatctggtggtggtggcggcgatgacgcctcctccatccactcgaagagctcgcagtacttgatggacatcttacctgattcgatgactttgaacgaaagtgtttcctccacagtggcaaacaatcaggcaaaggagtttattttgcctgaaacagatgagagatctccctacttcataaacgtccctataccaaaggctcagccaacctctactacggaaacgaagaagccccttgcaggtgatgaagctatcgatgcgcagtttgttaaggagtatcccaccgacatccttgtagacaggttttataaatggaaaaaaattctgaaagggttagtgatttacttgagggaagtcgcgtatgcgcaagaacagttcgcacggatcaattaccaactgaaaggatctgtgaaatttccatttttgactgatattgatgaaaccacaaataccattacggatccattcacaacggctcctagaggccctaagaaagcgcagcctgtgcagaagaaagttggcctgactgacagcgaacaatttcagatgcaaatgcaacaggaacagcaggaaaatgcagtgcaggctcccacagatgaaagtaaaatgagtttggcgcctcatgaatacaagcctgtccagaccacagagtcggacaatacatctgccgcatccggttttgttaagttcggttcaggctcgattcaagacatccaggtcattttgaagaagtaccatctttcgttggctaaccagcaatttaagatctctaaagagattacgtccaccgtcattcctaaattggaggaattgagaaaagatttaagatataaaattacggaaattaaggaccttcatggtgatttcaaaacaaacatcggagcacatattcagctaacaagtcaactattgaaaaaatacatcgcagctgtaaaattcatgaacgcgcatggtattggcaacgatagagcatctcctactaataagaagccacataaattggatccaaaacatgatccatatcttttgaaactgcaactagacttacaactcaaacgtcaagttgccgaagaaacttacttgcaagaagcgttcatcaatttacagagttcaggtttgcaattagaaaaaattatatacaccaaaatccagcatgctttgttgcgttattctgctttaattgactccgaagctcgtctaatggtcaaaaatatgtgccaagaactacaacatggtataatatcaaagcctcctgcatttgaatgggataatcttgtcacacagcatccgtcctgtctactcaattggaaatccaacgatcctataccaccaccaagaaaagtttccgacgttatttatccccacatgaaatccccactggccaagtgtattaaggcaggttattttttgaagaaatcggaattgttgcccacttaccaccaaggatattttgttctaacatcaaactatattcatgaattccagagtagcgatttttataacctatcttcttctacccctaactccacgaagtcttcagcttattcttcttccgtttccattgcagacacttatgccaatgctaataatgccaaagctaacaatcatcatcgccaggctagtgatgtacataacagcagtacgacaactggtggtacagctggtgcaaatggtattcgcggtattcgcaaaaagagctatttggcaccgattatgagtattccgctaaatgattgtaccttaaaggatgcatcttccaccaaatttgttcttgtaggtaaacccactcttaatgaaaacgctgatgttagaaaatctagctctagcacttatttatctggctcttcacaagcgtctttaccaaaatatggccacgagactgcaaaaatattttcaaaagccccattccacaagtttttgaagggaagtaagcccaaaaataagaatacgaaatcaagtgaactggaccaattttacgctgcagctcaaaaggaatcgaacaattatgtgacttggacctttaaaatagtatctccagagccttctgaagaggaattgaaacattttaaacgttgggtcccaagatttgaaaaattaacgagcttcaatgacatctaa

SEQ ID NO: 80027 - DNA, 3069 bp, Saccharomyces pastorianus
atgcctgcaggtccgaaaataactaagctgtacataaacaaatggctacaaaaatcagatgaaaaggccgagagaatatcgtcatttgaaatggacttcgttaaaatgctattgtgctacttgaactttaataattttgataagttatccattgaactttcactctgtattaaatcaaaagaaaagtattactccagtattgtgccttatgccgacaattatttgctagaggcttatctgagcttatatatgattgatgatgccctcgtgatgaagaatcaactacaaaaaacaatgaatttatcaacggcgaaaatagagcaggcgttattacatgcaagttctttaataaatgtccacttgtgggactctgacttgacagcgtttcaaatatattttggaaaaacactgcctgctatgaagcctgaattatttgatatcaataacgaccacaacctacccatgtcactttacatcaaagtcatacttttgaacataaaaatttttaatgaaagcgcgaaattaaatattaaagctggtaatgttatatccgcagtaattgattgtagaaaagcacaaaatttagcattatcgttgctcaaaaagaagaacaaattgtcacaaggatccaggctagcattactaaaaagtctatcgtttagttttttccaactcattaaaatacatatacgcattggttctgccagagactgtgagttctacagtaaagaactgtctagaattatttctgacttagaggaacctattatcgtctacagatgtctgcattttcttcacagatactatatgattacagagcaaacctgtcttcaaaatataactttgggaaaagccaataaggcatttgattatcttgatgctgaggcagacattacaagtttgacaatgtttctgtatgataataaggaatttgtaaagttagagcagtcgttggtcctatatttcggtgaccagctagaaaaaacattcctacctaatttgtggaagcttcacttgggtaaggatattgacgacagcatttgtctgtccgaatatatgcccaaaaatgtaatcaatagagtacacaatatgtggcaaaaagtaatgagccaattggaggaagatcctttcttcaaaggtatgtttgaatctacccttgggattccctcttctctgcctgttattcctagcacgatgcccaacaacattttaaaaactccttccaagcatagtacaggattgaagctttgcgattcaccaagatcgtcgagcatgacgcctagaggtaagaatataagacagaaatttgatagaattgctgctattagtaaattaaaacagatgaaagaacttttggagagtttgaaactagacacattagataatcacgaactgtccaaaatttcctccctttcttcattaactctgactatcctttcaaacataactagtatccataatgctgagagtagtttgataactaatttttcgctaactgacttgccaaggcatatgcctttgttattcgataaggtattgaataatattgataataaaaattaccgagaatttcgcgtttcatcactaatagctccgaacaatatatccacaattacagagagtattagagtatctgccgcccagaaggacttaatggagagcaaccttaatattaatgttataactattgacttctgtcccataactggaaatttacttctatccaaattagaaccgcgacgtaagagaaggacgcatttaaggctaccgctaatacgatctaattcaagagacctcgacgaagttcatctctcatttccggaggctacaaaaaaactactttctattatcaatgaaagcaaccaaacgacgtcagtggaagttaccaacaagattaaaacaagagaagaaagaaaatcttggtggaccacaagatatgatttggataaaagaatgcaacaattgttgaataacattgaaaatagttggttcaatggcgttcaagggttttttagccctgaagtagtcgacaactcgttatttgaaaaatttaaagataaattttacgaaattctgcatcaaaatcttccttccagaaaactctatggcaatccggcaatgtttataaaagttgaagattgggtaatcgaattgttcttgaaacttaatccgcaagaaatcgattttctttcgaagatggaagacctgatatactttgttcttgatattcttctcttccatggagaagaaaatgcttacgacgaaattgatttcagcatgcttcacgtgcagttagaagagcaaataaagaaatatagggcaactatgacaactaatagtatatttcatacatttttagtcgttagcagttcatgccatttattcccttgggagtgtctttcatttttgaaagatttgtctatcacacgtgttccgtcctatgtttgtctgaataaacttttatcgcgtttccattaccaactaccccttcaagtaactattgaggacaacattagtatgatattaaatccgaacggagatttgtccaggactgaatctaaattcaagggtatgttccaaaaaataatcgatgcaaaaccttcctctcaattagtgatgaacgagaagccggaagaggaaacacttttgaaaatgctgcaaaattctaacttattcgtttatatagggcatggcggaggtgaacaatatgtaaggagtaaggagattaagaaatgcaccaaaattgcccccagctttttactgggctgctcttcagcagcgatgaaatattacggcaagttagaacctactggaacaatctatacttatttgctgggaggatgccctatggtactaggtaatctgtgggatgtaactgacaaagatattgataaatttagcgaggaactttttgaaaagatgggatttcgctgtaatactgacgatttgaatggtaatagcctatctgtttcatatgccgtctctaaatctagaggtgtatgccatctacgttacttgaacggcgcagctcctgttatttatgggttaccgatcaagttcgtatcataa

SEQ ID NO: 80028 - DNA, 1848 bp, Saccharomyces pastorianus
atgatggtaaaacaggaggaaccgctgaatgagattagtccgaatactccgatgactagcaagtcctaccttttaaacgacacgctttcgaaagtacatcatagtggccaaactagaccactgacctcggtgttgtcgggagacgcctcatccaattctattggcatactagcaatgcataataacataatacgtgactttacaaaaattgcaagcaataacatagacttagccaccgaggatattaccactgttgaccattcattaaattcaatatatagcctattgaagagccatcacatgtggggccatataaactccactgttaaacaacatttgatgataattgttaaactaataaataataacgcattaggattggcctcctctgaaattatttttcttttcaatgaaacgaatttatttcaagctcatagtctgaaaaacattcttctagcagacttcagtacgtggaacgactactatctttcaaatctgaaaatattagcgctgcagattatactgaaaagaaagctagtagacgaatacttaccgcatatattagaactattttcacatgataaaagatatcttttgaaagaccctaacctcaaagctcacgctctcacaaaaatcgtgctgagctttttttctgtcacgacgagttgcaaagttctattcgggctaaaatttctacaatatatcaaacagttcaaattaccttttaaaaagttcattagcaacatgaccgtcgagtgttttagcaaaaaccttcttcataaaaattatttggagatgggacctaataaaatatatttaaattcattttacttatcctattccatgctgtacgatggattggataaaataatgcttctagacattttaagttacgaagaaactactgaggtacaaagagcgataaaaagtaaaaaagaattcaatgaatactgcaacatgagtgaaaaccgtcttctctggtcctgtatatctgtcgatgatttgaacgtaatactcgaaaatgcaacgaattttctacaaaataaagggaaacatatatccgcaacattaaaatgtttagtctgtctttggtctactattcgcctagagggattacctaaaaataaggatatattgaggcagtttgattgtactgttatttatatcaactcaaatattaaatccattaataacgaatctgcggcggcattattatccgaacttctgggagttttatcagaaatttgtatcgattataaagagcctaaacgactgtcaaatattatcagtgtccttttcaatgcttctgttttatttaagagtcattcgtttttgttaaagactgctaatttggaaatctcaaatgttttaatcagtaatgattcaaaaacatctcatcgtactatactgaaatttgaaaaatttatatctagtgctcagagtgcccagaaaaaaattgaaatcttttcctgtttgttcaatgtatattgcatgctacgaaatgatacgctatcatttgtttttgacttttgccaaaatgcattcattcattgctttacacgcctaaaaatcacaaaattcatcgagttttcaaacagttcagaaattatgctttcagtactgtatggaaattcatctatcgaaaacattccttccgaaaattggtcacaactaagcagaatgatattttgctcactgaggggtatctttgatttggatcctttagagctaaataatacgtttgataaattacacttgctcaacaaatatgagctattaatacgaatagtgtacctattgaacctggacatgagtaaacacctgacaacgaatctatcgaataactaa

SEQ ID NO: 80029 - DNA, 726 bp, Saccharomyces pastorianus
atgaaccaaatcgagttaccaactggggttactattgatgaggaaaaatataaagttgaacaagcagaaagatacctaaaagctgcaagcaatttcctacaaagatcttttgaatatgctaaagcagttgatctcgcggaggaggtaaacttgattgacttgtctgatgatgaaggcgaagaaaagcgaacggtaaaacaaaaacaactggaaagcataaaggcaaatgcagccctagatcccacccatccaaaagtaatagatttgccaacatttagaatgatcatcctcgcagatgaaacttacgagcttttcttttctaatactttacgatcatctgttcacgtcgacgaacatgtcaacattgataacaaaaataaagtcctcagaagtatgtttgacggtatattggcagacggcaaaagagttgctgagcaagttcgtcgtcgtgtcgattcggtggcaactaggagcagcattgcttctgtagagagtacgccaacagccgctgcaagttcaataactaccaaagaagaaaagtacgatgatctagatgatttcacgtcagagcatcaacccgagaatgaagagttattacaaagttcctggtttgagatcgacgatgccaatgaaactagcactaaagccatacaagaaaggtcttttgagcctttgtcggcaaattcctcggaagagaagtccaaccttattgaatttgaagcatga

SEQ ID NO: 80030 - DNA, 2055 bp, Saccharomyces pastorianus
atgtcattttttgattccttacgtcaaaaggcaccctttttggataaactggcagacagtttcactccaacattaaccagagatgagaaattcagattaaaatataaacttccagctaatgaaaacattttggaagatacgaatgcagaagtttcatttgcaacttccattaaagatggaaaagggcattctgatagagtgaacaataaagggagaaaaactgcttatgtgtattccgggagattgtttttaacacctcattttctggtatttcgagatgcatttgatcattcatcgtgcgtactaatactgaatatttctaccattaaacgtgtagagaggtcgccatccgaatcatatgaatttgctcttctagtaactttgtacacaggagcaaaggttctgattcaatttatcggtatacgttatagatcggagcagttttgtgacaaattgaaactaaatttgaaagaaaatattcctaatgccaaaactttacctgcttttctagaaacctcatattcggagttcttaattgctaaaaatattctaggtaaaaaggacataactgtacccagggcaggtctaggacaacatttcaagtatcccggtaatcctactatggtaaaagaaaaggctaaattgaggctatggttcgattatttcagagagaatggaaggaatttggcagttgtgcaaactcctatgttccgaaagttaatcagaatcggtgttccaaatcgaatgagaggtgaaatttgggaactatgttcaggtgcaatgtatatgcgttatgcaaattctggggagtacgaaaggatattaaacgagaatgctggtaaaacatcgcaagctatcgacgaaattgagaaggatttgaagagatcgctgcccgaatactcagcataccagactgaagaaggtattcaaaggttgagaaatgttctgacagcttattcgtggaagaaccctgatgttggatattgccaggccatgaatatagttgttgcaggatttttaatctttatgtctgaagagcaggctttttggtgcttgtgtaatctatgtgacatctatgttccaggttattactcaaagacgatgtacggtacattgttagaccaaagagtgttcgagtcttttgtagaggacagaatgccggttctttgggaatacattttacagcatgatattcaactatctgtggtgtctttaccttggtttttgtctttgtttttcacttcaatgcctctagaatatgctgttagaataatggatattttttttatgaacggttctattactctatttcaggtggcattagcagttctgaagataaatgcagatgatatcttacaagcggatgatgatggaatgttcattgccataattaagcactatttccaaactctgggacaaagtgctcacccagattcaagcgatataaaatatagacaaatcacgaaatttcaagagctgttagttacggctttcaaagagtttagtgtcatcagcgaggaaatggcaatgcatgcaagacacaaatatgagaaaggtatttttcaaaacattgagactttcatgaaaagaacgcaactgcgccatatgccaaaaactttcaacctgtccagtgatgacttgtccaatatctatgacatgttttaccaaagtatagaaacctacaaaattagtatgggaacgggatcatctaatatgggtttcgaagtattcattcagttcttgagtaaattctgtgactcctgtagaccgtgtgaaaaggacaaagatccagctttccggaaacaaaaaaggaattttctgcaaaggttatttgataactgggattctgctcatatcggcgagttgacattgaacgatgtggtaacaggcttggataaactggtaactgttgatcttttacaagctataaactatttcttctctttatatgatacagatggtgatggtgaattgcatagagaagaagtgctacagttgtcggaagggctgctactgctagacctgcaggcatgcaagctggcactgccgtcgttt

SEQ ID NO: 80031 - DNA, 1179 bp, Saccharomyces pastorianus
atgttgaccttcttagaattctactcgactctattgcatttcgtcctatataagttatacaccgatagtgggttgatttatccgccaaaattggatcttaaaaaggataaaatcataagtggtttgtcatcatatattctagaatccagacaagaagacagcctactaaaacttgacccaactgagattgaggaagacgtaaaagttgaaagtttggacgcatcgacattaaagtctgccttgaatgccgatgaggcaaatactgatgaaacagaaaaggaggaagaacaagaaaagaaacaagaaaaggaacaagaaaaggaacaagaaaaggaacaaaatgaggaaacggaactagatactttcgaggataacaataagaacaagggtgacatcttaatacagccaagtaagtacgattctcctgttgcttctttgttttctgcatttcttttttacgttagcagagaagttccgatcgatattcttgagttcttgatcttatcttgtggtggtaatgtcatcagtgaagctgctatggaccaaattgaaaataagaaggatattgacatgtccaaggtcactcatcaaattgttgacaggccagttttgaaaaacaaggtagctggcagaacgtatattcagccacagtggatatttgattgtatcaataaaggcgaattggtacctgccaacaaatatcttccaggggaggctcttccacctcacttaagcccatggggtgatgctattggttacgatccaactgctcctgtcgaagaaggcgaagaagaagaaagtgaaagtgaaagtgaaagtgaagatcaagttgaggaggaagatcaagaagttgttgctggagaagaagatgatgacgatgacgaagagctacaagctcaaaaagagcttgaattggaagcacaaggtatcaaatattccgaaacttcagaagctgataaggatgtcaataagtcaaagaaccaaaagagaaaggtggatgaagaagaagaagaaaggaaattgaaaatgataatgatgagtaacaaacaaaagaaactttacaaaaaaatgaagtattctaatactaaaaaggaggaacaagctgagaacttaaaaaagaaaaagaagcaaattgccaaacaaaaagctaaactgaataaactagattccaagaaatag

SEQ ID NO: 80032 - DNA, 600 bp, Saccharomyces pastorianus
atgagaatcaagaagaaaaacaccagaggtaacgcaagaaactttattaccagatctcaagctgtgagaaaattacaggtttctcttgctgatttcagaagattatgtatattcaaaggtatctatcctagagagccaagaaataaaaagaaggcaaacaagggctctactgcaccaactactttttactatgctaaggatattcaatatctaatgcatgagcccgttttggctaaatttagagaacacaagacttttgctaggaaactaacaagggctttgggtaggggagaagtctcttctgctaaaaggttagaggaaaacagagatagttatactttagaccatattatcaaggagcgttatccaagtttcccagatgctataagggatattgatgatgctttgaatatgttatttcttttctctaatttgccctctaccaaccaggtttcctcgaaaattatcaatgatgctcagaaaatctgtaatcaatggttagcctatgttgccaaggaacgcttggttcgtaaagtgtttgtatccattaaaggtgtttattatcaagccaatattaagggtgaagaagtagatggttag

SEQ ID NO: 80033 - DNA, 687 bp, Saccharomyces pastorianus
atgatggataaaccattaaactttagaatcttgaaatcttttacaaacgataaaatcccgcttaactatgctataacacggaatatcttgcacaacacagttccgcaagttaccaacttcaacagcacaaacgaagatcaaaacaacagtaagcatacagaagatactgtaaatgaaagtcgaaacagcgatgacatcatagatgtcgacatggatgcaagtcccgccccttcaaacgaatcatgttccccttggtcattgcaaatttcagatattcctgctgcaggaaacaatagaagtgtctcaatgcaaacgatagctgagactatcatattatcttcagctggcaaaaactcttcagtatcctcgctcatgaacggattgggttatgtattcgaatttcagtatcttacaattggtgtgaaattttttatgaagcatggtttaatacttgagttacaaaaaatttggcaaatagaagaagcaggcaattcacaaataacaagcggagggttccttttaaaagcatacatcaatgttagtagggggaccgatatcgatcgtataaactatacagagactgttttgatgaacttaaaaaaggaactacaaggctacatagagttaagtgtacccgatagacagtcaatggactcgagggtagcacatggaaatattctaatataa

SEQ ID NO: 80034 - DNA, 975 bp, Saccharomyces pastorianus
atggcagaaaaaaataatgagagaagattccaaaaaaaaaggccaatatcaactcttgtagagcaggatgaccagaaaaagttcaaactccatgaattgactacagaagaagaggttctggaggagtacgaatgggatgacctagatgaagaagattgtgatgatcccttaatggtgagcgaagaggttaatgatatcttcgattatttgcatcacttggaaataatcacattgccaaataaggcgaatctctataagcataaaaatattaagcaaaacagagacattttggtgaactggataatcaagattcataataagtttggccttctgccggaaactctatatttggccataaacataatggatagatttctttgtgaagaggtggttcagttaaatagattgcaactggttggtacatcatgcctgttcatcgcatctaagtatgaggaaatatactcccctagcataaaacattttgcgtacgagacagacggtgcatgctctgtggaagatattaaagagggtgaaagatttatattggaaaaactcgattttcaaattagtttcgctaacccaatgaatttcttaaggagaatatcaaaagcggatgactatgatatccagtctaggacgttagcgaagttcctaatggaaatatctatagtggacttcaagttcatcgggatattaccgtcattatgtgcctcagcggcaatgttcctttcgagaaaaatgctgggcaagggcacctgggatggcaacttaatccattatagtggtggttacacaaaggcaaaactatatcccgtttgccaattactgatggattatcttgttggatctactattcacgacgagttcttgaagaaatatcaatcgagaagatttttaaaggcttccataatttctatcgaatgggcattgaaggtaaggaaaaatggatatgatattatgacattgcatgagtga

SEQ ID NO: 80035 - DNA, 501 bp, Saccharomyces pastorianus
atgtcacgatcccttttggtagagaatagtagaaccattaatagtaatgaagagaagggggtaaacgaaagtcaatatatcttacaaaagagaaacgtcccaaggaccattctcggtaatgtcacaaataatgcaaatatcctgcaagagatttctatgaacagaaaaattgggatgaagaacttctcaaaattgaacaacttctttcctttaaaggatgaggtttcgagagccgatgacttcacctcctcttttaatgacagtagacagggggtgaaacaagaagtactaaacaataaggaaaatattcctgaatatggatattccgagcaagaaaagcagcagtgctcaaatgatgactcttttcatacgaattcgactgccttgagctgtaatcggttgatatactctgagaacaagtctatttccactcaaatggaatggcagaaaaaaataatgagagaagattccaaaaaaaaaggccaatatcaactcttgtag

SEQ ID NO: 80036 - DNA, 660 bp, Saccharomyces pastorianus
  modified_base (182)..(215): a, c, g, t, unknown, or other
atggcacattctttagggtcttacttgatggctttatatttgcaaaaatataaggaatctccatcttttaaaaagctgatcctttgttccccagcaggcgtgtcttatagagatttcaacaatactgcttcagaggttgaaaaatggaaaccgcctccttggtggtatgtcaagctttgggnnnnnnnnnnnnnnnnnnnnnnnnnnnnnnnnnnttttcgccagttaggttcgaagattacaagtggatggtcatatcggcgctttaagcacattttgaatggtgatccagaacagtcaaaacggtttgaagccttgcatagatacgcatatgctattttcaataagcgtggttcaggtgaatacttattaagctttgctttgaaatgtggtggtgaaccaagactttcattggagcagcagctattcgatggcaaaaagtctgatattttaaaaaatagtaattgtgactggctttggctttatggcgatgacgattggatggatgtgaatggtggacttagagtatcaagattcttgaaagagaagttgaaacaaaaaagtaacgtcatcattgttcctcattcagggcatcacttgtacctggataactataagtttttcaataatattctcacgaaagaaatgcaaaaaatataa

SEQ ID NO: 80037 - DNA, 342 bp, Saccharomyces pastorianus
atgtccaaatcatctcaaggtcacgtgactaaaaccacgcgtttgaataataataccaacagtaaactaagaagaaagtccatcttacatacaatcagaaatagcattgcttccggcgctgatttacccatcgaaaacgacaatgttgttaatttgggagatctgcatccaaataaccgaatatcactcggaagtggtgctgcaagagtggtcaatgggcccgttacgaagaacagaaattcaatgttctcaggacgtgctgaaaggaaacccacagaaagcagacattctgttgcaaagaaaactgaaaaaaaaataaatacgaggccccccttcagatga

SEQ ID NO: 80038 - DNA, 303 bp, Saccharomyces pastorianus
atgagcgaagataaagctaaattagggaccacaaggtctgccacggaatatcgtttgtccattggtagcgctccgacttcaagaaggtcgtctatgggtgaatcctcgtccctgacaaaatttgctggtcaagagggactaacaagttccgttggcgaatataacgagaatgccatacaacagcttctgttgcctaaaataagagaactgagcgattcaatcattactttagattccaatttcacgcacttgaattttatccacgagagtttagctgatcttaatgaatccctaggtacgtag

SEQ ID NO: 80039 - DNA, 138 bp, Saccharomyces pastorianus
atgtccttgtgtaaagattctaggcaattaatgacctgttcgcttgggttattcttcaaagcacaaatcaatatctttcttcctccttttgctttaaccgttgtccagtttcttgtcaatttggtttgccatacataa

SEQ ID NO: 80040 - DNA, 291 bp, Saccharomyces pastorianus
atgttttcttctttttttggaaatacttgttcctgggtcttcattttcgtcatcatcgttgacaatgaagccttcttgcacttttcttgcctcatcttcgtcttcatcaatatcttcgtcttcctcagaggagtcaaagacatcttctccttcttcttcatcactaggcgctttagtttcatcgttgtcatttactatttcttcctcgtccctagggaccagcttcgaatctcccgtctcttccataaaaggcaaattttatgtccttgtgtaaagattctaggcaattaa

SEQ ID NO: 80041 - DNA, 3624 bp, Saccharomyces pastorianus
atgtatgacatttttggtgatggtcatgactacgattgggctttagaaattgaaaatgaagaactagaaaatggtaacgacaacaatgaagctgaagaagaagagatcgatgaagaaactggtgctataaaaagcaccaagaaaaagatatctctacaagacatttatgatttagaggatttgaaaaaaaacttgatgactgaaggagacatgaaaattagaaagacagatattccagaaagatatcaagaattaagagcaggtattactgactacggaaatatgtcatcggaggatcaagaattagaaagaaactggatagcagaaaaaatttctgtggataagaacttcgatgccaattatgatctcactgaatttaaagaagcaattgggaacgcaatcaaatttatcaccaaagaaaacttggaagtcccttttatatatgcttaccgtcgtaactatatttcctcaagagaaaaagatgggtttcttttgactgaagatgacctttgggatatagttagccttgacatcgaatttcacagtcttgtgaacaaaaaggattatgtccagagattttatgcagagttacatatcgatgatcctattgtcactgaatacttcaaaaatcagaatactgcatctattgcagaactgaattctctacaggatatttatgactacctagaattcaaatatgccaacgaaatcaatgaaatgtttataaaccacactggaaagactggtaagaaacatttgaaaaattccagttatgaaaaatttaaagctagtcctctttatcaagcggttagtgatattggtatatcagctgaggatgttggtgaaaatatcagttcccagcatcaaatccaccctcccgtagatcatccaagttccaaaccagtagaagtgatagaatctatattgaatgcaaacagcggtgatttgcaagtctttacgtccaatactaagctggcaattgatacggtccaaaaatactactctttggaattgtctaaaaatacaaagataagggaaaaagttagatccgatttttccaaatattatctggctgacgttgtgttaactgctaaaggtaaaaaagaaattcaaaagggatctctgtatgaggacataaaatatgccatcaatagaactccaatgcacttccgtagggatccagacgtttttttgaaaatggtcgaggctgagtctttgaacctgctcagtgttaagttacacatgtcgtcacaagcccaatatatagagcatttattccaaattgcacttgaaactaccaatacctcggacatcgcaatagaatggaataacttccgtaaactggcattcaaccaagcgatggacaagattttccaggatatatctcaagaagtcaaagacaatttaacaaaaaattgtcaaaaattggtagccaagactgttcgccataagtttatgacaaaattagatcaggctccattcattcctaatgtcagagatccaaaaattccaaaaatcttaactttaacctgtggacagggtagattcggagccgacgctataattgctgtctacgtcaacagaaagggtgattttataagagattacaagattgtcgacaatccatttgataagacgaatcctgaaaaatttgaagacaccttggataatatcattcaaagctgtcaaccgaatgccatcggaatcaatggccctaacccaaagactcaaaaattttacaaaagattacaagaagttctacataagaagcaaatcgtcgacagtagaggacatactattccaatcatttacgttgaggacgaagtcgccatccgttatcagaattccgaaagagctgctcaagaattccctaataaacctcctctagttaaatactgtatcgccttggcgcgctatatgcattccccattgttggaatatgctaatttaacaagtgaagaagtgagatcattgtcaattcatccacaccagaacctgttatcctcagaacaattgagttgggctcttgaaaccgctttcgttgatattgtcaacctggtaagtgttgaagttaacaaagccacagataataattactacgctagtgcgctgaaatacatctctggctttggaaaacgtaaagctattgatttcttacaatcccttcaaaggctaaatgaaccattattggctcgtcaacaattaattactcataacattcttcacaagactatttttatgaattccgcgggattcctctatatctcatggaatgaaaaaagacaaaaatacgaagatttggaacatgatcaactagatagcactagaattcatccagaagactaccatttggccaccaaggttgccgctgatgctttagaatacgatcctgatactattgccgaaaaagaagaacaggggactatgagtgaattcattgaactgttgagagaagatcctgaccgtagagctaaactagaatcactaaatctagaatcatacgcagaagaacttgagaagaataccggattgagaaaacttaataatctaaatacaattgtccttgaattgttggatggatttgaagaattgagaaatgactttcatcctttgcaaggtgatgaaattttccaaagtttgactggtgagtctgaaaagacgtttttcaagggtagtattattccagtcagagtagaaagattctggcacaacgatataatttgcactacaaactctgaagttgaatgtgtagtaaatgctcaacgtcacgcaggtgcacaattaagaagacctgcaaatgaaatatacgaaattggtaaaacatatccagcaaaggtgatatacattgactatgctaatattactgcagaagtttccttattagatcatgatgtcaaacagcaatatgttccaataagctacagtaaagatccttccatttgggacttgaaacaagaactagaagatgccgaagaggagaggaaattgatgatggcagaagcccgtgcaaagagaacacatcgtgttatcaatcatccttactatttccctttcaacggcagacaggctgaggattacttaaggagtaaagaacgtggtgaattcgtgatcagacagtctagccgaggtgatgaccacttggttatcacctggaaattggataaggatttgtttcaacatatcgatatccaagaattagaaaaagaaaatcctttggctttaggtaaagtcttgattgtcgacaatcagaaatacaatgatttggaccagatcattgtagaatatcttcaaaacaaggtaagactcttgaatgaaatgacatctagtgaaaaattcaaaagcggtactaagaaagatgtggtcaagtttattgaagactactctagagtgaatccaaataaatctgtgtactatttcagtttgaactacgataaccctggctggttttacttaatgttcaagattaacgcaaatagcaaattatacacatggaatgtgaaattaacgaacactggttatttcctggtaaactacaattatccaagtgttatccagctttgtaatggttttaagacgcttctaaaatctaacagtagtaagaatagaatgaacaactaccgttag

SEQ ID NO: 80042 - DNA, 669 bp, Saccharomyces pastorianus
atggaagagacgggagattcgaagctggtccctagggacgaggaagaaatagtaaatgacaacgatgaaactaaagcgcctagtgatgaagaagaaggagaagatgtctttgactcctctgaggaagacgaagatattgatgaagacgaagatgaggcaagaaaagtgcaagaaggcttcattgtcaacgatgatgacgaaaatgaagacccaggaacaagtatttccaaaaaaagaagaaaacataaaagaagagaaagagaagaagatgatcgactatccgaagatgatttggatttgttaatggagaatgctggtgttgaacgtaccaaagcgagctcctcttcaggaaaatttaaaagattaaagagagtaggagatgaaggaaacgctgcagaatcagaaagtgacaacgtcgctgcatcaaggcagattctacgtctaaattggaagatttcttttctgaagatgaagaagaagaagaatctggtttacgcaacggtaggaacaatgaatatgggcgtgatgaagaagaccatgaaaataggaacagaacagctgacaaaggtggaatcttggacgaattggatgacttcattgaagatgatgaattttctgatgaggacgacgaaaccagacaaaggaggatccaagaaaagaagcttttaa

SEQ ID NO: 80043 - DNA, 1683 bp, Saccharomyces pastorianus
atgaccttttttggtatcctacatgttcctataaatgttcctgcgttggccatgtcactacaaatggataagtatgatgttgacagagaattgattgcacatggttattccaacttttttagtggattattaggttctgtccaaaattacttggtatataccaacagtgttctgtttattagggcgggcgctgattcgccattcgctgggttccttttaatagctttgactatctgtattatgatcattggaccagtcataatatcattcattccaatctgtatagtgggctctctaattttcctactaggctacgagttattagtggaagcgttggtcgatacatggaataaattgaatagattcgaatatttgactgttgtcattattgttttcacgatgggtatctttgattttgtcctaggtatcatcgttggcattttaattgcatgtttttcgtttttggtggatagtacgaaattacaaaccattaacggtgaatataatgggaacgtcgcaagaagtacagtatatcgtgattacgttcaaacaaaatttttggatggaattggtgaacaaatatatgttttaaagctccaaaaccttctgtttttcggaacaatcatatctattgaagagaaaattgaaagattgctgcaaataagtaacaaagatgcaacaaaacgcagaataaagtatttaatattggactttaaaaatattaatgccgacaatattgactattctgcggcagaaggtttcaatagaattaaaagattcacggaaaccaaaagaatcaaactaatcatatcttcaatcaaagaaagggaccgtatttacaacgccttcaataatgtgggattactaaacgatgtggaattatttgctgatttaaacagtgcgttggaatggtgtgaaaacgaattcctttttcaatataaacaattaagaaaaaaggcgaaagaaagattggaagaaagaaagcaaaataatgtcgtatccgcagtaattgcagccactaaaaacaaaaaaattgatacaataggaaatggtttaaataggggaagcaatggagacacagcgagaaacttaatgtcactaccaaccaatactcctcgtaattaccaaatactttctgtagcacagaatgtatttgtaaacgacgaacaagcagtgaagaatttcaaaaaggagtacaaagatgatgaacctgtcctgcctatattgttatttgcattaaagcagtaccgacccgatataatatctgaagttcaaaaagtaagagaaaaggaaatcaagttttgggcacaactctgcccctacttcaccaggcgcagattagcaagtcaatcacatttactacatgcagacaacatttttttccttgtggaaacaggtatgttgaaggcaacatatgaactaccacaaggaaccttgtacgagattttttcaaatggcacatgcttcggaaaaatcattgcgccagggaatgctatgcctagagaacaaaagctcaccatcgaaactgaaactgattccgtattatgggttatagactctagctcgttgaacaaattgaaagaagacaatctagcattgtacgtggaggttgcattaatggtcatgtgtatcaaggacaccagattcaaagaattactaggttacacacttgttagcgcatga

SEQ ID NO: 80044 - DNA, 1431 bp, Saccharomyces pastorianus
atgggaaggactattaggagacgccggagtaattcgtcgctttcggaggccatatcagtttctttaggaataaatcaagactcatctgtgaacaagatgcatagagcgagtgttagcgcaatgtctcctccattatgccgttcatacatgagcggattttttactggtggaaactcacctatgatcaacaatttgtcggattcaaaacttcccatctcgaacaaacaacatcctaaagtgatacatggatcagaaaatttgcataggcagacagctcaactatccaatgaattttgctcctcttctgtggaagaaaattctcccacaattaaggattacatggacattataggcaatggtgatagaaaagatgatcaatctatgcgtactatagaagagaatattgatgaagaatattcagatgagtactccagattgctacttagcccagcatcgtctaacgtggacgatgaccgaaatcgaggactacagaatagttcactaccggaattagaagatggttacgcgggcggatatcagtcacttcgtccctcccataatttaaggtttaggccaagaaacttgtggcatatgtgtacgtcatttccttccaaatttgcacattatctgcccgcagcagtgttaggtttgcttttgaacattttagatgccttatcttatggtatgatcatttttccaatcacagagccagttttttctcatttagggcccactggtatatccatgttttatatttccaccataatatcacaagccgtgtactccggaggctggtcgagttttccttccgggattgggagtgaaatgattgaaattactccgttttatcatacaatggcattagctataaaagaggcattagcaggtaatgatgacgaaatcataacgacaacgatattttgttatgtgataagttcgatgctcacaggtgtcgttttctatgcattgggtaaactacgactaggaaagatagtgggattttttccacgacacatattgattggctgtattggaggtgttggttatttcttgataattacaggaattgaagtcacaacgagggtggcgaaatttgaatattcatggccttttttttcagggctgtttacggattatgagacattagcgaaatggttattacctgtactattgactgtagttttaatcggcactcaacgctactttaagaactcactcgttttgccaagtttttacatcttgacgttagttttgtttcattttattgttgcgatcattccaacattatccttggatgctttgagacaaactggatggatttttcctattgccaactcagatagtaaatggtatgaccattatagattatttaatgtccataaagttcatcggtcactagttttgcaacaaataccaacgatgatggcatga

SEQ ID NO: 80045 - DNA, 498 bp, Saccharomyces pastorianus
atgtcgaggatcgtgaaggagtacaaagtcatactgaaaacattggccagtgatgaccccatagcgaacccctaccgggggataatcgagtcacttaacccgattgacgaaaccgacttgagcaagtgggaagctataatttctgggccgtcagacacaccttatgaaaatcatcagtttcgaatactaatagaagtccctagttcctaccccatgaatccaccaaagataagttttatgcagaacaatattttgcactgcaatgttaaatcagccacaggagaaatatgtctgaacatccttaaaccagaggagtggactcctgtatgggatttgttacactgtgttcatgctgtttggagactcctaagggaacccgtttgtgattctccacttgacgtagacattggtaatatcatccgctgtggcgatatgagtgcctatcaggggattgtaaagtacttcctagcagaaagagagcggatcaacaaccattga

SEQ ID NO: 80046 - DNA, 84 bp, Saccharomyces pastorianus
atgtcgaggatcgtgaaggagtacaaagtcatactgaaaacattggccagtgatgaccccatagcgaacccctaccgcggataa

SEQ ID NO: 80047 - DNA, 1602 bp, Saccharomyces pastorianus
atggaaacaccatctgggctggttccagtggctaccttacaatctatgggtagaaccgcctctgccttatctcatacgagaacaaagcaattgaaccgtaccgctaccaattcctcatccacaggtaaagaagaaatggaagaggaagaaactgaagaacgtgaagaccagagcggtgaaaacgagctagatccagagatcgaattcgttacttttgttactggtgatccagaaaaccctcacaattggccctcatgggttcgttggagttacactgtcctgttgtccatcttagttatttgcgttgcctacggttctgcttgtatcagtggtgggttgggaaccgttgaaaagaaattccatgttggtatggaagccgctattttatcatgttctttaatggttattgggttctcgctgggtcctttgatttggtctcctgttagtgatctttacggtagaagagttgcttattttgtttctatgggtctttatgtcatcttcaatatcccttgcgccttagctccaaatctaggttgtcttttagcttgtagatttttatgtggtgtttggtcatcatctggtttgtgtttagttggtgggtctattgccgatatgttcccaagtgaaacaagaggtaaggctattgctttcttcgcttttgctccttacgtcggtcccgttgttggtccactagttaatggttttatttccgtttctaccggacgtatggacctgattttctgggtcaatatggcctttgcaggtgttatgtggatcatatcttctgccatcccagaaacgtacgctccagttatcttgaagagaaaggctgctagattaagaaaggaaactggtaatcccaagattatgactgagcaggaagcgcaaggtgtcagtatgagtgaaatgatgagggcttgtctgttgagacctttgtacttcgctgtcactgaacctgttctagttgccacttgtttctacgtgtgtttgatatactctctactatatgcgttcttctttgccttccctgtcattttcggtgaactatatggctacaaagataaccttgtgggtttaatgtttattcctattgttatcggtgctctttgggcgttagccacaactttctactgtgaaaacaaatatttacaaattgtcaaacagcgtaaacctactcctgaagatcgtttgctaggtgctaagatcggtgctccatttgctgcaattgctctatggatcctgggtgctaccgcttataaacatattatttgggttggtccagcttcagctggtttagcttttggtttcggtatggtgttgatttattattcattgaataattacattattgattgctacgtccaatacgcatccagtgctctggctacaaaggttttcttaagatccgccggtggtgctgccttccccttgtttaccattcaaatgtaccacaaattgaatttgcactggggttcttggttgttggctttcatctccactgctatgattgctttaccttttgcattttcttactggggtaagggcttgagacataagttgtccaagaaggactattccatcgacagtgttgagatgtaa

SEQ ID NO: 80048 - DNA, 102 bp, Saccharomyces pastorianus
atgagtgatcaagaatctgttgtttcattcaactcacaaaacacttccatggtggaggttgagggccaacaacctcaacgggatcctctagagtcgacctgc

SEQ ID NO: 80049 - DNA, 207 bp, Saccharomyces pastorianus
atgatatatttgttttcttatttcttcttgatgtcttcaggaaaaaagaacataaacaaatacaaaaaaatcctagtacgaaacctcaaaagggtgtatgcgcaatgtatatatatagcaagaaaaaaaaataaacagtggcattacagtgcatgcggatggcagtgttcttcggtggctttttcgaaaaacctagaatgcgtttaa

SEQ ID NO: 80050 - DNA, 1986 bp, Saccharomyces pastorianus
atgtcagactataagggctattatgctaagactaacctaacttctgctaataacttaaacaatcataataacaataattataagaacattataagcagtagtaacgataatagttttgcatcacatttacagccgccggacagaaacttaccgtctcatccttcttcaaataatatgagtagcttttctaacaacagcttaattaagtctccaccaccttttgacagatatccgctagtaggaacgaggcatatttcagcggctcaatctcagtcgcagaaccttataaatgaaaagaaaagagcgaatatgactggctcatcttcttctgctcacgactcttcattatcatccaccaacttatacatgggcgaacaggatttttcgccctttggcggttatccagcttccttctttccgttaacgttggacgaaaaggaagacgatgactacattcataatccaaatgtcgaggaagaagcaaagttagatagaaggaggttcgttgacgacttcaaacacatggatagaagatctttcttggggcttctgggtattctatttttatttatggctggtatatttattttcattgtattacctgcaattacattttccggggtagtttatcatcatgaacatgttcatgcagcaaattcagcaggatcgttgtcttctaatactacatccaagtcattgactgaatatcaatatcctcaacttgcggctataaggacaactttagttgatccagacacacctgacagtgcgaagacaagagtagcgaaagatggttctaaatggcagctggtgttttccgatgaatttaatgctgaaggtaggaccttttacgatggcgatgaccagttttggacagctcctgacatccactacgacgctacgaaagatcttgaatggtactcaccagatgccgttacaactacaaatggtaccttgacgttgagaatggatgcattcagaaaccatgacctttattacagatctggtatggtacagagctggaacaaactctgctttacagaaggtgcgttagaagtttccgcgaacctccctaattatggtcgagttacaggattatggcctggtatgtggaccatggggaacttgggcagaccaggttatttggcgagtactcaaggtgtttggccttattcatatgaagcatgtgacgctggtataacaccaaaccaaagttccccagatggtatttcttacttgccgggacaaaagttgagtgtttgtacttgtgataatgaggatcatccaaatcagggagttggaagaggcgcaccggaaatagatattttagaaggtgaagctgatacaattttgggtgttggtgttgcgtcacaatctctacaaattgctccatttgatatatggtacatgcccgattatgacttcatcgaagtttataatttcaccacaacaactatgaatacttacgctggtgggccttttcaacaagctgtctcagcaatatccactttaaatgtaacatggtatgaatttggggaggaagcaggttattttcaaaagtatgccattgaatatctcaatgatgacgacaacggatatattcgttggtttgtgggagagaaccctactttcacactatatgctacttctttacatcctagtggtaatattgactggaggagaataagtaaggagccaatgtcagcgattttaaacttaggtatttccaacaactgggcctatatcgactggcaatatatatttttcccggtgacaatgtcaatagattacgtccgattataccagccgaagggttctacgtccattacttgtgatcctgaggactacccgacatatgattatatccaaagccatctaaatgcatattataacgccaatttaactgattgggaacaggctggatatactttcccaaaaaatgttctaacaggaggttgtagtagttcaaaattctcattatcctga

SEQ ID NO: 80051 - DNA, 534 bp, Saccharomyces pastorianus
  modified_base (395)..(423): a, c, g, t, unknown, or other
  modified_base (439)..(439): a, c, g, t, unknown, or other
atgtctgtgcgaaacctcaccaataatcgtcattccaacagcgaaaatagtgtttccggaagcgaaaactccttttattcctcgaatgagcaatcaagacaaagctcatcattagaacctgcagatggtcagaacgttagggtgagcggtaatcctttccttggaagtgaagaatttgacgaagattataattcacccagtggagacgatgagcggcgtggggcaaatgaatattccagttcttcatccataaattataataacgatcctaacagcgatacttctcttctggctaatgaaaagaactcacccgagagaaatggtcaaagaatgtcagactataagggctattatgctaagactaacctaacttctgctaataacttaaacaatcnnnnnnnnnnnnnnnnnnnnnnnnnnnnnagcagtagtaacgatnatagttttgcatcacatttacagccgccggacagaaacttaccgtctcatccttcttcaaataatatgagtagcttttctaacaacagcttaatt

SEQ ID NO: 80052 - DNA, 1194 bp, Saccharomyces pastorianus
atggagcctagtgttgatattaacgacattgagcatgtaccaggtacaggtatgtttttcaccgctaacgaaagtattcccatgcatacatattatattccaagtttaggaccatctccacgctggtgctcattcttggattctatcacagaagaattagaagaaaaaccaagtgacactgtttactctaactacaggttcattactagagacgacgttaaaaaattgaatttaacgcacttggtgggatccagagtattaagagcatacatgcatggtttctttattaacactgaactttacgataaggtttcattaattgctaatccagatgcctacaaagatgaaagagaaagagaaattagacgtagaattgagaaagaaagagaatccagaatcagaagttcaggggctgttcaaaaacctaaaattaaagtcaataaaacattggttgataaactatctcaaaaacgtggtgataaagttgcaggaaaggttcttacggatgaccgtttcaaagaaatgtttgaggatgaagaatttcaagtcgatgaagatgactatgatttcaaacaattgaatccagtaaaatccatcaaagaaaccgaagaaggtgctgctaaacgtattagggcgctaactgctgccgaagagtccgacgaagaaagaattgcaatgaaggatggcagaggtcactatgactacgaggatgaagagtctgatgaagaagaatctgatgatgaaacgaaccaaaagtcaaataaggaagaattaagtgaaaaagatttgagaaagatggaaaagcaaaaggcactaattgaacgcagaaagaaggaaaaggagcaaagcgaacgttttatgaacgaaatgaaagccggcacttccacgagtacgcaaagagacgaaagtgctcacgttacatttggcgaacaagtaggcgaattgcttgaggtggaaaatggaaagaaatcaaatgaatccattttacgtcgtaaccaacgcggtgaagcagaacttacttttattcctcaaagaaaaagcaaaaaagacggaaattataaatccaggcgtcatgataattcatcggatgaagaaggtattgacgaaaatggtaataagaaggacaatggtaggtcgaagcccagattcgaaaatagaagaagagctagcaaaaatgcgttccgtggtatgtag

SEQ ID NO: 80053 - DNA, 549 bp, Saccharomyces pastorianus
atggttttgaaatctacttccgcaaatgatgtttcagtatatcaggtttctggtacaaacgtttcaagatcacttccagactggattgcgaaaaagcgcaaaaggcaattaaagaatgatttagaatatcaaaatagagtagaactgattcaagattttgaatttagcgaagcctccaataagattaaagtgagtagagatgggcaatattgcatggctaccggtacatacaaacctcagatccatgtctacgattttgctaatttgtcactgaagttcgatagacacacagatgctgaaaacgtggatttcactattctctctgacgattggactaaaagtgtacatttacaaaatgatagaagtattcaattccaaaacaaaggtggtctacattacaccacaagaattcctaaatttgggagaagtttagtttacaataaggtaaactgtgatttatatgttggtgcgagcggtaatgagttatcacaggttgaacttggaaaaggggagatttttaaacccattcagtggatactgaaggcgtga

SEQ ID NO: 80054 - DNA, 894 bp, Saccharomyces pastorianus
atggttcatgtttactataccatcttgttcttcgttctgatgcccatacgtttttacacatattataaaaccaaaaatcactactttctggctgatttttgttactttgtgaacatgttatgcctattgtttatttggattttcccatattcatacagccttttccagtcatgcttcgcattcactttcggaacgttatgctttgccgttattacttggagaaattccttggtaatacattctatcgataagactacttcatgcttcattcacataatacctccctgtgtcatgtacgttatctatcatggattaccactcgaatacaaaatcgaaaggtttccgggagcaattattcaaagtgaattggacatcaaaaaaaatattctttggacatccctttattatttggtttggcaatcattataccattacttcatcacgttgaaaaagtctagcaagatcaagtcaggggaaagaatgacaagttttgaatatttaactacacaccaatttaaaaacttttgggcagttaaattgaggtcaccttggccgatgataatttacacactttctcaatatttctatcaactattcactatgctgttgtgtggcatatggattcgttacaaattagctgcggccctatttttaactatagtatttctatgggcgtctcataatggagctacctactatatcgaccactacgggaagaatttcgaaaaagaagttgatagattacgtcttgaagttgagaatttacaacaaaagttacagcctgattctgatgcagtcatatctgatgcctccgtgaatgataaggattacttgaatgtcaaccgtgacgaagattttgacgactcttcaagtgtatcctcaaagagtgattaa

SEQ ID NO: 80055 - DNA, 801 bp, Saccharomyces pastorianus
atgtacaagttggacaataacgacattgacgatgaaacgaataactctgtttcactgacgagccttttagaatttctcgacccgatcgcttcaaaagtagtttcaaaatactaccatggttctcatctttcgaaagcagaacagaaattccgaaatttcgagggttttagaagacgtaaaccccatcatgaacatgatagtcatcatccacatcacctgaatagaagtcgctctttcttgcagttagaggacttcaaagtaagagcgttacaaagaattagaaatctagataaacccttggattccatttttttcaaaaacagctcaaggttggagaaagcattttaccctttcacactgtttaatatatttttcatcggatttttgatgggcagatttccagaatggtttcatgtttactataccatcttgttcttcgttctgatgcccatacgtttttacacatattataaaaccaaaaatcactactttctggctgatttttgttactttgtgaacatgttatgcctattgtttatttggattttcccatattcatacagccttttccagtcatgttttgcattcactttcggaacgttatgctttgccgttattacttggagaaattccttggtaatacattctatagataagactacttcatgcttcattcacataatacctccctgtgtcatgtacgtcatctatcatggattaccactcgaatacaaaatcgaaaggtttccgggagcaatcattcaaagtgaattggacctcacaaaagtattctttggacat

SEQ ID NO: 80056 - DNA, 681 bp, Saccharomyces pastorianus
atggatagcgttgcaacaagattgagtccatactgtgaattgaaaattgaaaacgagcaggtagaaaccaattttgtcttgcctactccagtaactttgaattggaaaatgcccattgaactttataacggagatgattggattggtttgtataaagtcattgatacaagggcagatcgtgaaaaaacaagagttggatcaggtggtcattggagtgcgacttctaaagattcatatatgaaccatggattaagacataaagaatctgtaacagaaataaaggcgactgaaaagtacgttcaaggtaaagtgacattcgacacgtctttgctttattttgaaaatggtatctacgaatttaggtatcattctggtaactcccataaggtgttattgatttctacaccatttgaaatttcattgccggtactaaataccacgacgcctgaactgtttgagaaggatttgactgagtttttgacgaaagtcaacgttttgaaggatggtaaatttcgtccattaggaaataagttcttcgggatggacagcttgaaacaattgattaagaactcaattggcgtcgaactttcgtctgagtatatgaggagagtcaatggtgacgctcacgttatttcgcatcgcgcttgggatataaaacaaacgcttgatagtcttgcttga

SEQ ID NO: 80057 - DNA, 1422 bp, Saccharomyces pastorianus
atgccaaaggagtatgatttatttgcctatccagaagagatcaacgtctggttgatatttcgccagtttgtcgatttaatcttgatgcaagattttgtgacttacattatttacgtttacctttctattccatatagctgggttcaaatcttcaactggagatctttgctaggtgttattttgattttatttaacatctgggtcaagttagatgcgcatcgcgtggttaaagattatgcttggtactggggtgatttcttctttctggaagaatctgaattgatttttgatggtgtcttcaacatctctccacatccaatgtattctattggttatttgggttattatggcctatcattgatttgtaatgactacaaggttcttctggtgtccgtatttggacattattctcaatttttgtttctgaaatacgtcgaaaatccccatattgaaagaacgtatggtgatggcactgattccgattctcaaatgaatagcagaattgatgacttgatatcaaaagagaattacgattattcaagacctctaattaacatgggtctttcttttaacaacttcaataagctaagatttactgactatttcacaattggtaccgtagcggcacttatgttaggaacaatcatgaatgctaggtttatcaatttaaattacctctttattaccgtttttgtaacaaaactggtttcatggttatttatctcgacaatattgtacaagcaatctcagtctaaatggttcacgagattgtttttggagaatggttacacacaagtttattcctatgagcaatggcaatttatttacaattattatttggtattaacctacacacttatgataattcatacagggcttcaaatttggagtaatttttccaacataaacaacagtcaattaatttttggtttaattcttgtggctttacaaacatggtgtgataaggaaacgagactagcaatctctgattttggttggttttatggtgattttttcttgagcaactatatctcaactagaaagctgacttcccaaggtatctacagatatttgaatcacccagaagcggtattaggcgttgttggagtttggggtaccgtattgatgacgaattttgccgttacaaatattatcttggctgttttatggacattgacaaattttattcttgtcaagtttattgaaacacctcatgttaataagatatatggtaaaactaaacgagttagtggtgttggaaaaactttactaggcttgaaacctctaagacaagtttcagatattgtcaatagaattgaaaatattataatcaaatcattagttgatgaaagcaagaactcctatggtggggcagaacttttgcccaaaaattatcaagataacaagaatggaatattttaa

SEQ ID NO: 80058 - DNA, 678 bp, Saccharomyces pastorianus
atgatgtcagaagagtactatgcagctgcttctgctaagagaagaggtttaggtttggttcgtttcatcggtttcctataccgtctgaatctgttgactggaaagatgatgttcgaatgtttccgtagactaatgaaggatttgacggattctccatctgaagaaactctagagtccgttgttgaattgttaaatactgttggtgaacaatttgagaccgatagtttcagaacgggtcaagcaacattggagggttcgcaattgctcgatagtttgttcggtattttagacaatattattcaaactgctaagatttctagtagaatcaagttcaagttgatcgacattaaagaattaaggcacgacaagaactggaacagtgataagaaggacaacggtcctaagaccattcaacagattcatgaggaagaggagagacaacgtcaattgaagaataattcaagatctaattcaagacgtacgaacaactccagtaatagacactctttcagaagggacgctcctcctgcatcaaaagatagctttatcacaaccagaacatattctcaaagaaatagccaaagggctcctcctccaaaggaagaaccagctgcaccaacttctaccgcaacaaatatgttcagtgcattaatgggagaaagtgatgacgaagagtaa

SEQ ID NO: 80059 - DNA, 2016 bp, Saccharomyces pastorianus
atgacagacgaaactgctcaaccgacacaatctgcttcaaagcaggaatctgctgctctgaaacagacaggcgatgatcagcaggaatctcagcaacaacgtggctacaacaactacaacaatggtagcaactatacccaaaagaagccttacaacagcaacagacctcatcagcaaagaggtggtaaatttggaccaaacagatataacaaccgtggcaactataatggtggcggtagtttcagaggtggacacatgggagccaacagctcaaacgtgccatggactggttactataataactaccccgtttactaccagccccagcaaatggcggccgctggtagtgcccctgctaatccaattcctgtcgaagagaagtcacctgttccaactaagatagaaatcactaccaagtctggtgaacacttagatttgaaagaacagcataaagccaagctacagtctcaggaaagatctactgtgtctccgcaaccagagtcaaagttaaaagaaacttctgattctacttctacttctactccaactcctaccccttccactaatgactctaaggccagttctgaagaaaatatatctgaagctgaaaagacaagaagaaatttcatcgagcaagttaaacttcgtaaagctgctttagaaaagaagagaaaggagcaacttgaaggttctagtggcaacaataatattccaatgaagactaccccagaaaatgtggaagagaagggatcggacaaacctgaggtaaccgaaaaaaccaagcctgctgaagaaaaatctgctgagccagaagttaagcaagaaactccagctgaagaaggtgaacaaggagaaaagggccaaataaaggaagaatccactccaaaggtgttaacctttgctgaacgtttgaagttgaagaaacaacaaaaagaacgagaagaaaaaacggaggggaaggaaaacaaggaagtgccagtacaggaagagactaagagcgccatcgagtctgctcctgtgcctcccagtgaacaggttaaagaagaaactgaggtcgccgaaaccgaacagtcaaacattgatgaatctgcaacaactccggctatccctactaaatctgatgaagctgaagctgaagttgaggctgaagcaggtgatgctggaacaaagattggacttgaagctgaaatcgaaactacaactgatgaaactgatgatggtacaaacaccgtttctcacatattgaatgtattgaaagatgctacaccaattgaagatgtcttttcttttaactatccagaaggtattgaaggtcctgatatcaaatacaagaaagaacacgtcaaatatacatatggcccaactttcttgcttcaatttaaggacaaactaaacgtcaaagcggacgccgaatgggtccaaagcactgcttctaaaattgtcattccaccaggaatgggcagaggaaatagatctagagattctggcagattcggcaataattctagtcgtggccatgactttagaaatacctcagtgagaaatatggatgacagagctaattcaagaacttcatcaaagagaagatcaaagagaatgaatgacgacaggagatctaatagatcttatacatcaagaagagaccgcgagagaggctcctacagaaatgaagagaaaagagaggacgataaaccaaaggaagaagttgctccacttgttccaagtgctaataggtgggtgccaaaattcaagtctaaaaagactgaaaagaagctagcccctgacggaaagaccgaactattggacaaggatgaagttgaaagaaagatgaagtcactattgaataaacttactttggaaatgttcgatgctatttcatctgaaattttggctattgcaaacatatcagtatgggaaacaaatggtgaaacgttaaaggctgtgatagaacagattttcttaaaggcctgtgacgaacccccattggtcttctatgtacgcgcaattatgtggtaa

SEQ ID NO: 80060 - DNA, 270 bp, Saccharomyces pastorianus
atggggcaaatcatttttattgcaaaaaaaagcactcacgatgggggtcgaacccataatcttctgattagaagtcagacgcgttgccattacgccacgcgagctactgtttgttggaagctttctattattaacaagtacataccaaccttagctaacattactataacgaagctgagaaagctatacaaaagatttgtcgatcgagaatcattgtttcttatttttttcaggaaggatgaacacattgttcagaatattatcaattaa

SEQ ID NO: 80061 - DNA, 126 bp, Saccharomyces pastorianus
atgatagtagagccaatgaccaaaccaagaaagcctacagtacagaggtgccaaagtttttttactaatggggcaaatcatttttattgcaaaaaaaagcactcacgatgggggtcgaacccataa

SEQ ID NO: 80062 - DNA, 273 bp, Saccharomyces pastorianus
atgaataatgggactatccccaattcgcccttgacactggaaaatcagtaccaactgcataataaatatagaaaaattgcggaggggattatactattatccaacgattacaaaattccagttgtacctccgagagaaacatacttcgtggacttacgatttattggtattatgtccggatattatggcaccctctccggacttaaggtattggatttaaatacaaatgaacttatagaagttggaaatggcgcatctgtgttaatccagtaa

SEQ ID NO: 80063 - DNA, 1269 bp, Saccharomyces pastorianus
atggaatgttttgtaccgctgcgttgcgacttagatggaagtaatatagaacagttacgtcaatcacacttaagccgtaaatttattatatttgatgagcaactgaatctttggctgtggtttcaaggtaattcgcaagagaacaagagatctgtactacaaaatatgataatatcaataaatgaagcgcaagttaccagaacaagcactatcgatgattattttacccaagttgagaacaatgaaaatctctggaagttgaaaaacgactgttgttcgaagattcttttcaaatcaaatgttgttatgaataatggttataataatcagatcaaatttgtctttgaatataaatctgtggatgcaaatttcaataaccaggattcattacaagatccacaggcaaggtatacattagataagtactctagcgaggagattttgccaagttttgagccagtttattcctggtcttctacagccaccaaatcatccaaaaatactaataatcatctggagaaaaatagcagggcgactcatcgagttagttctaaaaatagcgaagtccacgaagcggacgtttctagaaatccaaatacatttactcttaagctccaatacccaatattctcacttttgaatatgagattgagaaacatctccttgaaatctgagcattgcatattatcatcgttagactttcaaacttctaaagcatccgaacaattgaccaaaaaatttatttatccgcaagaacacaattcttttctcaaactaaactttcaagaaatatcgtataaactaatcgacggaacttctcaaattgaactagatccaatctgtcctttgaaagtgccactcactgcattttcatacgatagcattagcgctacttttaaactggttctgttacccaaatcaactcaaccacatcgtgtgaaaatcaccttagcgtacgaactcgagctgcatcccaatctgaagttacctgtgagaacatcatgggaaacagaagtcacattgaagcgttctatgccaatttcctcgacatcttctcaatactcgagtaacaacaataatactaatcatagcgcttcttttaatggtgcggccaacaacgttaattctggtggtttggccaatctaagattaggtggggtttcctcctcaagatttagtcttgcagctgcttcgactacatcattggtgaatagcaaattaagcaatgtaaaattcaagtttattaatagcaatagggatcctctagag

SEQ ID NO: 80064 - DNA, 714 bp, Saccharomyces pastorianus
atgcacagtgttcccaactatacaagaatcgaaggaaatatgggtgaaaggaagaaaatttctattaagaaactagccaataactataatccagaaacatttaatgacaataactgcagtattggtatatttagactggcgccacaagattatcaccggtttcactcaccatgtaatggtacgattggaaaacctgtatatgtggatggagagtattatactgtaaatccaatggccgttcgtagtgagttagacgtctttggtgaaaatatcagagttattatccccatcgattctcctcaatttggcaaactactgtacatacctattggtgcaatgatggttggatccatactattgacctgcaaagaaaacgatgtagttgagagtggacaggagctgggctattttaaatttggaggttctactataataatcattatcccgcacaacaacttcatgtttgattctgaccttgtgaaaaactcttcagaacgcattgaaacgttagtcaaagtcgggatgagtataggacacacatcaaatgtgaatgaattgaagagaatccgtattaaagtagacgacccaaagaaaattgaacggatcaagagaacaattagtgttagcgatgaaaatgccaagagtacaggaaatgtaacatgggaatatcatactttacgggaaatgatgaataaagattttgctgggctatga

SEQ ID NO: 80065 - DNA, 2778 bp, Saccharomyces pastorianus
atgaggattattaagggcagaaagcgaggcaagaacaagaaaccaacgctaattttaaaaattcatgtcattcaagctgaaaatattgaagccttgaagacattcaattgtaacccggtatgttttgttaccactaatacattttatagtcaaaagacgaacaagctcaagaactcaaatacacactggaatcaaactttgaggatcaaacttccgagaaatccaacatctgaatggttaaggattatagtatacgacgccctaccaaccggagccccccctactacccccagtagaccaaggacaaccactgcaaatacatcttcatcgacactgtcaaattcaggcctaagttctcactctcattcgtcgagaaatttgaatgttacgtccaaaggtaatcaaacttcaacatcaattaattcagtatcatcttcagctacaccggccccttcacattcttcctcttctctctcaacaacaggtcccgggtccacacacaaaaataggattaatagctatctatatttgggtgaagcaaaaatttcattactggatttattcaagaggaaggacaccacgacgagctataaattttcgattgaagctcagcggtaccatctatacgatatgaaaagagggaaagaccaagattccttgaactgcaactttctagtgggcgatattttgcttggatttaagctagaatgtaacgttaaaagaaccccgacttttcaggctttcaatgcttggagaaatgagttgaatacttacttgggcagaatagatagaaataaggcccgcatgagatcttctagttctttgccacctccactagaagatatgttgagcaatagttcagctgttagtggaaatgaaatacgacgcgagaaaccatatagcgatactgatctagcccacgatgaagaggtcaatgccgaggatgaaatagatgctgaggaatctattgaagatatgaatagcagcggcagcatttgtacggggaggaggtacgatatagacaatgatactatattcgactctatatctgaggttgtttcgctaaatgatgaagaactagatattctaaatgattttgaagaagcagatcatccaaatgtgccagacataaatgtgcatgacatcgacgaagatacccgtatcagtctatcttcaatgataacagctttagatgaatatgatatcgtagaaccagaagatgttgcaaaattacctgcaatgtcggaaaatgacataacatcagtggatgacgaagaatctgaaaaccaacaggaaagtgatgaggagtttgatatatataatgaggatgagcgtgaagattctgattctcaatcaaacgaatacattgggagtcggcttttacacctgcaaaggggtaaacataataaatcatatgcaaattacttatacagaagagcaaaaagtaacttttttatatcgaaaaaggaacatgcgatgggggtagtattcatgcatattggggctatcaaaaatttacctgcattaaggaatcggttgtccaagactaattatgaaatggatccatttatcgttatttcgtttggtagaagagtattcaaaacatcttggagaaaacatactttaaacccagaatttaatgaatatgccgctttcgaagtttttccccatgaaacgaattttgctttcagtatcaaagttgttgataaagactcattttcattcaatgatgacgttgcaaaatgcgaactggcttggtttgatatgctgcaacagcaacaacatgaaaacgaatggataccttatgagataccattggatctcactgttgagccagcacatgctcctaagcaaccggtattatattcgagcttcaaatatgtttcatatccgttcttaaaaaagagcttttggaaagaagctgttgacacatcagtcaacttagaaagactcgacattattcaagtaatgctctatcttgaacgtcttggttcattcacgatggccgattcttttgaactctttcagcatttcaataaatctgcttgggccggccagagcattactagatcacaattagttgaagggctacagtcatggagaaaatccactaattttaaacgcatctggacatgtcctagatgcatgcgttcatgcaaaccaactagaaatgctagacgttctaaactggttctagaaaatgacttgataacccattttgccatatgtacgttttcaaaagaacacaaaactttaaagccgtcgtacgtctcatctgcatttgcatccaagagatggttctctaaggttttgataaaattaacttatggtaaatatgctttgggatctaacaatgcaaacatcttggttcaagaccgagacacagggataattatagaggaaaaaataagcgcacacgtaaagttgggaatgaggattatatacaatggtaaaagtcccgagtctaaaaaatttagatccctcttgaagactttatcaatcaggcaaggtaaaaaatttgacagcactgcatctgccaaacaaattgaacctttcataaagtttcactcactagacctttcacaatgccgagataaagattttaaaacattcaatgaatttttttacaggaaactaaaaccaggaagccggctgcctgaaagtaataataaagaaatattgttttcaccagcagattcaagatgcacagtgttcccaactatacaagaatcgaaggaaatatgggtgaaaggaagaaaatttctattaagaaactag

SEQ ID NO: 80066 - DNA, 792 bp, Saccharomyces pastorianus
atgtctttgttcaatgctaagaatcctgctcctatgcacggtcacgttattcttggtagtgatcatatgccaatcttggtttaccaaatcagtccagaagaaacaagaatcctttgtgcttacaactctccaaaggtcccagctgatatcaagagttggatgattaaggatgtccaacctttcattccaaagagtctacgtccttcatttgatgaagccgtcagccaaggtaaatttagagctatgccaaactcctacttgccagctagacaaaacgacgtcactggtatgtgtgttatcggtgacgctctaaatatgagacatccattgaccggtggtggtatgactgtcggtttgcatgatgttgtcttgttgattaagaaaattggtgacctagacttcagcgaccgtgaaaaggttttggatgaattactagactaccatttcgaaagaaagagttacgattccgttattaacgttttgtcagtggctttgtattctttgttcgctgctgacagcgataacttaaaggcattacaaaaaggttgtttcaaatatttccaaagaggtggcgattgtgttaacaaacccgttgaatttctgtctggtgtcttgccaaagcctttgcaattgaccagggttttctttgctgtcgctttttacaccatttacttgaacatggaagaacgtggtttcttgggattaccaatggctttattggaaggtattatgatcttgatcacagctattagagtattcaccccatttttgtttggtgaattgattggttaa

SEQ ID NO: 80067 - DNA, 612 bp, Saccharomyces pastorianus
atgtctgctgttaacgttgcacctgaattgattaatgccgacaacacaattacctacgatgcgattgtcatcggtgctggtgttatcggtccatgtgttgctacaggtctagcaagaaagggtaagaaagttcttatcgtagaacgtgactgggctatgcctgatagaattgttggtgaattgatgcaaccaggtggtgttagagcattgagaagtctgggtatgattcaatctatcaacaacatcgaagcatatcctgttaccggttataccgtctttttcaacggcgaacaagttgatattccatacccttacaaggccgatatccctaaagttgaaaaattgaaggacttggtcaaagatggtaatgacaaggtcttggaagacagcactattcacatcaaggattacgaagatgatgaaagagaaaggggtgttgcttttgttcatggtagattcttgaacaacttgagaaacattactgctcaagagccaaatgttactagagtgcaaggtaactgtattgagatattgaaggatgaaaagaatgaggttgttggtgccaggttgacattgatggccgtggcaaggtggaattcaaagcccacttga

SEQ ID NO: 80068 - DNA, 972 bp, Saccharomyces pastorianus
atggacaaaaaaagtggtgaagcgccacgttggttgatgaagcatttggataatataggtacaactacaactagatatgacagaacaagaagaaagcttaaagccgtcgctgatcaacaagctatggatgaagatgatcgtgatgacaattcagaagtagagttagattatgatgaagagtttgccgatgatgaggaggcacctattatagatggtaatgaacaagaaaataaagaatcagaacaaagaatcaagaaggagatgctgcaagctaatgcgatggggcttcgtgatgaagaagctccttccgaaaacgaagaggatgagttatttggggaaaagaagattgatgaggatggtgaaagaattaagaaggcattacaaaagacagaacttgcagcactatactcatcggatgaaaatgagatcaacccatacttatctgaatccgatattgaaaacaaagagaatgaatcgcccgttaaaaaggaagaagattcggacactctatccaaatccaagagatcttctccaaagaaacagcaaaagaaagccacaaatgcgcatgtgcataaagagccaactttgagggtgaaaagtattaaaaactgtgtcattatcttgaagggggataagaaaatactgaaaagcttcccagagggagaatggaatccacagacgacaaaagctgtagatagtagtaataatgcatcgaatacagtgccttcgccaatcaaacaagaggaaggcttgaattctacagtggcagaaagggaagaaactccagcgcctacaataacagaaaaagatatcatcgaggctattggtgatggcaaagtcaatatcaaagagtttggaaagttcatcagaagaaaatatcctggcgcagagaataaaaagctaatgtttgccattgtaaaaaaattgtgtcgaaaggttggcaatgaccacatggaattaaagaaagagtag

SEQ ID NO: 80069 - DNA, 1821 bp, Saccharomyces pastorianus
atgagtattagtactttaatgttgtgtacagtatttcaaagacagacaagagaggtttccaacacaatgtctttagactcatactatcttgggtttgatctttcgacccaacaactgaaatgtctcgccattaaccaggacctaaaaattgtccattcagaaacagtggaatttgaaaaggatcttccgcattataacacaaagaagggtgtctatatacacggcgacactatcgaatgtcccgtagccatgtggttagaggctctagatctggttctctcgaaatatcgcgaggctaaatttccattgaacaaagttatggccgtctcagggtcctgccagcagcacgggtctgtctactggtcctcccaagccgaatctctgttagagcaattgaataagaaaccggaaaaagatttattgcactacgtgagctctgtagcatttgcaaggcaaaccgcccccaattggcaagaccacagtactgcaaagcaatgtcaagagtttgaagagtgcataggtgggcctgaaaaaatggctcaattaacagggtccagagcccattttagatttactggtcctcaaattctaaaaattgcacaattagaaccagaagcttacgaaaaaacaaagaccatttctttagtgtctaattttttgacttctatcttagtgggccatcttgttgaattagaggaggcagatgcctgtggtatgaacctttatgatatacgtgaaagaaaattcagtgatgagctgctacatctaattgatagttcttctaaggataaaactatcagacaaaaattaatgagagcacccatgaaaaatttgatagcgggtaccatctgtaaatattttattgagaagtacggtttcaatacaaactgcaaggtctctcccatgactggggataatttagccactatatgttctttacccctgcggaagaatgacgttctcgtttccctaggaacaagtactacagttcttctggtcaccgataagtatcacccctctccgaactatcatcttttcattcatccaactctgccaaaccattatatgggtatgatttgttattgtaatggttctttggcaagggagaggataagagacgagttaaacaaagaacgggaaaataattatgagaagactaacgattggactctttttaatcaagctgtgctagatgactcagaaagtagtgaaaatgaattaggtgtatattttcctctaggggagatcgttcctagcgtaaaagccataaacaaaagggttatcttcaatccaaaaacgggtatgattgaaagagaggtggccaagttcaaagacaagaggcacgatgccaaaaatattgtagaatcacaggctttaagttgcagggtaagaatatctcccctgctttcggattcaaacgcaagctcacaacagagactgaacgaagatacaatcgtgaagtttgattacgatgaatctccgctgcgggactacctaaataaaaggccagaaaggactttttttgtaggtggggcttctaaaaacgatgctattgtgaagaagtttgctcaagtcattggtgctacaaagggtaattttaggctagaaacaccaaactcatgtgcccttggtggttgttataaggccatgtggtcattgttatacgactctaataaaattgcagttccttttgataaatttctgaatgacaattttccatggcatgtaatggaaagcatatccgatgtggataatgaaaattgggatcgctataattccaagattgtccccttaagcgaactggaaaagactctcatctaa

SEQ ID NO: 80070 - DNA, 561 bp, Saccharomyces pastorianus
atggtgtggatttttgctgcaaatatgtacatgagaacaaaagacaatgatgaggatgccaaggccgccatcaaagaagcctccaatgtcgaaagtaaattcaagaatttaaattgtaatattgctaacggttatttatcaataataaaagatgaaccaggcgtggcattaaaggaattcgaaacagttctgtactacgatgagaataatttagatgccttggtcggattcgctgaattaattttccctgaagagctaggcgtcgaggaaactaatcttgagcgttattatactctcagccttgataaaaaaccaggtaagagggccaaacttacgttcgttaatgacacagataggtcagcagcgtatgcaaggctaaaatttctattggagtgcgcaatactagaatcgatcgaggcttactattccccagaagtttggtggtatttgtccctcatttacgagaaatatcaagatgacgagtacaaaaactctttgctaaaatgtattaaataccaagagttgaatcccattcgctccctaaggtattgcaattactaa

SEQ ID NO: 80071 - DNA, 1926 bp, Saccharomyces pastorianus
atgcctaactcaaatgttcggattcctcctactgttccatcgaagataatagatgtggtcgaccaagcgctaagagcgcgactcttaggtggcagcaccttcaattcagggtttgatagtttagattccgtacttaacttacagtttaggctacattaccatgttattggatcgaatgggcctgcaaaaccagtttgtgatgttttactgaaggaaagtcaaaatttagaaaagaatatgagtatgatggaggagttgaatgactatccggagattacaaaactagtggagaaaattctgttcaattgcctcggtatccttttcttccacaggggccaatttcaggaatcgcagcggtgcttgctgcactcgttgaaaattcataataacactgcatcgcaaagaacagcacttatggagcagtatgataggtatttgatcgtagaaaacctgtactaccgtggtctagtttcgcaagacataaatatcatgcaaaatgttttttacaaagaactactggcccacgtggatacgatccctcccgaatcaaacggtcttcttttcgaatacatcagcttgatcgtcgcaaaactcaggttcaatcaaattcaggatttagcagaaaattttaaaactaccgtcgaaaatccttttattcttttcctttacatgataaagaagttccagtcacctctcaaaaagcacattgataatgatgatctttatttgaagttcggacagaacgttttgttgaaggccaaatttcctactgctagtgagactaatgatgaagctttggagcattttaatgtctttttgcagtattatttcaaattcactcacataaaaaaaataaaagtgaatcccagttggtataatttcataatatcttcaatggaaaagacttttcaaagtattgaagtttcgaaaacagcaatgtttcttttccaaaacttaagcgataacagtaatgacgaaataaagaagaagacatttaaaagagaatctatactaaattttgttaattttgtgaaatacaacgacaagtactatcaactgcacgataactcccaccgtgacataatttcattcattgatgcgtattcttttattttacaaaactcctccaaaaccgattcaatcgaaaatgtttttgattacgataatacggtatctacgtttgcgacttccttgaattccttctacaaagaatataatttgccattaatgagccaatcagaatctttagattggctagaaaacagcaccagatgtgtatacccaggaaacatttcgaaagttctaacaaatgcgtggtcaacattgtacgaaattagaaaatatcagttagatttccttgtatctaataatttgacttcatatctatgtaatgcaatgatgctgtccacaaaagaaaaagacaatgctgatgtagaagagcaggaagaaggagaggaggagaaggcattacgtgaattacaatttaaatattcttacactctagcacaacagaggcacattgaaactgcaatcaagactctagaatcattgatattaagtaaaaacccaaattactacaaagcttggcatctattagctctttgtaggtctgtgcaagaggataaggaaatgtcgtacaagatagtttgctctgttctagaagctatgaatgaaagtcttcagaacaatactttacttctgaatgatagatggcaatttattcacctaaaattaacgcaattggcgctaattgaagaaatttttggcactttagaggcactggagacacttccagaggtctttgaattatacgcaacattatttccagattcacaacctgaattgaacagcatgggtcccaaatattctcaaactaaagaatatcttttacaatggtgtggatttttgctgcaaatatgtacatga

SEQ ID NO: 80072 - DNA, 2364 bp, Saccharomyces pastorianus
atggtggatgttcactcccgaagcatttttataggtgctaacaagcaaactcaggttagcgatatacacaaagttaaaaaaatcgtcgcatttggcgcaggtaaaactattgcattatgggaccccattgaaccaaataataaaggtgtttatgcaactttgaaaggccacgaagctgaagtgacttgtgtcagatttgtcccagattcagattttatggtatctgcatctgaggatcaccatgttaagatctggaaatttactgattactcacatttacaatgtattcaaaccattcaacattactcgaagacgattgtggcattaagcgctttaccaagtcttatttcagtcggttgtgctgatggtactatcagcatatggagacaaaatattcaaaatgatgagtttggtcttgctcatgaattcaccataaaaaagggattcttctatccactgtgtttatcactgtcaaaagttgaagaaaaaaagtatttacttgccattgggggtactaatgtgaacgtttttatcgcgtctttcattttaagtgattctggcattgagaagtgtcgagtggttgcagaattggaaggtcatgaagactgggtcaagtcattggctttccgtcaccaggaaactccgggtgattatttgttatgctcaggctctcaggaccgttatattagattgtggagaattaggattaacgatttaatcgatgactctgaagaagattcaaagaaattaacattattgagcaataaacaatataaatttcaaattgatgatgaattgagagtaggcataaattttgaagccttaattatgggccatgatgattggatttcatcccttcagtggcacgaaagtcgcttacaactactagctgctactgctgatacttcattgatggtatgggaacctgatgagacttcaggcatttgggtgtgcagtctacggttaggagaaatgtcctcaaaaggtgcctcaactgcaacgggttcctctggaggtttttggtcctgtctatggtttactcatgagagaatggatttctttttgaccaatggtaagactgggtcctggaggatgtgggctacaaaggataatattatttgcgatcaaaggttgggcatatccggtgccacgaaggatgtgacggacattgcttggtctcctagcggcgagtacctattggctacttctctggatcagaccactagactctttgctccatggatttatgatgccagcgggagaaaaagggaaatagctacctggcatgaattttctaggccacaaatacatggttatgatatgatttgtgttgagacagtgacggataccagatttgtaagtggtggtgatgaaaaaatcttgagatcatttgacctacctaaaggggtggcaggaatgttacaaaagtttgttggtattcaatttgaggaaaaaagtgaaatgccagactctgctaccgttcctgtgttaggtttgtctaataaagctggtgatgatgacgcaaatgaagatgatgaagaggaggaaggtggtaataaagaaacaccagatatcactgatccattgtccttgctagaatgtccgcctatggaagaccaattgcaaagacacttgttatggcctgaagtggaaaagctttacggacatggttttgaaataacgtgtcttgatatttctccggatcagaaattaattgcttctgcttgtagatcaaataatgttcagaatgcagttattagaatattcagcacagaaaattggttagaaataaagcctgcattaccgttccacagtctaacgataacaagattaaaattctctaaagatggaaaatttttattgagtgtttgtagagacagaaaatgggcgctttgggaaagaaatatggaagataatacttttgaattgagattcaaaaatgaaaaaccacacacaaggattatatgggatgcagactgggcaccattagagtttggtaatgtttttgtcaccgcgtccagggataaaactgtcaaagtatggaggcaccaaaaggagccagctgatgactacgttctggaagcatcaattaaacacactaaagctgtcactgctatttccgtacatgacagcatgataagagagaaaattttgatatcggtgggtcttgaaaacggtgaaatttatttatacagttatactttgggaaagtttgagttaataacgcagctaaacgaggatataacaccagcagacaaaattacaagattgaggtggtcacatttaaagagaaacggtaaattatttttaggtgtaggaagtagtgatttgtccacccgtatatactcattagcatatgaatag

SEQ ID NO: 80073 - DNA, 330 bp, Saccharomyces pastorianus
atggttgatgtcaatgccaagctcttcttctatagcgacttgttgtggcgcaacccagaaatcaaatctttagggatagtattcaccaccgataacattaacaatgtttatggctggagactacaacaggagcatgaactaatatcaatggtcggaaaggggatgaccgacgaacaattgcatgcttttgtggatagatacatgccctcctataaactttatttgaacgactttgtccggagtgaaagtttaggttccattgctacattgacgttaggaatcgactccaacaggaatgtatattctacgaaaacgagatgtattgaatag

SEQ ID NO: 80074 - DNA, 90 bp, Saccharomyces pastorianus
atggaagagccaaagactaagtcacctggtgtgaaattgaattctgtggatgaattgattgaaaagttaaaagaagttaaggccatttaa

SEQ ID NO: 80075 - DNA, 165 bp, Saccharomyces pastorianus
atgccagatttgtacttctacagagaccctgaagaagttgaacaagtcgctgaagaagccgccaccgaagaagctggtgaagaagaagccaaggaagaggttactgaagaacaagctgaggccactgaatgggctgaagaaaacgccgacaacgtcgaatggtaa

SEQ ID NO: 80076 - DNA, 138 bp, Saccharomyces pastorianus
atgtccttaccagctacttttgacttgactccagaagatgcccaacttttgttggctgctaacactcacttaggtgctagaaacgttcaagtatgttatactcattcccgattatataatagagtaatgtgtgattga

SEQ ID NO: 80077 - DNA, 4314 bp, Saccharomyces pastorianus
atgcaattctgtggtggttacctagatccagtaaccaaacgtaaacaaaattatatctatgaagacggatcagaaggttctgtttcaaaaggctttctttgcccacaatattcgaaatgtgtttccaatgccaacccctacaacggcagaattagttttgataatattgttaattccatggagctcgtttttgtcattatgagtgcgaatacttttactgacttaatgtactatacgatggattcggatgaaatggctgcctgtttgttttttattgtttgcatctttgttttaactatctggctgctaaatctactcattgcagtgttggtatcatcttttgaaatagccaatgaggagtacaaaaagaaaaagttcatatatggttctagaaagacaggttatgttgctcgcatagtaacaggctactggaaatattttaagcttaaggcgaatcagacaaaattcccaaattggtcccaaaaaggactagctatttattcccacgttgagtttatctttgtcatacttattatttgcgatataggtatgcgcgcctctgttaaagtatcgacttcggcaaactataacaatatccttctaaaaactgacaggggaatttcgattgttctcttcatcgaatcactggcaaggttagtattatatctgcccaatatgtggaagtttttaacaaaacctagttacgtttacgattttattatatcaattattactctggttattagttgcctggctgttgaaggggttctaggacatatgtatgcctggctatccatattccacatatccagattttacagggtgattatttctttcaaattaacaaaaaaactatggaaacaaatattgagtaatggtgttatgatttggaacttatcgtctttttacttttttttcacctttttgattgctataatcatggctgtgtatttcgaaggcgtgattcctccagaagaaatggcagaccagccatttggaatgtattcactaccgaattcatttctttctttgtttataataggttcaactgaaaattggacggatatcctatatgccctccaaaaacactcaccaaacatctcctcagcttttttttgctcagtattttttattatatggtttctactatccaactcagtgatcttgaacattttcattgccctaatatcagaaagcatggaagtgaaagaagaagaaaaacgaccacagcaaattaagcattatcttaagttcgtctatcctcagaaaatacaagaatatacacacgctagtttggttgcgagaattcgtaaaaaattctttggaggtcataggaacgaagatacaagagattttaagcaatttcttatgagaggaaccgcgataatgaacatagcgcagaatatgggggagttggccgatgaattcaaagagccaccttcagaaaacctatttaaaaagggcttatcaaagctcacaattggggttccgtcactaaaaaggctgagaatgtttgctaataatccattttataaaaatagtgacgttgtgtttacagaaacgaacgatataaatgggaggacgtatatcttggagttgaatgagtacgaggatgagaagctagattatttaaaaaagtaccctttattcaattactcatattatttcttttctcctcagcatagatttcgaaggttctgtcaacgcttggtaccaccaagcactggaaaaaggactgatggatcacgatttttcgaggatagcactgatctatacaataaaaggagctattttcatcatattgaaagagatgtatttgtattcattttcgcacttgccaccattttactaattgtttgctcatgttatgttacgcctctatatcgtatgcatcacaagatgggaacttggaattggtcctcggcgttagattgcgccttcattggtgccttctcaattgaatttatcgtgaaaacagtagctgacggatttatatattctccaaatgcttacctgaggaatccatggaactttattgatttttgtgtcctaatctcaatgtggattaatttaattgcatacctaaaaaacaatggaaatttgtctaggattttcaagggattgacagccctgagggccctcagatgcctcacgatcagtaacacagctcgtcaaacatttaacctagttatgtttgatggtttaaataaaatttttgaagctgggttgatttcactcagtttgctatttccatttacagtttggggcttaagcatttttaaaggccgtttaggtacttgcaatgacggaagtttgggccgtgcagattgttacaatgaatattcaaattccgtttttcaatgggatatcatgtctccaagggtttaccagcaaccatatcttcatttggactctttcgcaagcgcttttaattcattataccaaatcatttctttggaaggatggattgatttgttggaaaatatgatgaatagttcaggaataggtacacccgctacggtaatgggttcagcagggaatgctttattcctcgttctgtttaattttttaagtatggttttcatcctgaacttgtttgtttcattcattgttaacaaccaagcaaggacaacaggaagcgcttactttaccattgaggaaaaggcgtggctggaatcccagaaacttttatctcaggccaagccaaaagctatcccaaatttaattgagttatcaagagttaggcaatttttctatcaacttgcagtggagaaaaaaaatttctactacgcatcgtttcttcaggtagtactttatttgcacataatcatgctcctgagtcgaagctacaatccaggaaacttgataggttatcaaggtgtttattttatgttttccactagtgtttttttaattcaagaggcacttcacatgtgcggtgaaggaccaagattatattttaggcaaaaatggaacagcatacgactcagtatcataattatagcctttattatgaacgctgtagcattccacgttccagcctctcactattggttccacaatataaaggggtttttcctgttagtgatatttttgtttattattcctcaaaatgacacactaactgaactattagaaaccgcaatggcaagcttaccgcctattctatcattgacctacacttggggggttttatttttagtatatgctattgctttgaatcaaatcttcggcctaacaaggttagggagtaatacgaccgataacataaattttagaactgtaatcaaatccatgattgttctgtttagatgtagttttggtgagggctggaattatatcatggccgacctaactgtgtcagaaccttattgctcctctgatgataattcaacctatacggactgtggatcagagacatatgcctatttgttattaatgtcgtggaatattatttccatgtatatttttgtgaatatgtttgtttcgttgattattggtaatttcagttatgtttaccgtagcggtggatctcgctctggcatcaacagatcggagataaaaaaatacattgaagcttggtccaaatttgatactgatggaactggcgagcttgagctgtcctacctcccaagaataatgcattcatttgacggtcctctttcatttaaagtttgggaaggtagattgacaataaaaagtctagtcgagaactacatggaggttaacccagatgatccatatgacgtcaaaatagacctgatcggactgaacaaagagctgaatacgattgataaagcaaagatcatacagaggaagttacagtacagaagatttgtacaaagcattcactatacgaatgcttataatggatgtatcagattctcggatttgttattacaaatacctctctatacagcttattctgcaagggaatgtctaggtattgatcaatatgtccatcatctatatatcctgggtaaagtggacaagtacttagaaaatcaaagaaacttcgatgtattggagatggtggtaacaagatggaaatttcattgcaggatgaaacgtaccattgaacccgaatgggatgttaaagatcccacagtatcgtctcacatttcgaatataaacgtaaatctggaacctgctccaggaattttagaaagagaacctattgcgacacctagaatggactacggtgttaacaattttatgtggtctccgagaatgaatcaagactctacgatggagcccccggaagaaccaatagataataatgacgatagcgcaaatgatctaattgatagataa

SEQ ID NO: 80078 - DNA, 1119 bp, Saccharomyces pastorianus
atgggacaagatttctatccacaattggttcacatctatgacaatatgcttcagctatacagagctgtttcttcgatgatttctgctcaagttgccgcagaaggtctaattgctacgaagacaccaaaggttcgtggtttgagaaccatcaaaaaagagattctgaagcttgttgagacctatatatccaaggcgagaaatttggatgatgtcgttaaagtgttagttgagccattattgaatgctgtacttgaagactatatgaacaacgttcctgatgcaagggacgccgaagtgctaaattgtatgacaacagtagtagagaaggttggtcatatgatcccacaaggtgttattttaattttacagagtgtattcgaatgcactttggacatgattaacaaagacttcacagaatatccagagcatcgtgtagaattttacaagttattgaaggtcatcaatgagaaatcatttgctgcatttttggaactacctccggctgcctttaaattgtttgttgacgctatttgttgggcgttcaaacataacaatagagatgtcgaagttaatggtctacagattgcattagacctagtgaaaaacattgaaagaatgggaaatgtcccatttgcaaatgagttccacaagaattattttttcatttttgtcagtgaaacgttttttgttttaaccgattccgaccacaaatccggtttttctaagcaagctttgttactaatgaagttgatttctttggtttatgataacaagatttcggtaccattatatcaagaagctgaggtaccacaaggaacttcaaatcaagtctacttaagccaatatttggctaatatgttaagtaatgcattcccccatctaacatccgaacaaatcgcaagttttctctctgcattaactaaacaatacaaagacttagtggtcttcaaaggcactttgagggactttttggtgcaaatcaaagaagtcggaggtgatccaacagattatttgtttgctgaagataaagagaatgcattaatggaacagaatagactagagagggaaaaagctgccaagattggtgggctattaaaaccttccgaacttgatgattag

SEQ ID NO: 80079 - DNA, 2142 bp, Saccharomyces pastorianus
atggaaggaattttggatttttctaacgacttagatatcgctctattagatcaggtggtatctacattctatcaaggttcaggtgttcagcaaaagcaagcccaagagattttgactaaatttcaagataatccagacgcttggcaaaaagctgaccaaattcttcaattctcaactaaccctcaatcaaaatttattgccctttccatccttgataaattaattactagaaaatggaaattgttgccgaatgatcatagaattggaattaggaacttcgttgttggtatgattatctccatgtgccaagacgatgaagtatttaaaacacaaaagaacctgatcaataagtcggacttgactttggtccaaattttaaagcaggaatggcctcagaattggcctgaatttatcccagaactaatcggcagttcaagttcctctgttaatgtttgtgaaaataacatgatcgttttgaaactgctatccgaagaagtcttcgatttctctgcggaacaaatgacacaagctaaagctttacatttgaaaaattccatgtcaaaagaatttgaacagatttttaaattatgttttcaagttttggaacaaggttcttcaagctctctaatagtggcaaccttagaatctttactgagatatttacattggattccttatcgttatatttatgaaaccaatattttggaattattaagcaccaaattcatgacatcgcctgatacaagagccatcacattgaaatgtttgactgaggtttcaaatctaaaaattccacaagataatgatttgataaaaagacaaactgtactttttttccaaaatactctacaacaaattgccacaagtgtgatgcccgtgactgccgatctgaaagccacttatgcaaatgctaacggtaatgatcaatctttcttacaagatttagcaatgtttctaactatatatctcgctcgtaatagggcccttctagagagtgatgaatcgttaagagagttgttgttgaatgcgcaccaatacttaattcaattatccaaaatcgaagaaagagaactatttaagacgacattggattactggcataatttagtagcagatttgttttatgaggttcagcgtttgcctgctaccgaaatgagcccattgatacagttatcagtcggttcacaagctatctcaactggatctggcgccctaaatccggaatatatgaaaagatttccattaaaaaaacatatttacgaagaaatttgttcacagttgagattggtcattattgaaaatatggttagaccagaagaagtccttgttgttgaaaatgatgaaggagaaattgttagagagttcgttaaagaatcagacactatccaattatacaaatcagaaagagaggttcttgtatatttgacccatttgaatgttatcgatacagaagaaatcatgatcagtaaattggcaaggcaaatcgatggttccgaatggtcatggcataatatcaacactttatcttgggctattggttccatatctggtacaatgagcgaagatactgaaaaaaggtttgtagttactgttattaaagatttactagatttaacggtcaagaaaaggggtaaagataataaagctgttgttgcatcggatattatgtacgtcgtgggccaatatcctagatttttgaaggctcactggaattttctaagaacagttattttgaaactttttgaatttatgcatgaaactcatgagggtgttcaggatatggcatgtgacacattcattaagattgttcaaaaatgtaaatatcattttgttattcaacaaccccgtgagtctgagcctttcatccaaacaataattagggatattcaaaagacaactgctgacctacagccgcaacaggttcatacattttacaaggcttgtggtattattatttctgaagaaagaagcgtagcggagagaaatagattattaagtgatttgatgcaactgccaaatatggcttgggacactatagtggaacaatccactgctaacccaacattgttgttagattctgaaactgtcaaaattattgcgaatataataaaaaccaatgtagctgtctgcactcaatgggag

SEQ ID NO: 80080 - DNA, 270 bp, Saccharomyces pastorianus
atgaaaaggtatggattcaagggtttgagagcatctcatggtacatctattatgcatagacacggtggttcttatggtcaaaaccaagacccaggtagggtactgccaggaagaaagatgcctggtcatatgggaaacgagcatgttactatccaaaatgttaaagttttgaaagtcgacgatgaaaataatgttatttgggttaaaggctctgtggctgggcccaaaaacagtttcgttaaaattcaagatgcaatcaaaaaaacttga

SEQ ID NO: 80081 - DNA, 156 bp, Saccharomyces pastorianus
atggccttcacagccgctttatgtggaagaacaaactttttaataggtttatccaagtcggaaatatcccataagctacaagaattatcattgccgccgactgcaagcaggtttgcatgttcattcagagaaatacctgtagaaaatatttgttag

SEQ ID NO: 80082 - DNA, 210 bp, Saccharomyces pastorianus
atgtgttgtttcgataccctccatatactctataatattagatccataaatcccactctcttgaatttcattaattatttcctccttatcgttccacagttcataaaatcttatcgtttcatcgttagtggcaacgcaaattgccatggaacttggagagattactgcgctcagtacacgcaaagggttgggcgacctaacttcgagtag

SEQ ID NO: 80083 - DNA, 195 bp, Saccharomyces pastorianus
atggaacttggagagattactgcgctcagtacacgcaaagggttgggcgacctaacttcgagtagttttgataattttggatatgagtatagtgttattaatacaggattcttggtatcaccgaatccaaaagtagcaacaatctgtttatgtctcaacgaccatatcaaagacgtcacctgtcccgaggtgtaa

SEQ ID NO: 80084 - DNA, 114 bp, Saccharomyces pastorianus
atgtctacattatcagctttgatttcatgctctgcttgtccaaggctttctgtatttacagttgtagtctccgcttcgctaggttctgttttcacaattttgacagattcgtga

SEQ ID NO: 80085 - DNA, 2703 bp, Saccharomyces pastorianus
atggagatggaaatcgaaaactggtataaggaaattttgaatatagccacggtgaaagatgttcaaagaaagcatgcactactaagaaacttcagagaaaccaagatattcacatatctgctacaaaattcctcagaatcttttcataaaaatgtcttttctttgttgaaggagtgcttaacgacgctgtttttattactggtggctagtcctttggacgataactctctgcatattttctataaaagcaatcaggatcatattgatctgtcatattgtgacgaagatgatcaagtattttcacgaaaaaacgtatttcacgaggctgcaagttgtccagaaaaatcacgcttatttattctagatgaggctttaacaacatcaaagttatctaaagaaacagtacaaaaactactgaatgcccaagatatacattcgcgggtgccgctacattatgctgcagagctaggaaaactggaatttgttcactcgttgctaatcaccaatcttttagaggacgttgatcccattgatagtgattctaagacacccttggttttggctatcactaacaaccacatagatgttgttagggatctgctgactattggtggtgcgaacgcatcacccattgaaaagccaattctggattatagtaagaatgtaatcagctctactaaagtccagttcgatcctttaaatgttgcttgtaaatttaataatcatgacgccgccaagttacttttagaaattcggagtaagcaaaatgctgataatgccaagaacaaaagttcacaacacttgtgtcaaccgcttttcaaaaagaactcaacaggtttatgcactcttcatatagtgggaaaaattggcggcgatccacaattaattcaactattgatacgttatggggcggatcccaacgaaattgatgggtttaataaatggacgcccattttttacgctgttcgttcaggtcattctgaagttattactgaactattgaaacataatgcacgtctggatattgaagatgacaacggccattcgccacttttttacgccttatgggagagccacgttgatgttttgaatgcacttttacaaagaccattaaatttgccatctgcacccctgaatgaaataaattcgcagtctagtacgcaacgccttaatacaatagatttaaccccaaatgatgacaaatttgatttagacattcaagatagcattccggattttgctttaccaccgccaatcattccactaaggaaatatggtcataactttttggagaaaaaaattttcatcaaactaaagttaaggccaggtctcgagtctatcaagttgactcaggataacggcattattatgtcatcatcaccaggcagaattactttatcctctaacttacctgaaataataccgcgaaatgttattttacctgttagatctggcgaaattaataacttttgtaaggatatcagtgaaacgaatgatgaagaagacgatgatgaaattagtgaagatcatgatgatggagagataattttccaagtagattcaatcgacgatttttcaatggatttcgagatatttccttcatttggcacaaggataattgccaaaacaacggcaatgccattccttttcaagaaagtggcaataaatagtattgcaaccatgaatttacccttattcgacacaaggctaaataatattggatctctcactttggattaccaaattatttttccttatccgggaaatccactgaaaatcataaaatatgagccgtattggaaatctacaggaagtgatttaatgacctctagtaaagacggtaattttgttacttcttcatcgttgaatggcagtttcattagtgtattagtttgtgctctgaatgatgaaaccatagtggctgcgccaaaaccatacgttgaattcaaaggcacgaagattctgttaaatgatttaacgaaagaacaactggaaaaagtagtggattatgacttcggtaaaattgatggaagcttcgatgaagtaacattgaaacaatacttatcttcgagagtggtgtctctcagaagcctactagaagttattcccgggtcagtccagctggtaattcgtgtatattttcctacagataaggaaattgacacaattcccatcaaaatatcgccatttataaatatcaatcaattcattgataagcttttactaatcattttcgagcatgaacgttttttgcgtcacagcggaagtgggagtatgcgccaaatagttttcagttcatgcaattgggaagcttgctcgatccttaactggaaacaacccaattttccggttttgttgcaaatgaaaaatctgctcagagattcaaccacaggcaaatttgtaggtgatactcctaattgtttaaaggaactggccgtaaatcctcaaaaaatgtcgtatttaaacacggaactaataaacatacatacaatggttcaatttgctatgaacaataatttgttaggtgtaacgcttccatatgaagtactgaagatatgcccgtcgttggctaggatcatcaaacaaaacggactactgttgattgcatcggtcggggaaaatgaccaaataccagctgatgggggttacagcgggatctactacgcttgtgagttactttttgagaataatattgatatgtaa

SEQ ID NO: 80086 - DNA, 309 bp, Saccharomyces pastorianus
atgacaggttccgttttggcaagaagaagaacatggcttcttcgtgcaaccatgcccattatactggggtcttgttgttttgcgtatgcaatgccaacaaccttcaggaacaccatgggtctcatccataatctagaaatgaacacctttccacactttaccgaaagacaagatcgtgtttggaaagaaacaaagagattaagtaccgcgtctgtgcaatactactatgatgccaaaaaatggttgaacaaagatgtagaaaaaacagggaatgcaatcaaaaattggactggcgttaacgtgaagtga

SEQ ID NO: 80087 - DNA, 525 bp, Saccharomyces pastorianus
atgacaaaagatttttaccgtcagctagatcccgttgaggagaagattgttccaccagaaaacgctatagtaatttcttcggaggccaaagaggctactgttaatgagaaggaagccaagcaaggtgttctttcgcaaagggttatgaaatatattggagaaaatgagctggtagacggtatttcagtacgtgatcctgactacttgaagaggtttttcaacgaaagaagaaaacaattttccgctaaatgggacaaggtgacaaataaaatagatgatatcgcaggcagatattatgcccgtgaagagagctttacatcaacaattgctagtttacataccgatccaaacgagcgcctaataccggggttgttgtccattttggttgcttccatgacaggttccgttttggcaagaagaagaacatggcttcttcgtgcaaccatgcccattatactggggtcttgttgttttgcgtatgcaaatgccaacaaccttcaggaacaccatgggtctcatccataa

SEQ ID NO: 80088 - DNA, 84 bp, Saccharomyces pastorianus
atgaaatatattggagaaaatgagctggtagacggtatttcagtacgtgatcctgactacttgaagaggtttttcagtacgtga

SEQ ID NO: 80089 - DNA, 1974 bp, Saccharomyces pastorianus
atgttcaggtcaagaagaaggacttcagtgaggttgcctccccctccaaaagtatccgtgctaaaaaaatctcgaaaagctgctgatgaacagggccctattgatgatattgatattggtgatttggattttgagctggaaagaaaaatgaccaaaatgaccgaaagaaacactcaaaaaaattctggatcaaggaaaggctatacgcaagctgcatttgccaatcttaatgaagttgaagatagaattgagaccaagtcaatggtagatttatccgaaagcgaaaatatggagagctcaaagaaaaggtccaagtcgtttgccgggatgacagacgaagaattagccaaattagaggaattttatataagtaaaggaagatcgaacaagactaagatagatcaatttgattttggtgagcaagttccagtctatttgaacacaacagagtcaaaaacggattcaagcaacgtgacggaccctttagcagcaatttatccatcaaggcctacaattgttcacaatgcaatttcaatgacaattgatcatccagactatgaaaattatatttccaatacaaaagaaaagctcaattgcaaagacaaagatgacgatgtagatttaagagttgtttcgtgttatatatcaggtaggagatatacttggtcatctgtggactggtatgttgaaaatttggcaagaaatggtgatcatttagtcataattactacaattcctgagtttgaagcaaagattgatactctagcatataaggagaaaagaaggcaccgcttagaaaggatgactagcaatactagtgaaagcatgactaccgcgtcacatagccttataggcccggaactctctagtcctttatcaacgggaataagaatagaagctattcataatgaggctaagcaaacttgtagcgatattttaaattactacgcgagaagattggcaactaaaatagttaggattagtattgagatggtaaaagaagattcaacaagatcagccataatatctgcgacctctctgtataggccaagtttgcaagtaatcagcaccgttagtgccaacattcaaatcaagtttagaaatggaaaagtgaaactaccattttttttaatgaaacactttgcaatgccagcatttgttgtcccattcgaattcatcaagcctgagcttttaataaaacctagagtggataaagatgaacaggacaacaccgatgatttgaaaacggaagtgagaaaaaaggaacgattgcaatggctaagtgcattaatcaggagaactttggaaaaccctttcacgaaacataaagtggttgattcggatgatgaagaaagtgatagtgatgagtcaatagcctctgtaaatgagtacttcccaatctcacctgaaaaaaaggaagaaatggaattcttcgataagatgggatatgttagaccaaaaccgtcaagacaagtactattggatgataacactcttatgaagtacgacagttctggccgaaagctaactcctatagaatcgagaaattcgaggcgcagctcaaagcggagttcaagaatacaattcaacaataacggcatttataaaataaagtccatggttgatgacatttacaaccacgaaactgcctctacgcctcatatcaagacagcactaaaatgggacaatgaggatccgaaaatgaagttcacttcacatccaatgagaaaaacaaaatccgcagggctatcacccagaacatcctccacttcatcttcttcaggacagagaaaagcgcatcaccaccaccatcaccacaaccacgtttcaaggacgaaaactaccgaaagcaccaaatcaggcaacagcaaaaaggacagttcctcatcctcaacaaacgaccatcaatttaaaaggtctgaaaagaagaaaaaaagtaaatttggctcgatcttcaaaaaagttttcggatga

SEQ ID NO: 80090 - DNA, 255 bp, Saccharomyces pastorianus
atgtcatctgcaaagacatttactaagcatatctcgtttgatgatctggcaccttccttaattgatgaccaagctaccattattaaaaatgacagtcaccatgttggcttgaataatcattttttacatatacctccacaatttaatcctgtttacaaaaatactttgaccggtagccaggctctaatgaccttgccactgacgaaagcttggactcacccgaagacgaagaagcttcttcgccactacaactag

SEQ ID NO: 80091 - DNA, 1617 bp, Saccharomyces pastorianus
atgcttaaacttccccgtatgaaggagggcatacctcaagaacgctctggacattctgtaaccttaatgaagaatgagaagcttcttatcatgggtggcgacaaaactgactatgccagcccaaatattcacgatctacaaacttcagaaactgaccaaggcgaaggaactttactgtataccttagatttatcatctttgaatgagctatgcccaggaataatgtgtgaatcactacatgcaggagaaagtttttctaatagtctttccgggggctttacaccctctaagtctactgaaagtgaaaatcaagagataataaacattcttacaccaagattgcctgatagcaaagttttgagttataatgatattgatgaaggggctggaagttactccagcgctttggatgataaggcatttgaacgaaaatcagatagggaggaaaagaaaccccaatcttccaaagttgattcaagcatcaataaggaaagtccgggaactggtatcaaagtatctaaaaaaaatttccctgttctacgaggactagcagtggattcagaagagtatggctcttcttcatataaggacacatcatgtcaaaaaggaattcccaaaaatctttttgatgatttaaacctgaacctacaaacattacgtctcgaagctcaacaaaaggaacttgaaactgctagacatatttcagaattagaaaaggaagtccagagactcatggtaataaaagaagcttcaaaagattcaaattttcaaacagcacggcttaaaaatctagaaattcagaaaacctttttagaatctagaattaatgatttaaaaaacttattgatggtcaaattatctcaggcaagtaaactctgtgaccaaattacgattcaaaataatggacttaaaacatgctccgaacatgtcactattaaaagggatatcatcgatcttgagaataaatgtgatgttttgaagcgccagaacgaaatacttgtaaataatatgcaaaaaataacccccgaacttcatacctatttgaacgaatcgtcctgctatctgggtaaattattaaaaagctatcctaccagtgcacggccaccttcaagtgagaaagataatcaaatatatgagaaagattcgctgaacaaaatagaaaaagtaataaatgaaatgcacgaaaccgtgcgtgctaaagagaaattgcaccttgaaactcagaagcttaatgatgaaagagattctttgcgggctaatttactcgacaataacaacaagttggatgcgctaagaaaactctctgatggaagctcgaagtctatggacctaacaaagaaggctattcacctatcacaatccgagctcgaaaaatatcgtaaaaacaacgacgatttacagaaggagattgatagaattaaaactgaacaagctgaacaggatgacaagcaggagcagcgtggcgccatcactcatggaaattttgatgcgttccacagaatgaaaatcaacaatctgaaagcggaactgtatatgtcgaaagataatagagattccctcaaggacgaactgctagctttaaaaaaaaaactatatactctcgaacaaaaaaaatag

SEQ ID NO: 80092 - DNA, 1089 bp, Saccharomyces pastorianus
atggtacctttcaagctgacaaataaggtacctacggacacgggaccttctctgatttcagcgcaaagtgtacccagaccaatagtttttatggataatcgaaacaatacgcgaatagtaacacctacgctacctccaaaccagcatagaggcatatcaggcgcgtcgactgctcttccctggtctccagagagtaagaatgcagggaagtatatttggaatagggtcaaactaaaaaactctccgtttccccgttatcgacactcttcctcatttattgttacgaatgataacaggatttttgtgaccggtggacttcacgatcaatcggtatatggggatgtttggcaaatagccgctaacgcggatggtacgagctttacttccaagagaatcgatattgatcaaaatacgcctcccccaagggtgggacatgcctctactatatgcggtaatgcctatgttgtgtttggcggcgacacacacaagctgaataagaacggactgttggatgatgatctttatcttttcaatattaattcttataagtggaccataccacaacctatcggccgtaggccgttgggcaggtacggccataaaatttctataattgctagcaaccctatgcaaactaaactatatctttttggcggacaagtagatgaaacttattttaacgatctggtcgtctttgatttatcatcattccgtaggccgaattctcattgggaatttttagagcctgtcggcgacctgcctcctcctttaacaaatcatacaatggtggcatatgacaacaaattatgggtattcggcggggaaactcccaagacaataagcaatgatacataccgctacgatccagcacaaagcgagtggtctaaagttaaaaccacaggagaaaagcctccgccaatacaagagcatgctagtgtggtgtataaacatttaatgtgtgtgtttggcggtaaggatatccataacacatattccaacgatgtctattttttaaacttattatcgctaaaatggtataagcttccccgtatgaaggagggcatacctcaagacgctctggacattctt

SEQ ID NO: 80093 - DNA, 156 bp, Saccharomyces pastorianus
atgcgttctactaccaacagagaaaaagaaagaaggaagaactttgttatgtctattcacaagagatctgttagaggtaaacaaaaaatgtcactacgagacaagcaaaaagtgttacgtgcacacatcaccaaacaaaagaagaaggggtattag

SEQ ID NO: 80094 - DNA, 156 bp, Saccharomyces pastorianus
atggaagacttcatatatgatgccagattggtgtttaacaattgccgaatgtacaatggcgagaatacgtcgtattacaagtatgctaataggctagagaaattcttcaataataaagtaaaagaaatacctgaatattctcaccttattgattaa

SEQ ID NO: 80095 - DNA, 384 bp, Saccharomyces pastorianus
atgtctcgaccattcggggttgccttgttaattgctggccatgatgcggatgatggttatcaacttttccatgcagaaccatctgggacattttaccgttataatgccaaagccattggttcaggctctgaaggagcacaagcagaattattgaatgaatggcattcttctttaactttgaaagaagctgagcttcttgttctaaaaatcctaaagcaagtgatggaagagaaacttgatgaaaataacgcgcaattgagttgtataacaaagcaagacggattcaaaatatatgataacgaaaaaactgctgaattgataaaagagttgaaagagaaagaagctgcagaaagtccagaagaagcggatgttgaaatgtcataa

SEQ ID NO: 80096 - DNA, 213 bp, Saccharomyces pastorianus
  modified_base (205)..(205): a, c, g, t, unknown, or other
atgttcttaactagaagtgaatatgatcgtggtgtaagcacattttccccagaagggaggttattccaagttgagtattctttggaggccatcaaattaggatctacagcaattggtattgccacgaaagaaggtgttgtactaggtgtggagaaacgtgccacctcaccactgttagaatctgattctattggagaaatcgtgngagattga

SEQ ID NO: 80097 - DNA, 660 bp, Saccharomyces pastorianus
atgtacaatgcggtcctttacttggcaaaatatgatgacgaatttgatattagggatagagccaggatgatttcatccttgtttgattcagggaaatatgaaattgtgtcactactattacaagcacctaaacctacggcaagaagtgacgattttatcgtttctgcaagattggaaacacataccccagaaataaaagaattttttagaatgcttccttggaatactgaaattactgaggttggcgagacaggtaacgatattagagaaggcgcagaattgaaagactataacaaatacaaaaaaagtttttcatcccagtcttttattaccaacaactcagcaagatctttcacatctagctccaacgcaaaattgactgggatcaatgacggcgatagcaatagcatctcaggtaaaggtaacgtaaacaccttcacatctcaaaacgggaagaaatatcgtttgcaaagcctggacgagtttttttccgacattccagaaaggaagagtaaaccaaggaaaattataaaggtggtggaagaaagcagtgacgaggatgaagacgaatcggaagagagcagtgacgatgatgagtatagtgactcttctttgggaacgtcttcttcgggaacgtcttcttcgcatctggaactttag

SEQ ID NO: 80098 - DNA, 336 bp, Saccharomyces pastorianus
atgttggctggaaaagtttttggaaacattttttttttttgcgggcataaaataaaaactccgctgttcatcgcttcctacgcaatgttcttagccaagcaaaaaattatagttacaatgtttgaggtttcttccattctagagaaactgccgcagaatattttactgtttcactaccctcttccttccaaaatgggaaataatttattaatgtcgttcttaacacaaagatcgatcgatgaaaatgaaattgatgcattattacatcctaatgcggtctatcgtttctgcaatatgagaaccacattcagaacattatcctcatatggcaaataa

SEQ ID NO: 80099 - DNA, 165 bp, Saccharomyces pastorianus
atgcatttgtatagcatagccaagtcaacaacaatactgcgttttctaaggcatattttattgccatttttgcatctctctattcattttactagttgcttgtgcagaataatctatgttggctggaaaagtttttggaaacattttttttttttgcgggcataa

SEQ ID NO: 80100 - DNA, 741 bp, Saccharomyces pastorianus
atgaaaatacccacggaccaagcttctctgatcaactacaagacaaaatacgactcttttcttcatgacctacaaacatattccgcactggtaatttcagaaatgaaatggaaccaattttctattttccaaaatgatgaaacgactttatcaagatttgaacacatcacattaattttgcaaaccgtgctgacaaaatcgaaaatgattagaattttccagccaaacttgtacaagtttatgcaagatgatttaagaccaactttaatggagttggtgggtttcactgagtcaataaatgcaacaatagaacctggttttgcgaatgaacaatcgctacaatctgcaaacggattaaagaaattggccaaccaacttttatacttcgaacaggaaatatatggcgaaaagttccgcgtaaataggcccatccagcttcgtccaataacattatcagcaaactacaaaattgttattctggataagaagaacgccatacccgaaatatttcaaaccctactgaaattcatgacacaaataacgacatattttgttaaagatttgtcggaggtagaacttcatgggcacatgcattgtattgataaaaaaatgctggacaagtcaaaattcatgtatttatacgaagagaaaagcaacgaggaagtgaaagcagcttctgctcaaaaggagaagatagtagataatatcattggcctattatcaaatgatgaagaacattaa

SEQ ID NO: 80101 - DNA, 1074 bp, Saccharomyces pastorianus
atggtgaattggcaaacattgttcatggtctcattgaggagacagggcagttcctctcgttacaggtataagttcaatatggagaatatcacacatcaggtgttccctcgctgtaagcaagcgtttaagaagacaaacttatcttatgagtattgtgatctcgaaggagtactgtataatatttcactcacagacttgcaaaaactgctattacgtgatataaacgcccctcgtgaacacgcattcaagattgttagaacagatctaactcaaaaatcctcgaagaagaggatccaacactgggaacggattgcgcctatgtttgaccaccccttaagtctctacgagaagttgttcagcgaaatggatgaggacttcaagccatctttcgagtggcaacaattaataagggtacgatgcaaagatgataagttgaaactgcagcgtgtaatttggcctaagtcgatattttcaaacttttgtcggggaatcggggttaagaagaacacttacgatagactcttggaacaaaataatggtgaggtacccatgtttgtaaacccagctaatgcaaagcccttgcctcttttccaggtttccgatgaggcgatgattggggaattcgatggcattggtattttcccttactttgtagataaacatagagaatttttcgttactgaggtagacaaattgaagaccaagatagcctcgccactttgcaccttgaatgaacgaaagcgcattgagaaggctaacgctggtcggatactggcgaacgaagagggtaaaccattctatctggatgcaaacagtgccacaactcgaatcgctgatggtaatgtcgtcactttgaagcaacttttagaaagatcggttagccataagacattgtggagcaaacaatcaaacaaagacagaacgtgccctggagacattttaagagctacaatattatcaaacgacttctccatccggcaattaagggctgaattttgcaacaatttcattctctacaatatctttaccattttacaacgtaaacaagaaaagcatccgttccttctctggtaa

SEQ ID NO: 80102 - DNA, 135 bp, Saccharomyces pastorianus
atgccacatggatgcgcatgccataacccttgcatggttagcacacgccctcacgtgagtgaatttgccaaaatgatagtcaaatgtgttgatagttcgataagaggtgaagttggggaactaaaggtggaatag

SEQ ID NO: 80103 - DNA, 321 bp, Saccharomyces pastorianus
atgattgatttgtcatatatatgcagcgacgccacagttttttccggcaagagtcgcgtgatctttttttctaatccaatctgtgaacatactagaggaaacttctaccttttctacctgaattacattatcaacacttttgcaccaaaaaattgtggtactaggagatgcaaaccttttggtctccacatcaattgcagaaaaaagattgactgtttgcatgtgcaattatcttatatattatgtaaaaataaaagtaggaaatgccacatggatgcgcatgccataacccttgcatggttagcacacgccctcacgtga

SEQ ID NO: 80104 - DNA, 3357 bp, Saccharomyces pastorianus
atgataatagttgttgtaggactacttttcaactttttaggtgtttcagcttttgcaggaatttcaattatcttagtgatgttcccattgaatttcttgttagcgaatttgttaggtaagtttcaaaagcaaacactgcaatgtactgaccaaagaatctcaaaattgaacgagtgcttacagaacataagaattgtcaaatattttgcttgggaaaggaatattataaatgaaatcaaatcaataaggcaaaaggaattaagatccttattaaaaaaatctttggtgtggtccgtaacttcttttctttggttcgtgacaccgaccttggtgacaggtgtcactttcgccatctatacatttgttcaacatgaagatttgaatgccccgcttgctttcactactttgtcactcttcactttgttaaagacacccctggatcaattatcaaatatgctaagtttcataaatcaatcaaaagtctctctaaaaagaataagcgattttttaaggatggacgatacagaaaaatataatcaactaaccatatctccagacaaaaataaaattgaatttaaaaatgcgactttaacctggaatgaaaatgacagcgatatgaatgcattcaaattatgtggtttgaatattaaatttcaaattggtaagttaaatttggttttgggttctacaggatctggtaaaagtgcattgctgctgggtttactgggtgaactaaatctaattagtggctctatcattgttccgagcttagaaccaaggcatgatttaattcccgactgcgaaggtttaaccaattccttcgcatattgttcacaaagtgcgtggctattaaatgacacggtaaaaaacaatattatctttgataacttctataacgaggataggtacaacaaagtaattgatgcatgtgggctgaaaagagacctgaagattttaccagcaggtgacctaacagaaattggtgaaaagggtataactttatcaggagggcagaaacagagaatttccttggcgagagctgtttattcgagtgctaagcatgtcttactagatgattgtttgagcgctgtcgattcacatactgctgtatggatctatgaaaattgcatcacaggtccactaatgaaaaatagaacctgcattttagttacgcacaatgtttcattaacacttagaaatgcccatttcgcgattgtgttggaaaatggcaaagtgaagaatcaaggaactattacagaattacaaagcaaagggctttttaaagaaaaatatgttcaactttcttctcgagatagcgttaatgaaaagaacgctaatagattaaaagctcccagaaaaaatgactctcagaaaatcgaacctgtcaccgagaacataaattttgatgcaaattttgtgaatgatggccagctaatagaagaggaagaaaaatcaaacggtgccataagcctcgatgtttataaatggtacctgaaattttttggaggcttcaaagctttaacagccctgttcgctctttatatcacagctcaaattttgttcatcagtcagtcttggtggatacgacattgggtcaacgataccaatgtacgaataaatgctcctggttttgcgatggacacgctgccattaaaagggatgaccgactcttcgaaaaataaacataatgcattttattacttaaccgtatattttcttattggtatcattcaggcaatgctaggtggttttaaaacaatgatgacgtttttatccggtatgcgagcctccagaaagatctttaataatctgctagatctagttctacatgcccaaatacgatttttcgacgtgacgccggttggtagaattatgaatcgcttttcaaaggacatcgaaggtgttgatcaagaattgattccatacttagaagtaactatattttgcctaattcaatgcgcatcaattatatttctcattaccgtaataactcctcgctttttgacagtcgccgttatcgtttttgttttatatttctttgtggggaaatggtacttaacggcaagtagagaattgaaaaggttagattcaataaccaaatcacccatttttcaacatttctcagagaccttggtaggcgtttgcacaattcgtgcatttggcgacgagaggagattcattttagaaaatatggacaaaattgaccaaaataacagagcattcttttatttatcagttactgtcaaatggttttcttttagagtcgacatgattggcgcattcattgttttagcatcaggttcttttattctgctcaatattgcaaatattgactcgggtcttgccggcatttctttgacatatgccattttgtttacagatggtgctttatggttagttagactgtactcaacattcgaaatgaacatgaactctgttgaaagactaaaagaatattctagcattgaacaagagaactatcttggccatgatgaaggccgtattctacttctaaacgaaccatcgtggccaaaagatggagaaattgaaattgaaaacttatctttacgttacgcaccaaatttgcctcctgtcataagaaatgttagtttcaaagtggatcctcaaagtaagattgggattgtcggaagaactggcgcaggcaaatctaccataataacggcattattcagattactagaaccaataaccggatgtatcaaaatagatgggcaggatataagtaaaattgatctcgttacattacgtcgttccattactatcatccctcaggaccctattctatttgcaggtacaatcaaaagtaatgttgatccatatgatgaatatgatgaaagaaaaatattcaaagcactttcacaggtaaatctaatttcttcacatgaatttgaagaagtacttaactcggaggaacgctttaacagcactcataataaatttttaaatcttcaaacagagatagctgagggcggcttaaacctgtcccaaggtgaaaggcaattgctttttattgcacgatcattgttacgcgagccaaagataatacttttggacgaggctacttcctctattgattacgattctgaccatttaattcagggtattataagaagtgagtttaataaaagcacaattcttactattgcacatcgtttgagatctgttatcgactacgacaggataattgtgatggatgccggtgaggtaaaagaatatgatcgccctagtgaactgttgaaaaatgaacgcggtatattttatagtatgtgtcgtgacagtggggacctagagcttttgaagcaaatagccaagcaatccagtaagaggatgaaataa

SEQ ID NO: 80105 - DNA, 315 bp, Saccharomyces pastorianus
atgggttctggtgaacagtattgtaaccttcttcccacaattttaatgaaaagatttttagaaattgtggataacccaaaccgttcctcatcatgcatgaatttggcgtggctttatattattggtatgttcatttgtagattgacattagcaatttgtaattcccaaggtcaatttgtttctgataagatttgtttaagaataagagccatactcataggagaaattatgcaaaaggcttacgtaggaggctgtttacatctccaaaaaccagctctgattcagatagtatctccgcaaaccttggtaccataa

SEQ ID NO: 80106 - DNA, 1074 bp, Saccharomyces pastorianus
atgggaacggatccccttattatccgaaataatggttcattttgggaagttgatgattttactcgtttaggaagaactcagctattgagctactatttaccattggctatcatagcctcaattggcatttttgcactttgtcacagtggattatctcgttatgtaagatctgccgagtccgatttagtgaacgaatatctatttggcgcacaagaagagagaaaagaagataatagtatagaaagacttctacggaactcaaatacccaagccaattacgtcaacgtcaaaaagcaaggaaggattttgaaacttagacattttgatataacaactatagatgtcaagcaaatcgatgctaaaaatcatggtggactaacgtttagtagaccgtctactagtgaccacttaagaaaatcatctgaaattgtattaatgtctttacaaataattggcctttcctttttaagagtaacaaaaatcaatattgaattaacgaacagagatgttacaactttactattattttggttaatactactttccctaagtatcttaagagtttacaagcgttcaacgaatctttgggccatctgttttactgcccatacaactatttggatttcaacctggattccaatacgttcggtctatattggtaatatcgaggatgtaccctcacagatattttacatctttgaattcgtaattacttcaaccttacagctaataaagctcacttcaccaattaaagacaactcatccatcatctacgtaagagacgaccatacctctccttcgagggaacacatatcctcaattttaagttgcattacttggagctggattaccaattttatatgggaggcccaaaagaacactattaagctaaaggatatttggggcttatcaatggaagactatagcattttcatcctaaaagggtttaccaggagaaacaagcacattaataatttgacgctagcactgtttgaatctttcaaaacatatttactcataggaatgttatgggttctggtgaacagtattgtaaccttcttcccacaattttaa

SEQ ID NO: 80107 - DNA, 90 bp, Saccharomyces pastorianus
atgaagattaacacgagaaggaagaaaaacgcgtttgtattggccacgataaccaccctttgtatactgtttttgtttttcacatggtaa

SEQ ID NO: 80108 - DNA, 1083 bp, Saccharomyces pastorianus
atgcctttgattttcatagcatgcaatgatgaagataaagatttggaaaccttatataataaaatctggacggaagcttccagctctggcgccggtacggttaaattatacctgccagaaattttaaacgtactttgtgtgaatataaagtcgaatgatttctctattagaaaaacatgtgctaaatcagtcatacagttgtgtggcggtattaatgatagtattccttatccacaaattgttaagttatttgatatatcgagggaggcattaagtggtagatcatgggatggtaaagagcatatagtggcagcattggtttcattaacagaaaaattttctcaaactgtggccgacaataatgatctacaagaatcaattaatcatgtaatgtacactgaagtttcgagaaaaagtatgaaatatgttaagaagatactaccgctttacgcgagatatatcaatgtgaatccacaagaagagacgatcaccttcttaattgaaaaagccaaagaaatgattcgattgttgggcagcgaatctgatgacagtgaaggttccattaagcagacttccgatgaatccacaataaaaagaattaagcctaacactgaaattacacaaaagtcatccaaagagaacgttgagaacgaagagtatgtgatcaacttgttaaaagttagtgttgacatatgcaacaattctaaatcgaggtatccgatgaatttattggagttcattatagatgagattgcataccttttccataatgacagaattatacacacatggagaacgcaactagctgctagtgaaattggtatctcgatagttggaagatttagtaccataagtagcgctgactttatccaaaatgtggggagactatgggatcaaacttttccaataaattgtaacaaggaaaccattgagaatgtgaaattgcagatgataaagttcggtggcctgatcattcagaagattccaagcttgcagaacaatatcgaggaaaacttacggttgttgaacagtattgattcaacgagcagaattgagttggaattgaaaaatattggtctatga

SEQ ID NO: 80109 - DNA, 2925 bp, Saccharomyces pastorianus
atgtccatttcttctgacgaagcgaaagaaaaacagctcgtggagaaggcagaattgcgcctggctatcgcagattcccctcaaaagttcgaaactaatctgcagacttttttgcctccattattactaaagctcgcctctccacatgcctccgttagaacagcagtattttcagccttaaaaaacctcatttctaggataaatacgctgccccaggttcagcttcctgtgagggcgcttattgtccaagcaaaggaacccaatttagccgctcaacaagactcgaccaatgtccgcctttacagtctgctactggcgtctaaaggcatagataggctttccttgcaagatagacagcagttgctaccgttagtcgtttcgaacatctcgtgtctaacaggcacagtagccgccagaatgttccacatccttttgaagcttattttggaatgggttgcaccccaggagtcttcacatgagcaggaagaatttgttcagttccttcaactggacaacgacggtttttcgtttttgatgcgccaatttaccaggttttttctgctggtaccttcaaagcaagtccaggtttctcaacagcccctgtcgagaggttacacatgtccgggcctatctctaactgatgtggcattctttacttatgatgcgggcgttactttcaacaaagaaccgctgaataagttcaaaaaggctatttttcaatttgtttgccatggcatggcggctacccaaactattgagcagtcacctaggatgattgaactgatggaatttttgtgcgttgtctctacggattccacaaatttatctgatgatgcggctcagttcatgaaacggtttcccatgccttatgaaaacgaagagttcatcacctttcttcagacgctgtacatcggcaacacagcaaatggaagaccgccggtcaaggctatcttgcaagaaaaaatcctgtccatattaaacagaagtcacttcgccaccaccaaagcagaatgtatttcgttgatttgctctattggattgcattcatctgagtataaacttagatctttgactctttcttttattcgacacgtagcaaaattaaattacaaaaatttaaatcctgcttcttcatcaccttcatcaacagacttttccactagtattgtttccttgattagaaataatcttcatgccgaaggttggccgaagttacaattggggccccagaccccagctttcaatacagccattctgcagagacagctgcaatatgaaacattgggtgatatcttgaaaagagattttgagcttgtaagtgacttatcctatattgaatttctattcgagtccttgaaaaatgacttaccacagttccgctccagtattcaggagtctctgctttctctagtaggccatttatcaattctaccccaacaatctaaattaaaattaaaaaatttgctcaggaaaaacctgtcaattgacgagcaacagcgggaggataataatgatgctgttaattctataatggcactcaaatttgtatctataaaattcactaacgctgccttccccttccatgatcctgaggcaaggttattcaatatatggggtactgtacgaacaaatagatttgacattattgaagaatcctttaaggggcttcaacccttttggttcagggttaataatgcttccataaatacatcagctaccgtgaaaacatccgatctgttgggctctcacttgtcagagactgaatttcctccattccgggaatttcttcaggttttgatcgaccagctagattcggaagctgcatcaattacacgaaaatcactgaacaatgctgtcagatttagtaaacaatgtctcatttccaatgcaatatacggtaaaaaaacaatggttatacaagatgaggattggtcagttagaatagacaaagctttggaacttgacgacacagttgtgtcccgagttaatgaaatggttcaaggcatgaatgatgatattttcattcgctatttgactcttctgtcaaacgagtttacagctacgaacagtaagggtgaacaaattgcaatatttccatatcaagatccaatttttggttctgtcttattaactttattaaattttgtgagcaatgatgttttacggagattggaaattcttgttcccgatttataccatctagttatcatgaaatttcaatcgttgagtgataatgatcttgcagtctgtgcaaccatcatcggtataatttctactgctatcgcagactcgactcacgttaagcgaatcacaaaaatagcacaatcacaaacaatggcagagacatatgttgcatcttatgttgttccacgattatatttgaaagatcaaacaaatcacattgaatctgacagtatcctaaacctattaaacattttaacaactcatctatcgcatcctggcactaacaaggatatgatattaaagttggtctgccaagtgacaaaattcggtttacttctccaagtaagtgcacaagaaaggaaagatttcttgaaaaaagtcatggatactatacaagacaaattgatcaacgatgtgacagcaattcaaacgtggtcatacctatcactatattcaacagatttagagaattccagtctttttcaagaaaaattacttgaaactaacgtttctaagcaaaacgatttcttattttcagttggtgaatctttaagtgttgtggctggtaaatggtcaagtaagtacttgatcaaacagattgatattcctaatttcaatgttgagatcatgcaacaaaaattccctgctacaaatgttaccactatacttgatgagatcttttcaggttgcgactctacaaaaccctctctgaggaaggcatctagtattaggctgttatca

SEQ ID NO: 80110 - DNA, 2472 bp, Saccharomyces pastorianus
atgatattaaagttggtctgccaagtgacaaaattcggtttacttctccaagtaagtacacaagaaaggaaagatttcttgaaaaaaatcatggataccatacaagacaaattgatcaacgatgtgacagcaattcaaacgtggtcatacttatcactatattcaacagatttagagaattccagtctttttcaagaaaaattacttgaaactaacgtttctaagcaaaacgatttcttattttcagttggtgaatctttaagtgttgtggctggtaaatggtcaagtaagtacttgatcaaacagattgatattcctaatctcaatgttgagatcatgcaacaaaaattccctgctacaaatgttaccactacacttgatgagatcctttcaggttgcgactctacaaaaccctctctgaggaaggcatcttgtatttggctattatcatatattcagtacttaggtcatttgccagaagtaagttccaaatgtaatgatattcacttgagatttatgagatttttggcagacagagatgaatttatacaggattccgccgctagagggctttctttggtttacgaaattggtggttctgatttaaaagaaagtatggtcaaagggctacttaaatcatttacagaatcaaccgcagggtctgcatctacaagtgctactggcatctcaggttcagtctccgaagagaccgagttatttgagccaggagttttaaacactggagatgggtccattagcacttacaaagatattttgaatttggcatctgaagttggggaccccgcacttgtttacaaatttatgtctcttgccaaaagttctgcgctatggtcatctaggaaaggtatcgcattcggtcttggcgccattatgtctaaatcttctttagaagaattattactaaaggatcagcaaactgccaagaaattaattccaaaattgtatagatacagatttgatccatttcaagcagtatcacgctcgatgacagacatctggaatactttaattccagaatcctctttgacgatttctctctatttcaatgatattcttgatgagcttttatgtggcatggctaataaagaatggagggtcagggaggccagtacttcagctttattacaattgattcaatctcaaccgcaagagaaattttccgaaaaaatgctgaaaatttggacaatggcattcagaacgatggatgatataaaagatagtgtccgtgaagttggtaccaagttcaccactgtattggccaaaattttggcaagatctattgatgtggaaaaaggtgtgaatcctaccaagtctaaggaaatactagacaatattttgccatttttattgggtccacatggtctgaacagtgatgcagaagaggttagaaattttgcgctcacaactttgattgacttggtgaaacactcccctggagccatcaaaccgttcactccaaaattaatttacgattttatcacattgttttcttccattgaacctcaggtgattaactatttggcattaaatgctgcaaattataacattgatgctaacgtcattgatacgcaaaggaaaaatggtgtcacaaattcacctctattccagaccatcgaaaaattaattaacaattcagatgattgtatgatggaagaaataattaatgtggttattaaagctagcagaaaatcagtcggattgccatctaaggtcgcatcctcacttgtcataattatcttagtgaaacggtactctatcgaaatgaaaccctattctggaaagttgttgaaagtctgcttgactatgtttgaagatagaaatgagtcggttaatatagcatttgcaatttcaatgggatatttattcaaggtttcagcgttggataagtgtattaaatactctgaaaaactaataacgaaatattttgagcctacctcaacagaaaataacaagaaagttgttggtacagcgatcgactcgattttgaattatgcgaagtcagaattcgataatgtggcaagtgtatttatgcctttgattttcatagcatgcaatgatgaagataaagatttggaaaccttatataataagatctggacggaagcttccagttctggcgccggtacagttaaattgtacctgccagaaattttaaacgtactttgtgtgaatataaagtcaaatgatttctctattcgaaaaacatgtgctaaatcagtcatacagttgtgtggcggtattaatgatagtattccttatccacaaattgttaagttatttgatatatcgagggaggcattaagtggtagatcatgggatggtaaagagcatatagtggcagcattggtttcattaacagaaaaattttctcaaactgtggccgacaatagtgatctacaagaatcaattaatcatgtaatgtacactggggatcctctagagtcacctgca

SEQ ID NO: 80111 - DNA, 1656 bp, Saccharomyces pastorianus
atgtcaccaggtagcacttcttcatcatgcttaccatatcatagttcttcacacttgaacactcctccatacgatctattgggcgcttcggcagtttcacccaccacaccatcttcctctgactcgtcctcctcctctccattggcacaagcgcataacccggcaggtgatgacgacgatgcggataatgacggtgattctgaggatataacactatattgtaaatgggacaactgtggtatgattttcaaccaaccagagctgctatataatcatctgtgtcatgaccatgttggcaggaagtcacataagaacctacaattgaattgtcattggggagactgtaccacgaaaacggagaaaagggaccatatcacctcgcatttgagagttcacgtaccattgaaaccgttcggttgctctacgtgctccaaaaagttcaaacgtccgcaagatttaaaaaagcatttgaaaattcatctggaaagtggcggtattttgaaaagaaagaggggacccaaatggggctcaaaaagaacttctaagaaaaacaaaagttgtgcaagcgacgcagtgtcgtcttgttctgcatctgtgccttccgctatagctggtagctttaagtcacattctacttctccacagatattacccccattgcccgtgggtatatctcaacatctgccttcacaacagcagcagcgggctatttccttaaaccaactatgctcagacgagctatctcagtataagccggtatattctccacaattgagtgccagattgcaaacgatcttgccgccattatactacaataacggcagcacggtaagccaaggtgccaacagtcagagcatgaatgtctacgaggacggttgttctaataagaccatagcaaacgccacccaattcttcaccaaactatcgagaaatatgacaaataactacattttgcaacaaagcggtggtagtactgagtcctcgtcatcatctgggcgcatccccgtagcacaaacaagctatgtgcagccacctaatgctccttcataccaatccgtacaaggtggtagctctatttcggccactgcaaatacagcaacttatgtgccagtacggttggccaagtatccaactggtccttcgcttactgaacatttgccacctttacattcgaacactgccggtggtgttttcaaccgccaatcacagtatgctatgccacactatccatctgttcgtgctgcgcctagctattcctccagtggctgttctatattaccgcctctacaatcaaagataccaatgttaccatcgcgccgtacaatggcaggtggaacttcattgaagcctaactgggaatttagcctgaaccaaaaaagctgtactaatgatattatcatgagtaagctggcgattgaagaagtagatgacgaaagcgagatagaggatgatttcgtagagatgttgggtatagtgaacattatcaaggactacttgttgtgctgtgtcatggaagatttagatgatgaagaaagtgaggacaaagatgaagaaaacgcattcttgcaagaatctttagaaaaattgagtttgcaaaaccaaatgggaactaactcagttcgcatcttgaccaagtatcccaaaattctggtatga

SEQ ID NO: 80112 - DNA, 948 bp, Saccharomyces pastorianus
atgaaatcctcagagccagcgccagcgaccccgaccgggttcagaaattccatctggttcatcatcttctaccttttcgtcatccaagcgctaggttctgcaataatctcgggcggcatcgagtttgccatcgcatatgccatgtaccattcccgtgtagatcttatcaccttatgggcatttcctcacaccatttcaggcgattgtgcactaagtttattcatccaggtgggtcttacatgggctagcgaggaaattttagttggattcgatgactacaagaggcctgttttcagattgaataaatggattacgaaaccgtcaccactgaaaaccgaatctaacgaagaaataccaccccctaaaaagcgtttcattgtggattacttcgaatccgaagacaacgtcgttgcgaagcagaacactctgtatcataagcataattggctctttggctatttagaggtcaatagaggaatcattcccaaaggtaaagaagctacgttgaaaggttttctcacatctcagttcattcatgattctactcagtccaaattcatgaactttatagaatggtttgtgcagaaattcatcagatctatgatcctagccattgccatgttcattgtcatttggccagtcactatgggtatccttgctggtataggccataaggtcgggtcccacgactactacttcaacgattatccactaccgcaggtcatgaagttgatttatgccgttgtaattgcctttgtatgcactccagtggccatcatcgtcattgtgttgagaaaccagtttcacgaggaactttactatgaaggcttggcaaacggtacgctacagcaggatcaagaagtttgctccacgggtaatcgcagctcgggatcaaccgatcaagatatcagtactaccaaacaacagtctcaagaagcggtagcgtga

SEQ ID NO: 80113 - DNA, 645 bp, Saccharomyces pastorianus
atggtgaggttgaaagattttgaaatcaaacctaaactgaagaagtttaaaatccaaattgtaaccaaaattcaaacaaattttaaacccaccaactcaacgtcgaagctaaacgtgagaattcccctgacaaaagtcttccaggaatataaaatagacctcagcaagcaaattagattcaaggcaaacatcggcaaggtcgtgtttaacttgagtgacgattttctcctctgggagatacaaaccatgaaggggcaccgagaacatagcacaaacaagagctcacagtacaacagtgacgaagatgatccaaatacgtgtgcatccatggtggcagagttccccctctttaaccaggaagaatatgaccgcctgcaagaagaaatgaaaacctcaatgaatccaccgcccttgcgcacgggacccaggctggaagaactatatagacaagtgcacgaccaacaaacttcccacgttactcctcgagataagttggtcaacattgatttcgagattccgtactgtacatgcagtggcctgaaagttgagtacttgaaggtcgaagagccacaattgcagtaccagtctttcccctgggtcagatacaagaccgtcagcgacgaagagtacgcatatattgtttga

SEQ ID NO: 80114 - DNA, 1149 bp, Saccharomyces pastorianus
atgtcgtcaagcctttttatcctggatgaaaatctggagccattggtatcgaagaatattagagcactaccgaatctatcgtcggttctttcaagtttcaaacaatgttatcatgacgggtcgcctccaattctctcccaaaacgattggttctttatacatttgaagagagactttctgcatttcgtttcagtgatacataccacagacaaaccaaatatagacttaatgactatactagcctttttggaacaattttatcatcttttacaaaaatattttgaaatcgaggtcttaactaagaatgtcatactggacaacatcttacttgtcctggagttgattgatgaatgtatagactttggtattgtacaagtgacggatccaagtatcatcaaggactacattcgtgtgaaggtcaacgtaccaagagttacagtagacaatgaggagtggagccctggtgaagagagcagtagtagtagcggtagcgatagcgatagcgagtacagcaatactaataagaggaaggataagaagaagaaaaggaagaagaaaaagggcactaaagggaaaagcgtgggcaaaagtaaattaaaaagtataatggtaaacaataaagaaaataggggcataaacgtggtggaaactgtcaaggagacactaaggaacaagaatgataccggtaaagaagccgctaatgacgagctccccaatgacggtaatgatttatacatcaatggcgatattgcgaagacgattataatgcccatatcatggagaacaaaggggatacattacgccaaaaacgagttctttcttgatgttattgaacgtgttcagtacttgatggattttgaaaaaggagtgattaggaaaaatctgatacatggagagattgtgtgcagatgctatttatcagggatgcccaaactgaaaatatccataaacaagatactgaacagggacccccagttcatgtcgaattccagctttcatcagtgtgtttcactagattccataaacactattgaaaaagatgaagaaaagaatagtgacgatgatgctggtttgcaggccgccacagatgcaagagaaatcgaatttataccgccggatggcgaatttgttctttgccatacgagttga

SEQ ID NO: 80115 - DNA, 1107 bp, Saccharomyces pastorianus
atgtcttcattggatgtaatagttcgacaaacgcaaaatttgaatgtacgatataattcagacgttcctcttatatttatgacctcgcttgaaactgaatctcaagtatcaaacttccttgaagagcattattcttctagcaaagtgagatggaaaaccgtagttcagtcaagctttccacaaattgataaagatagattattacctatcgatttacaaataaattctcatgaaaatgatttttggtatccttgcgggactggtaacctaactgacactttgtatttttcaggagaattggacaaattaattgctcaaggaaaagagattttatttgtttcaaatgttgacaatttgggcgctacaggagatttgaacattttaaatttcatcataaatgaaaaaatcgagtatcttgttgaagtagttgaaaggactgcaaatgtttcaaacactggagtgttggcaacatataaaggtaaactacgatcggtttattacaactgcttatccaatgaaagtgcaagcacgtgtcgaattgtcaacactaataacatttggattgatttgaaaaagctaaaggagctaataaagtctaatagtttaaatttgccaattcattctagggaaagtaaaataacacacaaaaatgaagagatagagtgtcttcaatttaagacacagttggtcgattgtattgcgttctttccgaacagtcgagtattgaaagtatcaagagacagatttttacccctaaaaacatgtagggacttgtttttgttgaaatcaacattatatgatctcgattcaaatggaacatttaacctctaccctctgaaatttggattattaccttcaatcgacttgggcgatgagtttgcaacttatgagacttttaagataggagtaccagatattcctaatattctggaattagatcatttaactgtgatgggaaatgtgttttttggtcgtaatataactctgaaagggacggtcattataatatgtgatgaaaatgatgtaattactgttcccgatggctctattttggaaaatgtaacgatttggcataaatctcagctggaggatatgaatggatattaa

SEQ ID NO: 80116 - DNA, 174 bp, Saccharomyces pastorianus
atgacggttttctctggagtaaataaaatagagtttgaaggtactttcgaaggtattggaaaggatgttgttatgtcacaaatgataagggccttgcagaagcattttccttcgatacgtgacaagaattatgagtttagcctatttttgcacattttcaaagatatgtcttag

SEQ ID NO: 80117 - DNA, 1347 bp, Saccharomyces pastorianus
atggcaaagcctattcatgttaaattcatcataatgtcattccctatcataacttttgtaggcatcggatttacgcatgtcgttgcggatatgtctgcatccttcattgccatgctcaatggtgcggacgtttctgtgggtaaatatatatggaaactactaattcccgcttctttaggtaacatcgtaggaggactcttttttagcgcagtcgttcccttctacttacatttggtggttgtggaacgtgatagaaagagattatctttaccagaatacgaagcaagagatgaacaacctgaattgaatatggattcaagggttgttaggataccaaaaaatgagtgtgaggaagatataaaagacgaagttagtgacgatgacgcaactgaaaccggtggagacgtcgaagacttgacagagaaggattctgcaagcgcttataatacaatacacgatagctcgagttatttgactgggagaagcctaaattcgcttctatctataccttcatcagtcgtaacttccgacaatgctactatggaatcggacttgggagagcctgtaccattcatacccagaagcaattccaccgcaagatcttcacatttgaagttgcctcataataactctgccaagtccattgacaaacgccatattagcaagcgtcatagtttgagatcaccgcccggtgtctttcctgtaaggggaatgggagaaccactagaaagagaaattacgattgaagatgcaacttacgaccctaaggaatatgagcttttcttaagaagagccgaaacacataactcgacatttgtgagggataagaagaaagaaaatgataagctattaaggctagtgaaaactgaagaggatcgcgagcaagaagagtacgaaaaaaatggcggttacaatatcctggaaaataaaccaggtactaagctagagaaaataattacgcatcttgctgaaaatgtatcttctagggaagtgacccctccggtattacctagaacgacacaggatacttttcctcataacgctccagcctcgtctccatcatacacagacgatgctcattcattacgtaaagcaaacagtaccacgttaggcggactgtttagggcggtgtcgaaagaatttcactcaagcaaggatgcagaaagcccagatgacttactcaaaaaaatggctgctgttggcataaaccgcaaggctagaattacagcaaataatgtagccggaattgttaacctaaataaagaggacctggacagcactccaaggcggcaaaaatttactgagcccaaaaactcttataatcgtcacacatccccccagttatga

SEQ ID NO: 80118 - DNA, 159 bp, Saccharomyces pastorianus
atgttttgtcagtttgtctgggcaatagttgctggttcccttttcgtttcatacctttgtagtcatcttacaggtattggttctcaggagctttggatgaagggctcaaagcaaataatagacaaagggcttcctattcattcatacaaacctttctga

SEQ ID NO: 80119 - DNA, 741 bp, Saccharomyces pastorianus
atggaatacatggaaggtggctccttaactgatgtggtcacccattgtattttgacagaaggtcaaattggtgccgtttgtagagaaactttgagtgggttggaatttttacattctaaaggtgttcttcacagagatatcaaatccgataacatcctattgtccatggaaggggatattaagttaacggatttcggtttttgcgctcaaatcaatgaattgaacttgaaaagaactactatggtgggaacgccttattggatggcgcctgaagtggtttctaggaaagaatatggcccaaaagtagatatctggtcgttgggtatcatgatcattgaaatgatcgagggggagcctccatatttaaatgaaacccctctaagagcactgtatttaattgctacaaatggtacacccaagttaaaggaacccgagaatctatcgtcaagcttgaaaaaattccttgattggtgtttatgtgtggagcccgaagatagagcaagcgctacggaattgcttcatgatgaatatatcacagagatagctgaagccaattcctcattggctccgctagtcaagttagcaagattgaagaaagtagctgagaacatggatgctgatgaagataatgacgacgataacgacaacgagcatattaataagacaaacaattgtgacgacaataacgatagcaaagaaaccgtaaatttggacgtaactgaagatgataaacaaaagtaa

SEQ ID NO: 80120 - DNA, 2106 bp, Saccharomyces pastorianus
atgagcaatgatccatctgctgtatcggaactaccagacaaggacagtcttgataacggtatcagcaatgacaatgaaagggccatgggcggcaatggcgatggcggcgatggattacgattaccaaggaccactggaactttgaacgtcaatgccttacaaaaaggcactaatgctgcccatgaagctggtggatacaaatccatggatcctgcgaagaacgcggagacaaccaatgatgatgacaataatgtcgtttcactagatgaccctattcaatttacccgggtatcttcctcctctgtcatcagtggaatgtcttcatccatgagtcctcattctaacatcgatgaaaccaaatctctagaagcagtcactccaaacataaataccagcaatatgaccccggatcattctgctgacaacacattttctaccataaatgcgtccgagtcagatcaccagtttaatgacactttactatcaaaactgtcgttaacagattctacagaaactatagaaaataacgcgacagtgaagcaccagcagccagttgcatcttccacagtaaactcgaataagagctccactgatatacgaagggctacaccagtgtccactcccgttatctctaaaccatcgatgacaaccacgccaagacagatcaattcagcttcccattcgctttcgaaccctaagcataagcaacataaaccaaaagttaaaccgtccaagcctgaagcaaaaagtaaaccggtttctgtgaaaaaaagctttccttcgaaaaatcctttaaaaaactcctctccacctaaaaagcaaacagaaaaatcgtattattcttcctcttcgaaaaaaaggaaaagcggttcaaatagtggtacactaagaatgaaagatgtctttacgtcctttgtacagaatataaagagaaattctcaggatgataaaagggcctcatcgtcgtccaataattcttcctcatcttctataaccaccgctttgaggatatctacgccatacaatgccaagcatatccaccatgtgggcgtggactccaagactggtgagtacacaggtttgccggaggaatgggaaaaattgttgacttctagtggtatttccaaaagagaacaacagcaaaacatgcaagcagtcatggatattgtcaaattctatcaggatgtcacggaaacaaacggtgaagataaaatgttcaagactttcaacacaaccacaggattgccgggaagtcctcaagtttcaacaccgcctgcaaactctttcaataaatttcctccgtcgacaagtgattcgcacaattacggttccagaacaggtacaccaatgtccaatcacgtcatgtctccaaccttaaatacagattctagttcagcaaacgggaaattcctaccaagtagaccggctcctaagcccccatcttctgcgtccacttcagctccaattataaaatcacccgtcatgaattctgccgccaatgtttcgcccttgaagcagactcatgcacctacaactccgaacagaaccagcccaaacaggtcctcaatatcaagaaatgccactttaaaaaaagaggagcagccactaccaccaatacctccaaccaaatccaaaacgtctccaatcatctccacagctcacacaccacagcaagttgctcaatcgccaaaagcgccggcgcaagagacggtaacgacacctacttcgaagccagctcaagcaagaagcttgtctaaagaattaaatgagaaaaagagagaggaaagggaaagacgtaaaaaacaactatatgccaaattgaacgaaatttgctcagacggtgacccaagtacaaaatatgccaatttagtaaaaattggtcaaggtgcatcaggtggtgtttatactgcttatgaaataggtacgaatgtctcagtggccattaagcaaatgaatctcgaaaagcaaccaaaaaaggagctaatcatcaatgaaattctggtcatgaagggtagcaaacaccctaatatagttaatttcattgattcttacgttttaaaaggcgacctttggtcattatggaatacatggaaggtggctccttaa

SEQ ID NO: 80121 - DNA, 231 bp, Saccharomyces pastorianus
atggtccgcaatactctaatgtactcgtctatggattgtgggatctcaccgcgacacaagaaggaccgcaacagctgcggctacttagccttgtgttacggcagtgccttagtctgccatctaaagttgaattctatccagaaccgccttctagtagcgtgcctgcccgactattgcgattctgggaccatattatcagatagctgcattgtgttacatgcgatatcgtag

SEQ ID NO: 80122 - DNA, 453 bp, Saccharomyces pastorianus
atgcagtttgaagagctgttgcaacagctagtagaaagcgattggagcctggatcagtcaagcccaaacgtactggtgatagtccttggagacactgccaggaagtacgtagagttaggaggactgaaggagcacgtgactacgaacactgttgcaggtcacgtggcaagccgcgagcgggtatccgtagtttttttgggccgggtaaagtacttatacatgtacctcacccggatgcaagcgcaggcgaatggtccgcaatactctaatgtactcgtctatggattgtgggatctcaccgcgacacaagaaggaccgcaacagctgcggctacttagccttgtgttacggcagtgccttagtctgccatctaaagttgaattctatccagaaccgccttctagtagcgtgcctgcccgactattgcgattctgggaccatattatcagatag

SEQ ID NO: 80123 - DNA, 144 bp, Saccharomyces pastorianus
atgttatggggtggagctagcatgcttgggctatttgtattcacagaaggatggcctaagtttcaagatacgctatacaaaaagattccgttgttaggacctacattggaagatcatactccaccagaagataaacctaattga

SEQ ID NO: 80124 - DNA, 987 bp, Saccharomyces pastorianus
atgattatagatccagaaaacatatctatcgactctttgaatacccactgttgcgcagttttatcagatattggaaagcccaaagttcaatgcttgaaagaacacttgtctaaaattgctccttggtctgaaataaaagcaagggccaaggcctggactaaagaaaactcacacgatttaatttttgcagacggtgagtccccaacttttatcgtggattgtctagataatctagaatctaaggtagacctattagagtacgcccatcacaataaaatagatgttatttcttccatgggtgttgccacgaaatcagatcctacccgtgtgagtataaatgacatatccatgacagaatttgaccctatatctcgttgtgtaagaagaaaattgaggaagaggggtatcgccacggggatttccgttgtttttagtaatgaaatgctcgatccacgccgagacgacatactctctcctatagattgcgaacatcgtgcaatcaatgctgtcagagatgaggctctcagacatttaccggaattagggaccatgcctggtatttttggtttgagtattgcgacatggattttaaccaaagtgtcaggctatccaatgaaagaaaatgaggtcaaaaataggttaaagttttatgacagcatcctagagactttccaaaagcagatggcgcggttgaatgaaaataaggagcgatcgtcattgcttggattagaagaggtcggttatatagttgaagaaatatttagaggcaagtctcctattagcggatactctacgaaactagctctaacaaaatgggaagctaacaaagaaatctccttaaccaatgttgttctgatgacgaaagaagagcaagaaattcacgaaaaaaggattttgctggatggtgagaaactgacagctgtatactctgaagaagttctcgattttattgagaggctttttaaagaggaggagtactattcttag

SEQ ID NO: 80125 - DNA, 279 bp, Saccharomyces pastorianus
atggcaaataatacgtggaagttaattgctactacagctcttatatcggtgttttcaacccaacttgccaaaagtgtatggaaagaatacaaactttcatgtgcggctaataagaataaaaccgtatcgcgacctcgtcaatatgatgaccacttatttagggaacaattggctcgtaactatgcatttcttggcgaagaaggtatgaggaagatcaaagaacagtatatagttatagtcggagctggagaagtgggatcgtgggtatgcacatgttaa

SEQ ID NO: 80126 - DNA, 642 bp, Saccharomyces pastorianus
atgaaaatgataaagacttcggatggccaaacaaggttcatctcatccgacgaaagtgtttccgaaccagctttacaaaataagaattgtatagaagcgacagtaatgcagtccaaggaacgccttaatgacaagatcataccaaccaaaacagaaaaaaacgattttggaataggcactcaatggtttgaacgcaaacaaatatcaagacctacacaaactacacaatcaagaggacctacagaagtccaaaatttcaaagagtggtcaataatatctcccccaattttgtcaccccaaaatgcatcttctgtaccacaagagtatcaatcatcaagatacacattgcatatggattctccagcattatcctctgcctcatcagcgctatctcccctttcaggcgatccaataacaactacagaaacaaataagtcatacccattggattcagagcaatcgtcgttggagccagacaaaaccgaggaggacgcaatcaatcagtcaaaggaaagcaatatgatttccattaatgagatgttacagaagcaaatggactttgaacttctgggtgagaatcatttgaaggagactcaagattatctggccctttacaaaaaagcttatgggatagaattttaa

SEQ ID NO: 80127 - DNA, 1374 bp, Saccharomyces pastorianus
atgaagccatacgagtttttcgaagaatgtcaaaagaaatacggtgatattttttcattcgttttgttaggaagagtcatgactgtgtatttaggaccaaagggtcacgaatttgtcttcaacgctaagttggcagatgtttcagcagaggctgcttacgctcatttgactactccagttttcggtaaaggtgttatttacgattgtccaaattctagattgatggagcaaaagaagtttgttaagggtgctctaaccaaagaagccttcaagagctacgttccattgattgctgaagaagtgtacaagtacttcagagactccaaaaacttccgtttgaatgaaagaactactggtactattgacgtgatggttactcaacctgaaatgactattttcaccgcttcaagatcattattgggtaaggaaatgagagcaaaattggataccgattttgcttacttgtacagtgatttggataagggtttcactccaatcaacttcgtcttccctaacttaccattggaacactatagaaagagagatcacgctcaaaaggctatctccggtacttacatgtctttgattaaggaaagaagaaagaacaacgacattcaagacagagatttgatcgattccttgatgaagaactctacctacaaggatggtgtgaagatgactgatcaagaaatcgctaacttgttaattggtgtcttaatgggtggtcaacatacttctgctgccacttctgcttggattttgttgcacttggctgaaagaccagatgtccaacaagaattgtacgaagaacaaatgcgtgttttggatggtggtaagaaggaattgacctacgatttattacaagaaatgccattgttgaaccaaactattaaggaaactctaagaatgcaccatccattgcactctttgttccgtaaggttatgaaagatatgcacgttccaaacacttcttatgtcatcccagcaggttatcacgttttggtttctccaggttacacccatttaagagacgaatacttccctaatgctcaccaattcaacattcaccgttggaacaacgattcagcctcctcttattccgtcggtgaagaagtcgattacggtttcggtgccatttctaagggtgtcagctctccatacttacctttcggtggtggtagacacagatgtatcggtgaacactttgcttactgtcagctaggtgttctaatgtccatctttatcagaacattaaaatggcattacccagagggtaagaccgttccacctcctgactttacatctatggttactcttccaaccggtccagccaagatcatctgggaaaagagaaatccagaacaaaagatctaa

SEQ ID NO: 80128 - DNA, 216 bp, Saccharomyces pastorianus
atgtctgctaccaagtcaatcgttggagaggcattggaatacgtaaacattggtttaagtcatttcttggctttaccattggcccaaagaatctctttgatcataataattcctttcatttacaatattgtatggcaattactatattctttgagaaaggaccgtccacctctagtgttttactggattccatgggtcggtagtgctgttgtgtag

SEQ ID NO: 80129 - DNA, 489 bp, Saccharomyces pastorianus
atgatattttttctctccctagtattgaagaacaaatttgagaattcgccaaactttaagaagggttcacatttactaactatttcttttccttcctttttttacacagctgtcgttgtccgtggtcgttacgccggtaagaaggttgttatcgttaaaccacatgatgaaggttccaagtctcacccatttggtcacgctttggttgccggtattgaaagatacccattgaaggtcaccaagaagcacggtgccaagaaggttgctaagagaaccaagatcaagcctttcatcaaggtcgtcaactacaaccatttattgccaaccagatacactttagatgttgaagctttcaaatccgttgtttctactgaaactttcgaacaaccttcccaacgtgaagaagctaagaaagtcgtcaagaaggctttcgaagaaagacaccaagctggtaagaaccaatggttcttctctaagttgagattttaa

SEQ ID NO: 80130 - DNA, 597 bp, Saccharomyces pastorianus
atggaagaaattcctatgaatagtataataaggcaaggtgctttgaaaatcggctgttgtagcggttataccgttgtgccaaagaacgaccccttatctttgttagcattggcacgccagttggatgtagacattttattgtggggtggtactcataacgttgaagcttataccttagagggaaaattttttgttaatccaggtagctgtacgggtgcttttaatacagattggccaattgtctttgatgttgaggatagcgatgaagctgtgacatcagaggtggacaagccgactaaggagaatcagtcggaggatgacgatgccaagggtggatcaacaggaacggaacaacctgggtcttacacgcctaaagaaggcactgctggggaacgtgagaatgagaatgaaagtaacgttaagcctgaaaaccaatttaaggaagacgaggttgatatgtcagattcggatataaatgggtctaattcaccaagtttctgcctcttggatattcaaggcaatacctgcacgttatacatttatttatacgttaatggagaagtgaaggtcgataaagtggtttatgaaaaggaatag

SEQ ID NO: 80131 - DNA, 255 bp, Saccharomyces pastorianus
atgagcaatgtcgatgatttatcacataaaatgtcgaagacagggttaggtaatgaatccactgctacaaattcggcgacaccaacggctgttgttctctacaatttcgctggggaacaaccaggcgacttggctttcaaaaaaggtgatgttattactatcttaaaaaaatcagattctcaaaatgattggtggacaggcaggactaacggaaaagaaggaatattccctgcaaactatgttagagtttcttaa

SEQ ID NO: 80132 - DNA, 747 bp, Saccharomyces pastorianus
atggcaggtgctggtgcaggtggtatggtcggtgttgaattgacagattttgtttttattttaaattcggaagaggcagtgaggtccttttctgaatttggtacaattactttaggtggtaatgtgtcagtttccgcaggtcctcttgggagaagtgcagaagctgcagcttctgcatctacaggtggtgtctcggcagtttttgcctattccaaaagcaaaggtttatttgccggtgtgtctgtggaaggttcagccatcttggagagaagggaagctaatcgaaagttttacggcgataactgtacatcaaagatgattttgtcaggtagagtaaaagtcccaccagcagcagaccccctactccgtatcttggaatcaagagcattcaactttacacgccacgaccatgatgacaacgctagcggtgatgatttttatgatgacggtcaatacagcgacaacacaagccattattacgacgatattccagattcctttgattctactgatggatcctcaacacgtccaaacacaagatcatcaagaagaagaggaatgtcgctggggtcacgcagtcgttatgatgatgattatgatgatgatggttacggacgtggtcgcgggtatggagattttgatagcgaagatgaagattatgattacggaagatctccaaatagaaacagcagccgcaatagaggcccacagatagataggggtactaagccgcgtgcgaatacctga

SEQ ID NO: 80133 - DNA, 1446 bp, Saccharomyces pastorianus
atgttggactactacgatgtttctggctgttacatcttaagacctccttcttatgcgatctgggaaaacatccagaaatggttcgacgacaagatcaaggccattggtgtacagaatgcctatttcccaatgtttgtttcctcacgtgtgttggaaaaggaaaaggaccatgttgaagggtttgctccagaagttgcctgggtcaccagagctggctcctctgaattggaagaaccaatcgccattagaccaacttctgaaactgtcatgtatccttactacgcaaaatgggtccagtcttacagagatttaccattgaaactaaaccaatggaattctgtggttagatgggaattcaagcatcctcagccctttttaagaaccagagaattcttgtggcaagaaggtcatactgctcacttgactgccaaggatgccgaagaggaggttttgcaaatcttagatttctacgctggggtttacgaagagttattagctgttccagtggttaagggtagaaagaccgaaaaggaaaaatttgctggtggtgacttcaccacaacttgtgaaggctatattccacaaaccggtcgtggtattcaaggtgccacctctcaccatttgggccaaaacttttctaagatgttcaatttgtctgtggagaacccactaggttctgatcatccaaagatctttgcctaccaaaattcatggggtttatccactcgtgtcattggtgtcatggttatgatccactctgacaacaagggtttggttatcccaccaagagtgtcccaattccaatccgttgtcattccagtgggtatcacaaagaagacctctgaggaacagcgtaaacacattcatgaaacagccagaagtgtggaatcccgtttgaaaaaggttggcattagagcctttggtgactataacgataattacacaccaggttggaaattttcccaatacgagctaaagggtattccaatccgtattgaattaggtcctaaggatattgaaaaaaaccaagtcgttgtcgttcgtagaaatgactccaagaaatacgttgtttctttcgacgaattggaagcccgtatcccagaaatcttagaagaaatgcaaggagatttgttcaaaaaagccaaggagctgttcgacacccacagagttatcgttaatgaatggagtggttttgttccagcattgaacaagaagaacgttatcttagcaccatggtgtggtgtgatggaatgtgaagaagatatcaaggaatcttctgcaaagaaagacgatggtgaagaattcgaggaagatgacaaggcaccaagtatgggtgccaaatctttatgtatcccattcgaccaacctgtattgaatgaaggtcaaaaatgtatcaagtgtgaacgtattgctgtcaattactgtatgttcggtcgttcttattag

SEQ ID NO: 80134 - DNA, 171 bp, Saccharomyces pastorianus
atgaagaaatctgacatgatgaaatttctaagcaattttgaggatagtcaaaaagtggttgatttctcccaagaggtgtctaaggaaaccgctacagaaggcaagaaacaacagaaaaagcagcaaccttctaaggcaggcactgcagcagcagcagcagcagcagcttag

SEQ ID NO: 80135 - DNA, 339 bp, Saccharomyces pastorianus
atgtatcctacccaaccctacagttttcaaattactaacatcaatttttttgtgaaacgactttcgttttcgtttctatttatttcattacaggttttagttcaagatttgttgcacccaactgctgcttctgaagccagaaagcacaagttaaagactttggttcaaggcccaagatcctacttcttggatgtcaaatgcccaggttgtttgaacatcaccactgttttttctcatgctcaaactgctgtcacttgtgaatcatgctctactgtcttatgtactccaaccggtggtaaggccaaattatctgaaggtacttctttcagaagaaagtaa

SEQ ID NO: 80136 - DNA, 177 bp, Saccharomyces pastorianus
tgtcaaaattctgtaaagtttctggaccttttggatctaaatggtgtggaaaattatgacgtccacgtctttcctgactcagatcatagtataagataccataatgcgaatgtaatcgtttttgacaagctattggattgggcaaagcgtgctttcgatgggcaatttgtcaaatga

SEQ ID NO: 80137 - DNA, 831 bp, Saccharomyces pastorianus
atgcctgcaggtcgaattgctcctacagaactgtatgccacaagaagagaagttgaactatccaacgtaaagaaattacaggctctacctggtgatttatatgagtttaaagctgtagataacgcgcccgagagataccaagcgatactagattcttcattaatggtggaaaaagttgtcgcattgaaggaagatgcacaggtaatgatgttgaaaaataagcctgatgtagaattagttaatggatcattgggaaaagttttgttttttgttacagaatcgctggtggtgaaaatgaaggaaatttacaagattgtggatgacgaagttgtcatggacatgagattagtgagtcggatcattggtaatcccttgttaaaggaatcaaaggagtttcgtcaagatttgaatgccaggccattagctagattggaacgtttgaaaatcttgataaactatgcagttaagatctctccgcataaggaaaaattcccctatgtgaggtggacagtgggtaaaaacaagtacatacatgagctcatggtcccagagcgctttcccattgatattcccagagaaaatgtcgggttagaaagaactcagattccattaatgctatgctgggcattgtccattcataaggcacagggtcaaactattcaaagactaaaggtcgacttgaggagaattttcgaagccggccaagtttatgttgcactgtcaagagcggtaactatggacaccttacagttcctaaactttgatccaggaaagattcgcaccaatgaaagagtaaaagatttctataaacgtttagaaactttgaaatga

SEQ ID NO: 80138 - DNA, 1890 bp, Saccharomyces pastorianus
atgttcaggtcgcatgcctccggtaacaagaagcaatggtctaaaagatcctcaaatggtagcacacctgctgcttcggcatctggctctcacgcatacaggcaacaaacgttgtcttcgttctttatgggttccggcaaaaaatctgctgctgcttcaaaaaacagcacgacaataattgatttggaaagcggtgacgaaggtaaccgtaatataacagcacctcctaggccaagattaatacggaataattcgtcttccttattctcgcagagtcaaggttcgtttggagatgatgatcccgacgcagaattcaaaaaattggtagatgtgccgagactcaatagctataaaaagtctagcagatcgctgtcgatgaccagctctcttcataagactgcctctgcgtccacgactcagaaaacataccattttgatgaggatgagactttgcgagaggttactagcgtgaaatccaattctagacaattatcgttcactagtacaattaatattgaagattctagcatgaaactttctactgattcagaaagaccagccaagaggtctaaaccttctatggagtttcaaggtttaaagctcacagtaccaaagaaaataaaaccactgctaagaaagacagtatcaaatatggactcaatgaaccaccgaagcgcgtcttcgccagtggtacttacaatggagcaagagagagtggttaatttaatcgtcaaaaaaagaacaaatgtcttttacaccggtagtgcgggtacaggtaagtcggtcattttgcaaacgatcataagacaattgagctctttgtatgggaaagaatcaattgcaattaccgcctcaactgggctagcggcagtgactattggtggttccacattgcataagtggtctggtataggaatcgggaacaaaactatcgaccaattggtgaaaaaaatacaatcacaaaaggacttattggccgcatggaggtatacaaaagttttgataattgatgaaatttctatggtcgatggtaatctgttggataaattagagcaaatcgcaaggagaattcggaagaacgacgatccctttggtggtattcaattggtcctgacaggcgatttttttcaactaccaccagttgctaagaaggacgagcataacgttgtgaaattttgttttgaaagtgaaatgtggaaacggtgcattaaaaaaacgattttactgacaaaggttttcagacaacaggataacaaactaattgatattctaaatgccataagatacggagagctgactgtcgacattgctaaaacaataaggaacctaaatagggatatagactatgccgatggaattgctcctacagaactgtatgccacaagaagagaagttgaactatccaatgtaaagaaattacagtctctacctggggatttatatgagtttaaagctgtagataacgcgcccgagagataccaagcgatactagattcttcattaatggtggaaaaagttgtcgcattgaaggaagatgcacaggtaatgatgttgaaaaataagcctgatgtagaattagttaatggatcattgggaaaagttttgttttttgttacagaatcgctggtggtgaaaatgaaggaaatttacaagattgtggatgacgaagttgtcatggacatgagattagtaagtcgagtcattggtaatcccttgttacaggaatcaaaggagtttcgtcaagatttgaatgccaggccattagctagattggaacgtttgaaaatcttgataaactacgcagttaagatctctccgcataaggaaaaattcccctatgtgaggtggacagtgggtaaaaacaagtacctacatgagctcctggtccca

SEQ ID NO: 80139 - DNA, 141 bp, Saccharomyces pastorianus
atgcctacgtggtcaagggagacaaaaaataggtgggtacatcaacctagccgcattctactgtctaggtgtgcccatggcatatgtgttagcattcctgtatcatctgggtgtaggcggcttatggttgggtataactag

SEQ ID NO: 80140 - DNA, 561 bp, Saccharomyces pastorianus
atgaagaagaagggcgctgagcttcctgcactagaggtattgaatgatgagttacatcaagattacaaggcaaaaatgcataaaatcatagaagaggaggccggagacccgatgagtatattgagaggaaggaatgacgatggcgatgataataatgatcccgacgatggaacactaccaccattgctccctatcgagaacaaaatctccggagccaagatagaggagattgataagaacgagattgctcacagaaacctgaaacaggcatctgcacctgcacctgcacctgcaccgcacgagcagcaggaggacgtgccggaatacgaggtaaagatgaagaggttcaaaggggccgcctacaagctgcgaattcttattgagaacaaagctccgaactcgaagccggaccagttctctccgagctacaacttcgcagagaatattatatacattaacggtaagctgagcatacccttgccgcgcgacatagtcgtgaatgcagcagatatcaagattttccatatccgcaaagaacgcacactatatatatatatataa

SEQ ID NO: 80141 - DNA, 1020 bp, Saccharomyces pastorianus
atggccgatttcttattgagaccaattaagcaacgtcatagaaacgaggacaagtacgtgtcggtggacgctgcagacggatcggtgtctaaaattgagcccatcgcagattttgtaattaagacaaaactattatccgctaatgggccggaaaaactgcaagatggcaggaaggtgttcatcaatgtttgtcattctccgttagtgcccaaacctgaggtcgattttaatgcaaggatagtgttcccgctcatcatccaaaacgaatgggagattcctattattacatcctgctaccgcatggaccatgacaagaaggggcaggagtgctatgtgtgggattgctgcataaatagcgattgctcgcgctggatatgcgaggatatccaactgcgagagatactggtcgaatggtgcttggagtcatgtgagatccgagattcggtggtattgtgcagagatcgcattgcattccccaagatgaagaagaagggcgctgagcttcctgcactagaggtattgaatgatgagttacatcaagattacaaggcaaaaatgcataaaatcatagaagaggaggccggagacccgatgagtatattgagaggaaggaatgacgatggcgatgataataatgatcccgacgatggaacactaccaccattgttccctatcgagaacaaaatctccggagccaagatagaggagattgataagaacgagattgctcacagaaacctgaaacaggcacctgcacctgcacctgcaccgcacgagcagcaggaggacgtgccggaatacgaggtaaagatgaagaggttcaaaggggccgcctacaagctgcgaattcttattgagaacaaagctccgaactcgaagccggaccggttctctccgagctacaacttcgcagagaatattttatacattaacggtaagctgagcatacccttgccgcgcgacatagtcgtgaatgcagcagatatcaggatttccatatccgcaaagaacgccactata

SEQ ID NO: 80142 - DNA, 177 bp, Saccharomyces pastorianus
atgcaaaggtttccgcagccattatatgttgaaactaaaaccggttgcagtcaggaccgtttcttgaaaagcaaaattattcccttggacatcactgacaaggaaactcttggtacagaggatatgacattcaatgaatatttcaacttgttcaccgatctaggtggaagcaaataa

SEQ ID NO: 80143 - DNA, 81 bp, Saccharomyces pastorianus
atacttcaagatgatataaccaccatttgtgtagatggtggctcgtacttagtattaagaaggggtatacttttggaataa

SEQ ID NO: 80144 - DNA, 1833 bp, Saccharomyces pastorianus
atgacccaaaatctaaaatgcaccaaatgtggcgcctattattcgatggcttgttccctacgagaacagaatgtttggacttgtctattctgcaaccaatcaaactcaaatgctgaattgccactggtaccttccaacatctatacattgacttctgcaaagaaagaaatactttcaagacggaccattatgattatagacgctatttgcgatcctcatgagctaaattatttagtttccattctatgtaataattacatcacaagacaacaagagccactatcaataattactattcagcaatcaggtcatgtgattttacacaatgctgtgaatcacaaacgtgatgctgtgttttcaataaatgaatttatgaccaaatataatcttgataaattaaatgccagttacttcgagaaaaaaatttcagaaatcaatcaagaatcatactggtttgataaatctactcagggttctttaagaaaattgctacgggaaatatgcaagattgcaaacaaagcgaatatcagttctaaaagggacaagcgttgcaccggattagcgttgttcgtttcatccgtactggcgtctcagtgcagtttgtcagcctactgtcatatagtttcattcttgaatggtccatgtactaagggtggcggcaaagttatgtcaagagaacgtggtgaaagcatgagacaaaaccaccattttgaatccaaaagttcacaattgcaactatcaaaaagttcgacaaaattttacaagaaaatgcttgaaaaatttgcaaaccaatcgttaatctatgagttctttatagcttcattggatcaaatcggtatactcgaaatgagtccattaataacctcgtcaatggcagtttctcagtttgattcattcaatgatgagagattcgcaatgtcttttcaaaagtacctgaacttgcgtgaccataatgccatttacaattgtcattcaaagataatgaccgcaaagaacgctattgtcgttaaggacttcccaaaatatagcttaaaccctaaaaacctttctctaccattagaaatctcactaggtcacaattcagctgaagctcctatacagtttcaaaccacttttgaaaatcgaacggaaaaatacataagaattgaaaccttcttattgccaaaagccaatagatcatttggggcacaaaatgaaattgtgttttcaatgaaaaagatagcctcacgaattatcgatagctttgcttactcatccaagcacactaaagaattgatgaagcaattgtttctactaccaaatcaaatccggggaaaagacgtagatatggtcaatctgatacagtggtgttatcatatatataggtctccaattctatcggttcggaatacttcacctgatgaaaggtacctttttcttcaccgaataataaacgcttctaaagacacatgcctttcattatgcaaacctttcatctggagttacagtgatttgaaacacgactggatcgtattggatgtcccattaacaagagcccagatacttcaagatgataaaaccaccatttgtgtagatggtggctcgtacttagttttaagaaggggaaaacttttggaaaaagaaggtcgcgagctctgttgcaagcttttaaatgacatgcaaaggtttccgcagccattatatgttgaaactaaaaccggttgcagtcaggaccgtttcttgaaaagcaaaattattcccttggacatcactgacaaggaaactcttggtacagaggatatgacattcaatgaatatttcaacttgttcaccgatctaagtagaagcaaataa

SEQ ID NO: 80145 - DNA, 177 bp, Saccharomyces pastorianus
atgtgttctccgactaatttcttgtatgagcccttttccagcgatgctgtgacgcagaactatgacccaaaatctaaaatgcaccaaatgtggcgcctattattcgatggcttgttccctacgagaacagaatgtttggacttgtctattctgcaaccaatcaaactcaaatgctga

SEQ ID NO: 80146 - DNA, 177 bp, Saccharomyces pastorianus
atgataagtgtactggtgccgttgtttctcagcaatggtttggtaggcgcaagaatgagtggtaccgacgataaggctggtggtccaaacattttaagcagatttgtcagtattagaaacacaaaggagaacttctacgagttgactgatttcaaatatccatcgaattatgaataa

SEQ ID NO: 80147 - DNA, 618 bp, Saccharomyces pastorianus
atgtttggcatattgcagtcacagaatgttgtcccaatgaacacatccgcaagtccaatttctggtgggaatttgcggggatttatgggtcctgtcatccatgaacaaagtttcgacaaattagttaaagtaattgaagatgcaaagaaagaccccgagttggaaattctttacggtggacaatacgataaaagccaaggttggtttgtcggacccacagtcataaaagccaagagaccagatcatccatatatgtcaacagaattttttggccctatattaactgtttacgagtatccagatactgaatttaatgaaatctgtgatattatcgataatacgagtcaatacgccttaactggtgctatttttgccaaagatcgtaaagcaattgaatacgcagatgagaagttgaagtttagcgcaggaaatttctacataaatgataagtgtactggtgctgttgtttctcagcaatggtttggtggcgcaagaatgagtggtaccgacgataaggctggtggtccaaacattttaagcagatttgtcagtattagaaacacaaaggagaacttctacgagttgactgatttcaaatatccatcgaattatgaataa

SEQ ID NO: 80148 - DNA, 1083 bp, Saccharomyces pastorianus
atgctatcagcaaggtgcctcaaatctatatacttcaagagatctttctcacaactcggacacatcaagccccccaagcacataagaaatgaacctgttaagccatttagaaacacagacttaaaagactgggacttactgagggcttccttgatgaaattcaaaagttcttctttagaagtgccactggtcatcaatggggaaaggatatatgacaataatgaaagagcgcttttcccacagactaaccctgcgaaccatcaacaagtcctggcaaacgtcacacaagccacggaaaaagatgtcatgaatgctgtaaaggccgccaaggatgccaaaaaggattggtacaaccttccgttttatgacagatctgcgatttttttgaaagccgctgacttaatttccaccaagtatcgttatgacatgttagctgctacaatgctgggccagggaaaaaatgtgtatcaggcagaaatcgactgtatcacggaattatctgacttttttagatactatgtcaagtatgcatcagacttgtatgctcaacaacccgtagagtcagcggatggtacttggaataaagctgaatacagacctttagagggatttgtgtatgctgtttcaccattcaactttactgctattgctgcaaacttgattggggctccagctttgatgggtaatacagttgtctggaaaccttcacaaaccgctgccctttcaaattacttattgatgactgttttggaagaagcgggattgccaaagggtgtcataaatttcattccaggtgatccagttcaagttactgaccaggtattagctgataaagattttggtgccttgcattttaccggttctacaaatgtctttaagagtttgtatggcaaaatacaaagtggcgttgttgaagggaagtacagagattacccccgtatcattggtgagacaggtggtaaaaatttccatctagttcacccaagtgcaaatatatcacatgcagtactctctactattagaggcactttcgagttccaaggccaaaagtgctctgccgcttcgaggtttatcttccagagt

SEQ ID NO: 80149 - DNA, 594 bp, Saccharomyces pastorianus
atgcaggaaaagggtgagaaaaaggagcttttcaaacatgtcagccaccgtatcaaagagacagactttttggtgcaagggatgggcaagaacgttttccaaaaatgctgtgaattctatcgcttggctggaacaagctcttgcatagagggcgaagacggttcggagaccaaagaggaaagaacacagatcctacagaagagcggactcaaattctacacgaaaacgttcccttacaacaccacgcatataatggattcaaaaaaactggtggagttggctatacatgagaaatgcatcggagaattgttgaagaacaccacagtgatcgagtttcccacgatattcgttgccatgacagaggctgacctaccagagggctacgaggtgctacaccaggaaccccgcccacttgagcatacgagtacactgaacaagtttattgacaatgcaagggaggaggaagacgctgaagaggactctcaaccgacagaagaacctgtacagaaggaaacacaggacgccagcgacagcgacagcgacagcgacgatgactacaatccgggcttatccatggatttcctcactgcatga

SEQ ID NO: 80150 - DNA, 495 bp, Saccharomyces pastorianus
atggcggtgttgtgtggtgtatgcggaataaaagagttcaaatacaagtgtccaagatgtttggtgcaaacttgctctttggagtgttccaagaagcacaagacaagggacaattgctcaggtcaaacacatgatcctaaggagtatatatcgagtgaggcgttgaaacaggcggacgacgacaagcacgaacgaaatgcttatgtccagagggactacaactatctgacgcagttgaagcgaatggtgcatgtacaaaagatggatgctagaatgaagaacaagcgggttctggggcctgtgggcggccacaactctaatttcaagaagagaagatacgatatagatgaggatgatcgtgatagcacggagtgtcagaggataattaggaggggggtgaactgtttgatgctacccaaggggatgcagcgatcatcgcaaaacaggagcaagtgggacaaaacgatggacctatttgtatggagcgtggagtag

SEQ ID NO: 80151 - DNA, 465 bp, Saccharomyces pastorianus
atgtactcgataacgttccaccaccatggccggcagaccgtgctaatcaaggacaactcagcgatggtgacgactgccgcagcggcggatatccctccggcgctggtgttcaatggctcatctacgggcgttcctgagtccatagacactattttgtcgtccaagctgtccaacatctggatgcagaggcagctcatcaagggtgatgccggtgagacgttgatcttggacgggctcaccgtgcgactcgtcaacctcttctcctccactgggttcaagggtctcctgatagaactgcaggcggacgaagcgggcgagtttgagaccaagattgcaggcatcgaaggacacctagctgaaatccgggccaaggagtacaaaacctcatccgactcgttggggccggacaccagcaacgaaatatgtgatttggcgtaccagtatgttcgtgccctggagctgtga

SEQ ID NO: 80152 - DNA, 594 bp, Saccharomyces pastorianus
atgcaatcgattgcggtagaaatgtttgaggaatacgccaatgggaacaaacaggccatacctgcactgttcaaggcagttgttttcaacaccgttgccagacttggcggagaaaacaattacgaaaagattttcaacatctatcaaaaccctgtttcgtcagaagaaaagattatcgctttgagagctttgggcagatttgaagacaaagaacttttagaaaggacattgtcttatctgctagatggtacagttttgaatcaagatttttacatcccaatgcaaggcattagagttcataagaagggcattgaaatgttatgggcctggatgcaagaacactgggacgaaattgctaagagattacagccaggctcgcctgtgttgggtggcgtgttgacattgggtttaactaattttacctcttttgaagcccttgaaaaaattagtgcgttctatagtagaaaggtcactaaaggttttgatcaaaccctggctcaagccttagacactattagatccaaggcgcaatgggtgagcagagatcgtgaaatcgttgctacctacttgcgtgagcatgagtatgatcaatag

SEQ ID NO: 80153 - DNA, 1647 bp, Saccharomyces pastorianus
atgtcccgtgaagtactgccaaacaacgttaccccattgcattatgacattacactagaacctaatttccgtgcttttacgtttgaagggtcattaaaaattgacctgcagattaatgatcattcgataaactctgtgcaaataaattacttagaaatagatttccattctgcacgtattgagggtgtcaatgccattgaagttaacaaaaacgaaaaccaacaaaaagctactcttgtctttcctaatggaacttttgaaaacctaggaccttctgcgaagttagaaattatcttttccggtattctaaatgatcagatggcgggattttacagggctaagtatacggataaagtcacaggggagacgaagtacatggctactactcagatggaagccacagatgctagaagagcctttccttgttttgacgaaccaaatttgaaggcgacttttgcagtaactttggtctctgaatcgtttctgactcatttgtccaacatggatgtcaggactgaaacaatcaaagagggtaagaaatatacaacttttaacacgactccaaagatgtctacgtacttagtagcatttattgtagctgacctgagatacgtggaaagcaataatttccgtattccagtaagagtttattctaccccaggggacgaaaaatttggtcagtttgcagccaatttagctgctaggaccttgagattctttgaggacaccttcaacatagaatatccattgccaaagatggatatggtggcagttcatgagttttctgctggtgctatggaaaactgggggctagtgacttatagagttattgatttgttattagacatagaaaattcgagtttagatcgcattcaaagagttgctgaggttattcagcatgaactagcccaccaatggttcggcaacttggtcaccatggattggtgggaaggcttatggttgaatgaaggttttgccacttggatgtcttggtactcttgcaacaagtttcaaccagaatggaaagtttgggagcaatatgttactgacaatttacaacgtgctctaaatttagattcattgagatcttcccatccaattgaagttcccgttaataatgcggacgaaatcaatcaaatttttgatgctatttcttattctaaaggatcttctttattgaggatgatttccaaatggttgggtgaagagacttttattaaaggtgtgtcccaatacctgaataaattcaaatacggtaatgcaaagaccggagatttgtgggacgccttagcagatgcctctggcaaggacgtttgttcggtgatgaacatctggacaaaacgtgttggttttccagtgttatctgtcaaggaacacaagaacaaaatcacattaactcaacaccgttatttaagtaccggtgatgttaaagaagaggaagatacaaccatataccccattttgttagctttgaaagacagtacaggtatcgataacacattggtattgaacgaaaaatctgctactttcgaactaaagaatgaagagttcttcaagattaatggtgaccaatcaggtattttcattacctcttattctgacgaaagatgggctaagctatccaaacaggcaatttattatccgtag

SEQ ID NO: 80154 - DNA, 99 bp, Saccharomyces pastorianus
  modified_base (25)..(25): a, c, g, t, unknown, or other
gcggccgcattaacctcactaaagngaccacgcgcatgggtgagcagagatcgtgaaatcgttgctacctacttgcgtgagcatgagtatgatcaatag

SEQ ID NO: 80155 - DNA, 2652 bp, Saccharomyces pastorianus
atgatggacatgcaagtgagaaaagtgaggaagccgcctgcttgcacccaatgcaggaagagaaagatcgggtgcgacagggcaaaaccgatatgtgggaattgcgtcaagtataacaagccggactgtttttatccagatggacctggtaagatggtcgctgtgccctctgcgtccgggatgtccacgcacggcaatggccaaggttccaaccattttagtcagggaaatggtgtaaatcagaaaaacgtaatgattcaaacgcagtatccgattatgcaaacgtcgatagaggcatccaacttctctttcaacccctctgtggataccgcgatgcagtggaccaaggccgctagctaccagaataataacaccaataataatactgctcctcgtcagaatagtagtaccgttagtagtaatgttcatggaaacactattgtgagaagcgatagtccagatgtgccctccatggatcagattagagaatataacacacgattacaactggttaacgctcaaagttttgactatacagataacccatactcttttaatgttggtatcaatcaagactcggccgttttcgatctaatgacttctccgtttactcaagaggaagtattaatcaaggagatagactttttaaaaaacaaattgcttgatttacaaagcttgcaactgaaaagtttgaaagaaaaatcgaatttaaatgccgacaataccacggcaaacaaaattaacaaaacaggtgagaattctaagaaaggcaaggttgacggtaaaaaagccggatttgatcatcagacttcaaggacttctcagtcctcacaaaaatactttacagcgctcacaataacagatgtgcaaagtttagtccaagtgaaaccgttgaaggatacccccaactaccttttcactaaaaacttcatcatttttagagatcattatcttttcaagttctataatattttgcacgatatctgccatattaatcagttcaaagtaagtcctcctaacgataaaaatcaccaacaatatatggaagtttgcaaagttaacttcccaccaaaagcaataattattgagacactaaactctgaatcccttaacaatctgaatattgaggaatttttgccaatctttgacaaaaccctcttactagaatttgttcataactcttttccaaatagtgatacctgtccttcattctcaacggtcgatcttcctttatctcaactgaccaaactaggcgaattaactgtgcttctgctgttgttaaacgattcaatgaccctattcaataagcaggctattaataaccatgtttcggcattaatgaataatttgaggttgattcgaagccaaatcacattgataaacctggaatattatgaccaagagacaatcaaatttattgccatcacaaaattttatgaatctctgtacatgcatgatgatcataaatcaagtttagacgaagatttgagctgtctcttaagcttccagataaaagatttcaagttattccattttttgaaaaaaatgtattactcaagacattcgcttctaggtcagtcttcattcatggtacccgctactgaaaacctatctccgatacctgcctctattgatacgaacgacattcctttaattgctaacgatttaaaattactggaaacgcaagcaaaattgataaatattctgcaatatgttcctttctacttgccagtaaatttaaccaaaattgaaagtctgttagaaaccttgactatgggcgtgagtaatacagtagacttatattttcatgacaacgaagtcagaaaagaatggaaagacactttaaattttatcaataccattgtttatacaaattttttcctttttattcaaaacgaatcctctttgtccatggcagttcagcattcttctaacaacaataagacctcgaactctgaaagatgtgcaaaggatctgatgaaaattatttctaatatgcacattttttactcagtaacatttaattttatcttccccataaagtcgataaagtcattttcaagcggcaataatcgctttcattctaatggtaaagaatttttattcgcaaatcattttattgaaatcttacagaattttatagcaatcacatttgctattttccaacgttgtgaagtaatattatatgacgaattttacaaaaatctttcaaatgaggagattaatgttcaattgctattgattcatgacaagattttggaaattttaaaaaaaatagaaattatcgtatcctttttacgggatgaaatgaataacaacggaaatttcaaatctattaaaggtttcaacaaggttttgaatctgattaaatatatgctgagatttagcaagaaaaaacaaaattttgcgagaaactctgataataataatgttacagattatagtcagtcggcgaagaacaaaaatgttctcttgaaattccccgttagtgaactgaacagaatctatttaaaatttaaggagatttcagattttttaatggaaagagaagttttccaaaggagtataattattgacaaggatttggaatctgataatctgggtattactacggcaaacttcaacgatttctatgatgcattttataattag

SEQ ID NO: 80156 - DNA, 513 bp, Saccharomyces pastorianus
atgttagatattgtagaagaggctgccattatggccttaaataaagttgaacattttttgcagaatacacccaatgtatttgaatcaattaatgacgctgtcgattggcacgttcaacacgcgttatcgagattgaggtcaagcgccgaaattgctataccagctttatttgctccgctcaagtcagggaaagttgtcaggataacaaaccttaagacctttagccctttctgggacacatggtttaccgatctgtcgcactcctttgttggcttacctgttagtaaattattaatattggcgggaaacgaaaatctcgataaagaattaattgtggggcaaatgcaaggtaaatatcagttggtagttttccaagattccgggcatttcattcaagaagattcgcctataaaaacagcaatcactttaattgatttctggaagcggaacgattctaggaatgtagtaatcaagactaattggggtcaacacaaaaccgtgcaaaatacataa

SEQ ID NO: 80157 - DNA, 420 bp, Saccharomyces pastorianus
atgaaacgaatgtatgaagagtacgagagaaaactaaaggatgaggaagaaaggaaagcggaagaagaattggaaaggcaatttcagaaaatgatgcaagaatccatagacgcaaggaaaagcgaaaaggttgttgccagtaaaattccagtaatttcgaagccagtcagcgttcaaaaacctttattattaaaaaagagtgaagaaccttcttcaagcaaggagacctacgaagagttatccaagccaaagaagattgcatttacgttcttgactaaaagcggtaagaagacacaatcaagaattttacaattaccaacggatgtgaaatttgtctctgatgtccttgaagaagaagagaaactaaaaaccgagcgaaacaagattaaaaagatcgttttaaaacgttctttcgactga

SEQ ID NO: 80158 - DNA, 1266 bp, Saccharomyces pastorianus
atgatcacgaatcagatattgccacccaaccaacgattatgggaaaatgaagatacaaggaaattttatgaaatcttaccagatatctcaaaaacagtagaagaatcacaatcttctaaaacagaaaaagattcaaacgttaactcaaaaaatatcaatctattctttacggatttggaaatggcagattgtaaagatataatcgatgacctttcaaatagatattggtcatcatatttggacaacaaagccacaagaaatcgaatattgaaatttttcatggaaacacaagattggagcaaactgccagtgtattccagatttattgcaacaaatagcaaatatatgccggaaattgtttctgagtttattaactacctagacaatggcttcaggagtcaattacattctaataagattaacgttaaaaacatcatcttcttcagtgaaatgattaaatttcaattaataccatcgtttatgatttttcataagattagaacattaatcatgtatatgcaagttccaaataacgtagaaattttgacggttttgttggagcactcagggaaatttctgctaaataagccagaatataaggaattaatggaaaaaatggtccaactaatcaaggataaaaaaaatgataggcaattgaacatgaacatgaaaggcgccttagaaaacataattactttactttatcccccttctgtaaaatcattaaatgttacggtaaaaacaataacgcctgaacaacagttttatcgcatattaattagaagtgaactaagtagcctagacttcaaacacattgtcaagttggttcggaaagctcactgggacgatgtagctattcagaaagtgctgttttctctgttttcaaaaccacataagattagctatcaaaatattcccttattaactaaagttctaggcggtctatacagttaccgccgcgatttcgtcatcagatgtatagaccaagtactggaaaacattgagcgaggcttagaaattaacgattatggacaaaacatgcatagaatatcaaatgtcagatacttaactgaaatattcaactttgaaatgataaaatccgatgttttgttagatactatctaccacattattcggtttggtcatatcaacaatcaacccaatccattttatttaaacgactcagatccaccggataattatttcaggattcaactagtcactacaattctgttaaatatcaacaggaccccgaagctttactaa

SEQ ID NO: 80159 - DNA, 2664 bp, Saccharomyces pastorianus
atgagaactataatgtatactataaacatgttgaatggtgaaattatatcagcgttcggacctggttcaaaaaacgggtatttcgggagccagagtgtggattgctcacctgaggagaagataaaacttcaggaatgtgaaaatatgattgtaataggcaaaactatttttgagctgggaattcactcttatgatggagcaagctacaatgtcacttactctacatggcagcaaaatgttttagatgttcccctagcgcttcagaatacattttcaaaggacggcatgtgcatagcgcctttccgtgataaatcattgctagcaagcgatttagattttagaattgctagatgggtttctccgacattccccggaattattgttgggcttttcgatgtgtttaatgatctccgcaccaatgaaaatatactggtaccgcatccctttaatcctggtgatcatgaaagtatatcgagtaacaaagtttacttggatcagacttcgaacctctcctggtttgcattatctagtcagaattttccatctttagtcgaatcagctcccgtatcaagatacgcttccagtgaccgttggagggtgtcttcaatttttgaagatgagactttattcaagaacgcaatcatgggtgttcatcagatatataataatgaatatgatcacctttatgaaaactatgaaaaaacgaatagtttggacactacgcacaaatatccacctctgatgattgattcgtccgttgatacaaccgatttacatcagaataacgagatgaattcactaaaggaatacatgtcaccagaagaccttgaggcatatagaaaaaagatacacgagcaaatatcgagagaattagatgaaaagaaccaaaattctttgctactgaagtttggaagtctagtatatcgaattatagagactggagtatttctgttgttatttctcattttttgtgcaatactacaaagattcaaaattttgccgccactatatgtattattatccaaaattggatttatgcctgaaaaggaaatccccatagttgagtcgaaatcgctaaattgtccctcttcatcggaaaatgtaaccaagccattcgatatgaaatcagggaagcaagttgtttttgaaggtgctgtgaacgatggaagtctaaaatctgaaaaagataacgatgatgctgatgaagatgatgaaaaatcactagatttaaccacagaaaagaagaagaggaaaagaggttcgagaggaggcaaaaagggccgaaaatcacgcattgcaaatataccaaactttgagcaatctttaaaaaatttggtagtatccgaaaaaattttaggttacggttcatcaggaacagtagtttttcagggaagttttcaaggaagacctgttgcggtaaagagaatgttaattgatttttgtgacatagctttaatggaaataaaacttttgactgaaagcgatgatcaccctaacgtcatacgatactactgttcagaaacaacagacagatttttgtatattgctttagagctctgcaatttgaaccttcaagatttggtggagtctaagaatgtatcagatgaaaacctgaaattacagaaagagtataatccaatttcgttattgagacaaatagcgtccggggtagcacatttacattctttaaagattatccatcgagatttaaagcctcaaaatattctcgtttctacttcgagtaggtttactgccgatcagcaaacaggagcagaaaatcttcgaattttgatatcagactttggtctttgcaaaaaactagactctggtcagtcttcatttagaacaaatttgaataacccttctggcacaagtggttggagggccccagagctgcttgaagaatcaaacaatttgcagtgccaagtcgaaacggaacactcttctagtaggcatacagtagtttcatctgattctttttatgatccgttcaccaagaggaggctaacaagatctattgatattttttctatgggatgtgtattctattatatcctatccaaagggaagcatccatttggagataaatattcacgtgaaagcaatatcataagaggaatattcagtcttgatgaaatgaaatgtctacatgatagatccttaattgcagaagctacagatctgatctcccaaatgattgatcacgatccgttaaaaagacctactgctatgaaagttctaaggcatccgttgttttggccaaagtcgaaaaaattggagttccttttaaaagttagtgataggcttgaaattgaaaacagagaccctccaagtgccctgttaatgaaattcgacgccggttctgactttgtaatacccagtggagattggactgtcaagtttgataaaacattcatggacaaccttgaaaggtacagaaaataccattcatcaaagttaatggatctattaagagcacttaggaataaatatcatcattttatggatttacctgaagatatagcagaactaatggggccggtacccgatggattttacgattacttcaccaagcgttttccaaacctattaataggtgtttatatgattgtcaaggaaaatttaagtgacgatcaaattttacgtgaatttttgtattcataa

SEQ ID NO: 80160 - DNA, 405 bp, Saccharomyces pastorianus
atgcgtctacttcgaagaaacatgttagtattgacactgctcgtttgtgtgttttcatccatcatttcatgctcaatcccattgtcgtctcgcacctcaaggcggcagatagtggaagatgaagttgcctccactaaaaagctcaatttcaactatggtgtggataaaaatatagactcgcccattcctgctccaagaaccactgaaggtttaccaaatatgaaactcagctcatatccaactcctaacttattgaatactgctgataatcgacgtgctaacaaaaaaggacgtagggctgccaattctataagtgtaccctatttggagaatcgttccttgaacgaactgagtttatcagatatactaatcgcagccgacgttgagggtggattcatgctgtag

SEQ ID NO: 80161 - DNA, 1905 bp, Saccharomyces pastorianus
atgacatcaagcgtcagcataggaaagccggaagatttacccatgcctctacaaacagacaccccttatggaacaggaattccaccactaggtccaaaaattcactcacccacagaaacagtatacaaaccagcgcccaatgaaaaattagttaacgaatcaacaatacacgcttcgttagggcgggttgtcaatatattattcgggaaagatgtcagttatattatggccattttaaaagcgcaaaagaatagtgatatttcgccaatccctgttctcgttgattcacccacggtttctgaaggtaaaaggagagattattcctacgtaaaaacaacaccaggtgccattggacccggtaaaactaaatgcatgataactgaaaccattcaacactttaacttagaggagtatgttcaagtcttgcaaacaacaaaaactccggatgttccttctggaaattcattttatgtgagaacagtttatcttttatcatgggcaaacaacaatgaaacaaaactaaaagtgtatgtctctgttgaatggacaggtaaaagcttgatcaaaagtcctattgaaaagggtacatttgatggtgtaacggatgcaacaaagatattggtggaggagcttggtaatattttaacaagatctgctaccaaaaggaaaaggtcttcgaaggagaacactgttacagtatcaactttaccgaaaatggaacctagctcacatgcacctaccgagcctgatattcaaaaggataaggatgactctattataagggaaaatgagaatataccagctccattagggaccgtggtccaattgctatttggatcgaatacagagtatatgcagaaagttatcactagagataagaataatgtcaatgtggaaacgataccaaaattcacgccttcgttggttgaaggaggttcaagacactatgagtacacgaagaaattgaacaattctatcggacctaagcaaacaaaatgtttactaaccgagtctattgaacacatggatatcaataactatgttttggtgacacaaacaactaaaactccagacgtcccctctggtagcaattttgcagtagaaagtaaaatctttctattctgggggcagcatgacaccacgaatatgaccgttataacaaaaatcaactggacaagtaaatcatttttgaaaggtgcaattgagaaaggatctgttgagggtcagaaggtttctgtcgattacatgctatccgagttaagagacattattagcagggcaaaaagcaaaaaaccggtgaagaaagtaatgaagagtcatgataaacataggcctttccatagtaaggttgaacagaaaagttccgaaagccgtaagagcgatgataataaagacattttaactcatattttggatttcgttcagaataattttagttcagaaatttttatgaacaaattgctgagtcctcaaaaactattcttgattttggggttgatcattatgcttttctggtctcctcggcttcacgtgtttcaagaaaaaaataatcttcaaatcatcaagccaggaaggctgctgattgatggtcaagaatataattacgtgcccagtttcggcacactgtataactcatatgaaaacgccatatcatctgagaagaagagagaaaatgtaaattacgcaagggataagagtcctattgtaggaagggaaagcgatatttgggattggatcagtaacagagggagtgcaatatcacctcgaggtcgtgctatgttgagaaacgatgacgaacacaaattgcagcaattatcagaaagtatcaaaataacagaaatgcaactaaatcatatgaaaactatgttggacaacattgagagggacgcaaatgatctatcttaa

SEQ ID NO: 80162 - DNA, 1749 bp, Saccharomyces pastorianus
atgactagagattcaaaaaagaagcaccattggggcactgcctttttaaggacaattggagtcaaacgtaagcacaagaaggatcgtaattttttaaataatactacaggagagaatgttagcacaacagccagtgctgagcgattcagaagagtaggaggaaatccggatattccgtctttacttaagcccgaaactttcacggaatctcctgcaaaaggatctcaaaaggcggcggcatcttccttagcgcatagccaaggtgtattcaatattccaatcgttatagatcccatggaaacaaacaggcttgaaaagacaaacacgaatttgacggcaggttcattgaagggtcgctttcaggatggtaactcgaattcaaattctgtaccgagtttatccgtccaggcattagaaaaggaaaaactgcaaagtgggaaacgagaagggtccagcaatcaagctgaggaaaaaactccagacggccatgatgaacataccgcctttgaaacgtttctttccttcgcccataatgccgtaagccacattcccaaaataaacgtacaagacgctgacaatggaacaatttccaggaatgaaccaaaggacaggaaaaaaaactcatctaatatatcaggagccctttccgaaaatagcactaacaataaaaacacttcatcgacaaaagaaagcgatggcccatttttgaaaaatttagacaatattcttgcagcatccaaatcatcaactccaagtaaccaacagcttaatacaacggaagcaggaagtaaaagtaaaccatcatcattatctagattggcatttggaaatttgaaaggccatattcactcgaactcacattcaagctctaatgctatctcaggagatgatacatcattagatgacactagaaagatgacggatgatatggccaggaaagtggttttcgaacccatcagtcactctcatgataagcctacccccggagttggaaacttaaaattagagcacttcgatgattctcaagctactcttgaagggttagaggcaatgtcagcagaatcgctgccagaggcggatcaccttgacagcagaggcccggtacaacaaagtaatttggaaagaaaaactgttccttccaaatggtcagtagtcagttcctctacaacagatggagtcaagcctagaagaagagccaaatcaatgattagcgcaatggcagataaacaaaacaccagtagcgacgttttacaagattgtaaaaaaagattgtccttcaactcctctaatggcctaacgaataacgacccggagtatgaagaccgcgaacctagggaaatgtccaagaagtttcttaacaggaggtcattttcccccggaagcattagcatgggaatgaaagtactaccttcgacggcactgaaatattcgctaaacaaagtaaaaaacagcactgatattgcatcgaccatcataccgagacctagtatgtccaacggtcgtccatcttcgggattgaggagaagttctagtaaaagcttttcatctacccccgtaaatatcattgagccatcggaggaaaatggtagacaatccagcattagaataaagggagtcgaatacgcgagcgaaaagaaagatgcagaattccatgcaatattcaaggactctggtgtcagccccaatgaaaggttgattttagaccatagttgtgctttgtcaagagatatcctttggcagggcacatga

SEQ ID NO: 80163 - DNA, 609 bp, Saccharomyces pastorianus
atggaacaaaaatctaaaaatggggtttatgttccacctcatcataggaagagtttcaacttgggaacacaggtacctcctatgaatatgaagacaagtaacgaggccacgttgtcagtttcgcataattctgttaattttggtggatcttacaattccaggcgttccagtgctaatgaatctaacccactgcatatgaataaagcactcgagaagttgtcctcttcaccaggagctaaaagctccttcgttggcttccctaaacctttattacctcataatcattcaagcactacgattgcgttgcaaaatgaagacgtattcgcagactctaacaatgacgccataattttcgaagacgaagaatacgaaggagaaagtgacaagatggcacatggcaaaatggaaggtggtgacaacgaatcctcgtcaacctccccggatgaaaggcaaattttcggtccttatgaaatttatgctcaaactttcgctggctccactcacgataaaaaattaggagctggcaggaagacaagtattcaggatgaaatggtcggatcgttagaacaatacaagaataattggttaattttacagcaacaagactaa

SEQ ID NO: 80164 - DNA, 642 bp, Saccharomyces pastorianus
atgactttagattacgagatttacaaagaaggaggtattttgaataatcgatatcaaaaaatagaggatatcagtgaaggttcatatggttatgtatcattggctaaagatgttagagagaaaagattggttgcagtcaaatacattttcaaattagaagatgacggccagtacgatgggcctcaggacgacgaaaatgattgtgatagtagcgattgtgatgatgatgaagacacgaaagttgatacggatcgccatgaaaatgaaaatggtaatgcctccagtaataacgggtcaagtagagagaagaaacacaatctctacaaacacaaaaagtccctaatttcttcgaaagttaaatcaagactatctaataacatttgtctcgaagccatgtatgaagttgatattcaaacaaaaattggtagacaccaaaatattgctgctctattagatttcttcgactcttacatcatcatggaatattgctctggcggtgacctatatgaggcgatcaaagccgatgctgtgcctaagaaaaccaaatcgatcactcatattatcacacaaatcatggatgcaattgaatatgttcataacaagggcatttatcatcgtgatatcaaacctgagaacatttaa

SEQ ID NO: 80165 - DNA, 1578 bp, Saccharomyces pastorianus
atggatagaaatgtcggtagtgaaagatatatgtcccctgaactttttgatagtaatttggatatcaaggaaagaaaggaaccttatgactgtgccaaagtggatttatgggctatgggaattgtgtttcttaatattgttttccataagaatccttttagtattgccaatcaatccgacaagtcattctgttattttgctgctaatagagaagcgttgtttgatgtattttcgacaatggcttatgatttctttcaagtattaaggtatagtttaaccatcgatccggctaatagagacttgaaaatgatgagaactgaactacagaacttatctgagtatacattagacgatgaatactataataacttggatgaaggatatgaagaaactatgattgacggtttgccacctcagcctgttcctccatcttcagcaccggtatcattacctactcctatttcatctagtaacaaacaacatatgcctgaatttaaaaaggatttcaatttcaataatgtgaatgaaaggaaacggtctgatgtctctcaaaatcaaaatgttgcaagcggcttctttaaaaaaccgtctacacaacaacagaaatttttcaaccagggttataatacaacactatctactcatgaaagggctaaatctgctcctaagttcaaatttaagaagcgcaataagtacggaagaactgataatcaattttccaaaccagtcaatatcgaagatagaaagaaaagtaaaattttgaaaaaatcaaggaagcctcttggcataccaacgcctaatacacacatgaataattttttccacgattacaaagcaagggatgaattcaacaccagagattttttcactcctccaagtgtccagcacaggtatatggaggggttttccaacaacaacaataaacagtacagacagaatcgtaattacaacaataataacaacaacagcaataacaatcatggaagtaattataataattttaacaatggtaatagctatataaagggttggaacaaaaactttaacaaatacagaagaccaagttcctccagttataccggtaagtcaccactttcaaggtacaacatgagctataatcataacaacaatagttctataaatggttatgcaaggcgtggttctacgactacagttcaacattcaccaggcgcttatattccaccaaatgccaggaaccatcacgtaagcccaacgaatcagtttttaagagttccgcaatcaactgctcctgatatctctaccgttttaggtgggaagccttcataccaggaacactacactcaggatagtatggattctgagggcgatcacgattcagacgacgttttattcactcttgaagaaggtgatcatgatttcgtcaatggtatggacaacttatctataaatgatcacttaccgcatacaacggtaggtagccataatgaagtatttgttcacgcaagcactaatcacaataacaatggcaacaacaaccatatcgacaccaatagtaccactaatcaatatcatagacaatatattccacctccttag

SEQ ID NO: 80166 - DNA, 969 bp, Saccharomyces pastorianus
atgattggtggtatgatgtttgttcctgaatctccacgttatttggttgaagctggcagaatcgacgaagccagggcttctttagctaaagttaacaaatgcccacctgaccatccatacattcaatatgagttggaaactatcgaagccggtgtcgaagaaatgagagccgctggtactgcatcttggggcgaattattcactggtaaaccagccatgtttcaacgtactatgatgggtgtcatgattcaatctctacaacaattaactggtgataactatttcttctactacggtaccattgttttccaggctgtcggtttaagtgactcttttgaaacttctattgtctttggtgtcgtcaacttcttctccacttgttgttctctgtacaccgttgaccgttttggccgtcgtaactgtttgatgtggggtgctgtcggtatggtctgctgttatgttgtctatgcttctgttggagtcactagattatggccaaatggtcaaaacaacggctcatccaagggtgctggtaactgtatgatctgttttgcctgtttctatatcttttgtttcgctactacctgggccccaatcgcttacgttgttatttcagaatgtttcccattaagagtcaaatccaagtgtatgtctattgccagtgctgctaactggatctggggtttcttgattagtttcttcaccccatttattactggtgccatcaacttctactacggttacgttttcatgggctgtatggttttcgcttacttttacgtctttttcttcgttccagaaactaaaggtttatcattagaagaagttaatgatatgtacgccgaaggtgttctaccatggaaatcagcttcctgggttccagtatccaagagaggcgctgactacaacgctgatgacctaatgcatgatgaccaaccattttacaagagtttgtttagcaggaaataa

SEQ ID NO: 80167 - DNA, 771 bp, Saccharomyces pastorianus
atgaattcaactcccgatctaatatctcctcagaaatccaattcatccaactcatatgaattggaatctggtcgttcaaaggccatgaatactccagaaggtaaaaatgaaagttttcacgacaacttaagtgaaagtcaagtgcaacccgccgttgcccctccaaacaccggaaaaggtgcctacgtaacggtttctatctgttgtgttatggttgctttcggtggtttcatatttggatgggatactggtaccatttctggttttgttgctcaaactgattttctaagaagatttggtatgaagcaccacgacggtagtcattacttgtccaaggtgagaactggtttaattgtctctatttttaacattggttgtgccattggtggtatcgtcttagccaagctaggtgatatgtatggtcgtagaatcggtttgattgtcgttgtagtaatctacactatcggtatcattattcaaatagcctcgatcaacaagtggtaccaatatttcattggtagaattatctctggtttaggtgtcggtggtatcacagttttatctcccatgctaatatctgaggtcgcccccagtgaaatgagaggcaccttggtttcatgttaccaagtcatgattactttaggtattttcttaggtactgtaccaattttggtaccagaattactcaaactctgtccaatggagagttccattaggtttgtgtttcgcctgggccttatttatgattggtggtatgatgtttgttcctga

SEQ ID NO: 80168 - DNA, 1506 bp, Saccharomyces pastorianus
atggttgcttttggtgggttcgtgtttgggtgggatactggtactatatctggttttgtcaggcaaacagacttcattaggcgatttggcagcacccgtgcaaacgggactacctatctttccgatgtcagaaccggtttgatggtttctattttcaacatcggctgcgctatcggaggtatagttttgtcaaagctcggtgatatgtatggacgtaagattggtctgatgactgttgtcgtcatttactcaattgggatcatcatccaaatcgcctccattgacaaatggtatcaatatttcattggaagaatcatctcaggactgggcgttggtggtattacagttttggcgcctatgctaatttctgaagtgtcgcctaagcagttgcgtggtactctggtttcatgttaccaattaatgatcactttcggtatctttttgggatattgtactaattttggtaccaagaattactcaaactctgtccaatggagggtaccattaggcttatgctttgcatggtctatttttatgattgttggtatgacgttcgttcctgaatccccacgttatctggtagaagtgggaaaaattgaagaggccaagcggtccttagcaagagctaacaaaaccactgaagactctcctttagtaactttagaaatggagaaatatcattcttctattgaagctgagagattggcgggctctgcttcttggggggaattggttactggtaagccccagatgttcagacgtacactaatgggtatgatgattcaatctttacaacagctgacaggtgacaattacttcttttactatggtactacaattttccaggctgttggtttggaagattcatttgaaactgctattgttttgggtgttgttaattttgtttcgacttttttctcgctatataccgtcgatcgttttggtcgtcgtaattgtttgttatggggctgtgtaggtatgatttgttgctatgtcgtctatgcctctgttggtgttaccagattatggccaaacggtcaagatcaaccatcttcaaagggtgctggtaactgtatgattgttttcgcatgtttctacattttctgtttcgctaccacttgggcccccgttgcctatgtccttatctctgagtcgtatcccttaagagtacgtggtaaagcaatgtcgattgcaagtgcctgtaactggatttgggggttcttgatcagttttttcactccatttattacttcagcaatcaatttctattatggctatgtctttatgggttgtatggtgttcgcatacttttatgtgttcttctttgttccagagacaaagggcttaacattagaagaagtcaacgaaatgtatgaagaaaatgtgctaccttggaagtctaccaaatggatcccaccatctaggagaacaacagattatgacctagacgctactagaaatgatccgagaccattttataaaaggatgttcactaaagaaaaataa

SEQ ID NO: 80169 - DNA, 696 bp, Saccharomyces pastorianus
atggatgttacaggattatttggcggatctttccatcatgacggcccctttgatgcatgcactccacagagaaataagaataataaagtggcgcctgtactggccttcccagcagatggtccaaataatacagtaggcggccgcacaagtaagaagtctaccttagatgaggtgtttggtagggaaacagtagacgacgattctgagacgctgaaccaactacaagatagagcatatttattcaataaggccaattccagtactacgactttggatgcgattaaaccgaattcaaaaaatattacccagttcgactccaaaatgaaaactgaactagtccatgggcccattacgatgggtctaggctcaacgacgttcctggatggcgcaccagcgtcttccgctgccatagagcaagatgttatcaaccacgcacaagaatctcgtaggaaaaacagcatagcaagaaaaaagtctctcccctcaagaagacatctacaagtgaacaacaacaatttaaagctagtgaaaacacatagtggacacttggagcaaaaggacgtagacgataatagaacttctgttccggtcactgccacccaaggaagcggtcacgaagatgttgttaaaaaggaaaacaccggcaacaagctattaaggagggtgaaaagcttgaaaactagtaaaaagcactga

SEQ ID NO: 80170 - DNA, 8703 bp, Saccharomyces pastorianus
atgatacttactgcacgattgccccacgagagagaactttatgtggaattatgcatcactgtaccagttcggttaagtgtgcttgctccttatttgccatttttgatgaaaccattggtatttgcattacagcaatatcctgatctcgtttcgcagggtttaaggaccttagaattatgtattgataatttgaccgccgagtattttgatcctataatcgaaccggtaatcgatgacgtttcgaaggccttgtttaaccttctgcaacctcaaccatttaatcatgctatcagccacaacgtagtcagaatactgggcaaattaggaggtagaaatcgtcaatttttaaagccaccaacggacctcacggaaaaaacggaactagacattgatgcgatagcagatttcaaaatcaatggtatgccggaagatgtaccgctttctgtaacgccaggaatccagtccgctttgaatatattgcaaagctacaaaagtgatattcactacaggaagagtgcttacaagtatctaacctgtgtactactgttaatgacaaaatcatcagcagagtttcctacgaattacacggaactgttgaagacagcagtgaattctataaagctagagaggattgaaatagaaaaaaactttgatttggaaccaactgtaaataagagagattattcgaaccaagaaaatttgtttttgaggttactggagagcgttttttacgcaacttcgataaaggaactaaaagatgacgcaatggacctactgaataaccttttggatcatttctgcctattacaagtaaacactacgttgcttaataagagaaactataatgggacatttaacatcgatctaaagaacccaaacttcatgctagatagctcattgattctagatgctattccctttgccctttcgtactacattccagaagttcgtgaggtgggtgttttggcgtacaaaagaatatacgaaaaaagttgtctgatatatggggaggaactagctttaagtcactccttcataccggaattagctaaacagtttatccatttgtgttacgacgaaacatattacaacaaaagaggcggtgtcttgggtataaaagttctcattgataatgttaagtcgtcctcagttttcctaaaaaagtatcagtataacctagccaatggtctattatttgtgctgaaggacactcagagcgaggccccatctcctataacagatagcgctgagaaattactaatagatctattaagtattacgttcgcggatgtaaaagaagaggatttgggtaacaaagtcttggagaacacactgacggacatagtatgcgaattaagtaatgcaaatcctaaggtaagaaatgcctgccagaagtccttacatacaatttcaaacctcactggaattcctatagtaaaattgatggatcattccaaacaatttcttctatcaccaatatttgcaaaacctttaagagcattacctttcactatgcaaatcggtaatgtcgatgctatcacattctgtttaagtctaccaaacacatttctaacatttaatgaagaactgtttaggttactccaagaatctattgtcttggcagatgcagaagatgaatcactatccaccaatatccaaaagacaaccgaatatagtacttccgagcaattagtacaattaagaatagcgtgcataaaattacttgcgattgctcttaaaaatgaagaatttgccacagctcaacaaggaaacatcagaattcgaattctagctgtttttttcaaaacaatgctgaaaacttcaccagaaattattaatactacatatgaagctttgaaaggttccttagcagaaaactctaaattgccgaaagaattacttcagaacggattaaaacctcttttaatgaatttatctgaccaccaaaagctgacggtccctggtctggatgctttatcgaagcttctcgagttattgattgcatactttaaagtagaaatcggaagaaagttgttagatcacctcacggcatggtgccgtgttgaagttcttgacacattatttggccaagatttagcagagcagatgccaactaaaataatagtaagcattattaatatatttcatctactgccaccacaagctgatatgtttttaaatgatttgttgctcaaagttatgcttctagagagaaaactacgtcttcaactggattctccatttcgtacaccactagcgaggtacctgaaccgtttccataaccccgtaacagagtacttcaagaaaaatatgacgttaaggcaattagtgcttttcatgtgcaatattgtgcaaagacctgaagcaaaggagctggccgaagattttgagaaagaactcgacaacttctatgacttttacatttccaatataccaaaaaaccaagtacgtgttgttagtttttttactaatatggttgatctctttaatacaatggtgatcacgaatggggacgaatggctaaagaaaaaaggcaacatgattttgaaattaaaagatatgctgaacttgacattaaaaacaataaaggaaaactcgttttacatcgaccatctacaattaaatcaaagtattgcaaaattccaagctctttacctgcgtttcactgaattatccgaaagggatcaaaatcctctgctcctagatttcattgatttttctttttcaaatggtatcaaagcctcatattccctcaagaaattcatcttccataatataatagcaagttcaaataaagaaaagcagaataacttcataaatgatgcaacacttttcgttctatctgacaaatgtttggatgctagaatatttgtacttaaaaatgtcataaattcaactttgatttatgaagtggcaacatctggatctttgaaaagctatcttgtggaggataaaaaacctaaatggttagagttactccacaataaaatttggaagaactcaaatgcaattttagcatatgacgttctagaccatcatgatttattccgttttgaactcttacaactgtcagcaattttcattaaggcagatccagaaattatagccgagataaagaaagatataataaaattctgctggaatttcataaagctcgaagatacccttatcaaacaatccgcgtacctggttacatcatatttcatatccaagtttgatttccctattaaagttgtcacccaggtttttgttgccctattacgttcttctcatgtcgaagctaggtacttagttaagcaatcgctggacgttctcacccctgttctccatgaacgtatgaacgcagctgggacgcccgatacctggattaactgggttaaaagggtaatggtagaaaattcttctagtcagaacaacattttataccaatttttgataagccaccctgatttatttttcaattcaagagatttgttcatatcaaatattattcatcatatgaataagataacgttcatgtcaaattcaaactctgatagtcatactttagctattgatttggcgtcattaattctttattgggagaacaagaccttagaaattacgaatgtaaataataccaagaccgattccgacggagatgttgtaatgtccgattctaaaagtgatattaatccagttgaggctgacacaaccgcaataattgtagacgctaataacaactcgcctatatctttacatttacgcgaggcttgtacggcgtttttgataagatacgtgtgtgcaagtaatcaccgtgccatagaaacagaactaggattaagagctatcaatattttatcagaattaatctcagataagcattggacaaacgtcaatgttaaactggtttacttcgagaagtttttgatatttcaagatctcgattccgaaaatattctttactactgcatgaatgctttggatgtgctttatgtattcttcaaaaataagacaaaagaatggataatggaaaacttacctaccattcaaaatcttctagaaaaatgtatcaaatctgatcatcacgatgtacaggaagctctgcaaaaagttttgcaggtaataatgaaggcaataaaagctcagggtgtatcagtgataattgaagaagaaagccctggtaagacatttatccaaatgttaacctccgtgataactcaggatcttcaggaaacctcatcagttacagctggtgtaactctagcttgggtactcttcatgaactttccggataacatcgtcccattattaacgcctttgatgaagacgttcagtaagttatgcaaagatcacttaagcatttcacaaccgaaggacgccatggctctggaagaggcaaggattacgacgaaacttttagagaaagttttatatatattatctttgaaagtctcactcttgggtgactcccgtcgtcctttcctctccactgtggcacttctgattgatcactccatggatcaaaattttttgaggaaaattgtcaatatgtccagaagctggatattcaatactgaaatttttccaactgttaaagaaaaagcggctatattaacgaagatgctggcgtttgagattagaggggaaccttcattgtcaaagctattctacgaaatagtcttgaaactgtttgatcaagaacattttaataacacagaaattaccgttagaatggaacaacctttcctcgtaggaacgcgtgttgaagacatcggtataaggaaaagattcatgactattttggataatagtttggaaagagatatcaaagagagactatattatgttatacgggaccaaaactgggaatttattgctgattatccatggttaaatcaagctttacaattactatatggttcttttaatagagagaaggaattatctttaaagaacatttattgtttgtctccaccatcgattttacaagagtacctcccagaaaatgctgaaatggtaaccgaagtaaacgatctggaattatcaaactttgttaaaggtcatatagcttccatgcaaggtttatgtcgaataatctcttcggatttcatcgattctttgattgaaatattttaccaagatccaaaagcaattcatagagcgtgggttacgttatttccccaggtatacaaaagtattccaaagaatgaaaaatacgggtttgttcgatctatcattacattgctttctaaaccttatcataccagacaaatttcctctaggacaaatgtgattaatatgctattggactcaataagtaaaattgaatcgttagaattaccccctcatttggtcaaatacttggcgatatcatacaacgcttggtatcaatcgattaacatcttggaatccattcaaagcaatactagcatcgacaatacaaaaattatcgaagccaacgaagatgcgctattagaactatacgtcaatctacaagaagaagacatgttttatggtctttggagacgtagagcaaaatacacagagactaacattggtttatcatatgaacaaattggcctttgggacaaagctcaacaactttatgaagtggcacaggtcaaagctcgtagtggtgccttgccctactcacagtctgagtatgcactatgggaagataactggatacagtgtgctgaaaaattacaacattgggacgtattaactgaattagcgaagcatgaagggttcacggacttattattagaatgtggttggcgtgttgctgattggaacagtgatcgtgatgcacttgagcaatcagtaaaaagcgttatggacgttccaactccacgaaggcaaatgtttaagacctttttggctcttcaaaatttctcagaaagcagaaaaggagatcaagaagttagaaagctatgcgatgaaggaatacaattaagtctaataaagtgggtgtctctgccaattagatatacaccagctcataagtggctattacatgggtttcaacagtacatggaatttttggaagcggcacagatatatgctaacttgcatacaacaacagtacagaatctggattctaaagcccaagagattaagcgcatcttgcaagcttggagagaccgtctaccaaacacatgggatgatgtgaatatgtggaatgacctagtaacatggagacaacatgcattccaggttattaacaacgcatatctcccattaataccggcacttcaacaatcaaacagtaatagcaatattaatactcatgcatataggggatatcatgaaattgcctgggtaatcaacaggtttgcacatgttgcaaggaagcacaacatgcctgacgtgtgtatcagtcagctggcacgtatttacaccctaccgaatatagaaattcaggaggctttcctaaagttaagggagcaagctaaatgtcattaccaaaacatgaacgaattaacaacgggtctggatgttattagtaatactaatttggtttactttgttactgtccaaaaagctgaattcttcacattgaagggtatgtttttgtctaaattacgcgcatatgaagaggcaaatcaagcctttgcaacagctgttcagatagacttgaacttggctaaagcgtgggcccaatggggtttcttcaatgaccgtcgtttgtcagaagagccaaacaacattagttttgctagtaatgcaataagctgttatttacaagccgccggcctgtataagaactcgaagattagggagttattgtgcaggattttatggctcatcagtatagatgatgcttcgggcatgctcacaaacgcatttgactcctttagaggcgaaatacccgtttggtactggattactttcattccgcaactattaacctctctatcacataaggaggccaatatggttcgtcatatcttaatcagaattgctaaaagttatcctcaagctcttcacttccaattaagaacgacaaaggaagatttcgccgttatccaacgacagacaatggctgttatgggggataaaccagatacaaacgatcggaatggacggcgccagccttgggaatatttacaagagttaaacaatattctaaagacagcttatccattgttggccttatccttagagtctcttgttgcccaaataaacgaccgtttcaaatctactactgacgaagatcttttcaggttgataaatgtcctattgatcgatggaacgctgaactacaatcgcttaccatttcctaggaaaaatccaaaacttcctgaaaatacagaaaaaaatttggtcaaattttctacaactttgttggcgccttatataagaccaaagttcaatgccgactttattgacaataaaccggattacgaaacttatatcaagagattacgttactggcgaaggaggttggaaaacaagcttgatagagcatcaaaaaaagaaaatctagaagtattatgtccacatttaagcaacttccatcaccaaaaattcgaggatattgaaattcctggccagtatcttttgaacaaggataataatgttcactttattaaaattgccagatttttacccacggtcgattttgttcgcggaacacattcttcatataggcgtttaatgattcggggccatgatggcagtgtacattcatttgctgttcaatatccagctgttcgccattcaagaagagaagaaaggatgtttcaattgtacagattattcaacaagtcattatccaagaatgtggaaacaagacgtcgcagtatacagttcaatctaccaatagcaatcccgctatctccacaagtccgtatcatgaatgatagtgtttcttttactacccttcatgaaattcacaatgaattttgcaagaaaaaaggatttgacccggatgatatccaagattttatggcagataaactaaacgcagcgcatgatgatgctctgcctgcgccagatatgaccatattgaaagttgaaattttcaattcaattcaaacaatgtttgtaccatcaaatgttttaaaagaccattttacgtcgttgtttactcaatttgaagatttctggttattccgtaaacaatttgcgtcacaatacagttcgtttgtcttcatgtcttacatgatgatgatcaataaccgtactcctcacaaaatccatgttgacaaaacctctggtaatgtatttactttagaaatgttaccctcaagatttccatatgaaagggtgaaaccattgctaaagaatcatgacttaagtcttccaccagattctccgatatttcataataatgaaccagttccattcagactgacgcctaatattcaatctttgataggtgattctgctttagaaggtatatttgcggtaaatttatttaccatatcacgtgcattaattgaacctgataatgaactgaacacatacttggccctattcatccgtgacgagatcatatcatggtttagcaaccttcaccggccaatcattgaaaatccacagttacgtgagatggttcaaaccaacgttgacctaattattagaaaggtggcacaattgggccatttgaattcaacacctacagtcacaacccagttcatcctagactgtattggcagcgctgtcagtccaagaaacttagcaagaacagacgtgaacttcatgccatggttctag

SEQ ID NO: 80171 - DNA, 1347 bp, Saccharomyces pastorianus
atgtacggttgctactgcatgacacataagccccctggcaatagtactgtggcagatttcattcataatataagatctgaattacaactaagtgaaattgaaaaaacaataaagatttacactggatatctattggatgagtcattagccttaactgtacaaatcatgagtgcaaaattgctgcttaatttagttgaaagaatattaaaattgggaaaggagaacccacaagaggcccctagagcaaagaaattgttaatgataatcattgactcatatatgaatagatttaaaaccttaaacagacagtacgatacaataatgaagtactatggaagatacgaaacgcataagaaggagaaagcagaaaaggtcaaaaactctatacaggataatgacaaagagagtgaggaatttatgaggaaggtactggaaccatccgatgacgaccatttgatgccacagcctaaaaaagaagatatcaatgatagtcccgatgttgaaatgacagaatctgacaaagtggtgaagaatgacgttgaaatgtttgacataaaaaactacgcacctatattattactacccacaccaacaaatgatcccatcaaggatgctttttacttatacagaactttaatgtctttcttaaaaacaataattcatgacttaaaagtctttaacccacctcctaacgaatatacggttgctaatcctaaattgtgggcttctgtttccagggttttttcatatgaggaagtcattgttttcaaggatttatttcacgaatgtattattggtttgcaattttttaaagatcataatgaaaaattatctccagaaacaacaaaaaaacattttgatatatcaatgcccagcctaccggtctcagccaccaaagatgctcgtgagttaatggactatttggcatttatgtttatgcagatggataatgccacttttaatgaaataattgaacaggaactgccatttgtctatgaaagaatgctggaggattctgggctgctacatgtcgcgcaatcctttttaacaagtgaaataacctccccaaattttgctggcatccttttaagattcttgaaagggaaattgaaagatttaggaaacgttgattttaacacttctaatgtcctaatacgacttttcaaattgtcctttatgtccgtcaatcttttccccaatatcaatgaggttgttcttcttccacacttaaacgatctaatactaaactccctgaaatactcaaatacagcagaagagcctctagtatacttatatcttattagaactcttttaagaagtataggtgggggcagatttgaaaactta

SEQ ID NO: 80172 - DNA, 108 bp, Saccharomyces pastorianus
  modified_base (36)..(36): a, c, g, t, unknown, or other
atggcaaacctaatgggtcatacggggtgtggattnagatggtgtaaagtttcggcaaatcctctctccaagttcgaaaaaaaattatacaactttttgggattttga

SEQ ID NO: 80173 - DNA, 957 bp, Saccharomyces pastorianus
atgaaaccaatggcccatagcaaagataacaaggacattctcttgcaacctctgaacagcatacctagttcttctacacttaacactattagtggtaatagcagcaataatttaacctcatcaaactacttttccaacgaaaaggaaggctcaagggtcgatggtgactttaaacgcaacaacccaaacttaaaactacaaatgccactacctacacctgttgtgagaaataaacttcttgatccaaatacagcaacctcacagaataacaatggcatgccggggagcgctggcatatccacgaacgaaaatattaatcaatttggatttaacacaagcagtgcgtccaacatccctgtctcaatgactccaattagtgagaaacacattgattttgggggcaagatcaagagaagtcaaagcatttctaacaggaagaactcttctgcctcggaacacccattgaatattcttggctcatctgtttccggcaatgtttccggtatcggtaacaacaatgttggctctaacaacaacagcggccctaataacagtgttcctctttctgctaatacaggaaacactactatcaaagccaattctacgactatcacaacttcaagttctgccgcggcatcaacgactgcaccaatttcacaacagactattccatccggaacacaattcaatcatattctgagttccgccgcaacagctgcaaactcggttaattctttaggctttggcatgtgtcctcctccacagagtttacaaatggaaatgttcttggacttagaatcgtttctgccaggaaaacagaggcgggtagacaggaaaccccaggttctgaaagaactggaaaatcttttacaaatgttcgaagaaggtttgccctgcattgaacacgctttaaaggaacaacttatttcaacgcctatcaaggataatgagcattaa

SEQ ID NO: 80174 - DNA, 2253 bp, Saccharomyces pastorianus
atgacgacgaagccacaaaatagtaagcagggtttagccgaaggagagatggatgtgagttcacttttcaagagaacggaagttattgggcgagggaaatttggtgtggtttataagggctataacgtgaagactggacgagtgtatgctatcaaagtcttaaatttagattctgattctgacgaggtggaggatgtgcagcgagaaattcagtttttggcctccttgaaacagatttccaatatcacgcggtattatgggtcgtatttgaaagacacaagcctttggatcataatggaacactgcgctggtggttcactgcgttcgttgttaaggccaggcaaaatcgatgaaaagtacattggggttattatgagagaactgcttgtagcattaaaatgcattcataaagataacgtcattcatcgagatatcaaagcagcaaacgttctgatcactaacgaaggtaatgttaaactatgcgattttggtgtcgctgcacaagtaaaccaaacttctttacgacgtcaaactatggctgggaccccctactggatggctccagaagtgatcatggaaggcgtttattacgacactaaagtagatatatggtctttaggtattacaacgtacgagattgccaccggaaatccgccatactgcgatgtggaggccctaagggcaatgcaactaatcatcaaatcgaaaccaccaaggcttgagggcagatcatacagtacatctttgaaagaatttattgcgctttgtcttgatgaggatccaaaggagagattgtcagcagacgatcttttaaaatcaaaatttatcagggcccacaaggcgacgccaacgtccattttgaaagaactaatatcacgatatctactatttagggacaagaataaaaacaaatataaaatagagggcagtataccggaaaatgagccatcaaaacccagtgaatctccaaaaccatcacaaaatggcgggggtgatgaagcacaaaagtcaatagcatcaaatgataatgaaattaagagagtgaacgaaggcgatgtggaaatgaaatgggattttgattcattgagttcgtcggattatattattgaaaataatatcaacctcgatgctttggctgaggacaacaacgagtgggctactgcccaacatgacctgttcaactatgcataccctgacgaagactcttattactttgaccctacaagtcatagtactagaccctttgtttatcaagggacaacgataggaaagggctatcctggtacaatagctcaaaattctactttgaatgcaccagtaacaaataactatacgaactcaaaatacccttccaaaatggtagctggaactacaaacacctctggaacacatacggccggtccaatgacatcatctaagaagctggaaagtaaggctccaaaacaattacttgaactttttgaagacaatgaaattattactgctgaaaatgatgtcaatacagaagctcctaaaataagcaaatccatttcatctctaaatgctggtaatagttcacgagatgatttcattccctcaatatccaacgaggtcaacggaaatatcaataataataaaatgcgaccacaccttccacctttatccagtgggaacaattattatagccagagtacacctgctttgccgctactccaaacaaaatttaacaagacgtcaaagggccctccaacaagtggattaactactgctccaacgtctattgaaatagaaattcctgaagaactaccgaatagtgctctaccaacgcctgcgagcgcagatccggttttaataccaagcacaaaggccaggtcatctacagtgacggctggcactccttcgtcatctagctcaatacaatataaatcaccttcaaacgtgcccagacggttgacagtcagtagcaataggccagaacattgcccaagcaccataacaaatcaaaaattggggtccgcagttgcttctaattccggaatcagctccactccgaacaacagtaataactataacaacaacactgatagtgagaactcaagaggaagcagcggtagtaacactgcaaatagcacacaaatgggcataaccaatccaggtaatgtaacaaagttatctactcataaggcttcttcaccctcaaggccactatttggagttggaacttctcccaatagaaagcctgccggttcccccaacccaaaacattggtcataa

SEQ ID NO: 80175 - DNA, 1290 bp, Saccharomyces pastorianus
atgcctgcaggtcaagtacttgtgacaagaaatggctcttccattattgcgtttgctgttggtggaaagtgggagcctggtaatccaattgccattacgggtgctcacaccgactcccccgcattaaggattaagcctatttctaaaagagtcagtgagaagtatttacaagtgggcgtggaaacttatggtggcgctatttggcattcatggtttgataaggatttgggcgttgccggaagagttttcgtaaaggatgcgaaaactggcaaatccattgctagattggtggatttgaatagacctctgttaaagattcctactttggctattcatctggacagagacgtaaatcaaaaattcgagtttaatagagaaactcaactgttgccgattggtggtctgcaagaagacaaaactgaagcgaaaattgaaaaggaaattaataacggtgagtttacctccataaaaacgatagtacagaggcatcacgcagaacttttggggctaatagccaaagaactcgccattgatacaattgaagacattgaagacttcgaattgatcctttatgatcataatgcatccactctaggtgggttcaacgatgagtttgtcttctctggtagattggataatttgacatcttgtttcacatcaatgcacggtttaacgttggcggctgacacagaaattgaccgagaatcaggcattagattgatggcatgctttgatcatgaggagattggctcatcctccgctcaaggggcagattctaacttcttgcctaatatattggaaagattgtccatcctgaagggggacggttctgatcaaactaaaccattgttttactcggcaatattggaaacttccgctaagtcgtttttcctttcatctgatgttgctcatgcagttcatccaaactatgcaaacaaatacgaaagccaacacaaacccttattgggtggtggtcccgtaatcaagattaacgcgaatcaacgttacatgaccaattcaccagggttggtcttggtgaaaagactagcagaggctgctaaagtccctttgcaattgtttgtcgtagctaacgactcaccatgcggttctaccatcggccccattttggcctcaaagacaggtattagaactctagacttgggtaatcctgtgttgagtatgcattcgattagagagaccggtggctctgcagacctggagttccaaatcaagttatttaaggaattttttgaacgctacacttccatagaatcagaaattgttgtctaa

SEQ ID NO: 80176 - DNA, 258 bp, Saccharomyces pastorianus
atgttcaggatacaactgagaactatgtccagcaaaacatgcaagagtgattacccaaaggagtttgtcagtttcttaaatagctcacactctccttaccatacagttcataacatcaaaaagcatctggtgtcaaatggcttcaaagagttgagcgaacgtgactcgtgggctggccacgtcgcacaaaaaggaaagtactttgtgacaagaatggctcttccattattgcgtctgctgttggtggaagtgggagcc

SEQ ID NO: 80177 - DNA, 192 bp, Saccharomyces pastorianus
atggaaaaaattgacgaggccatagaattgtttgaagattctgcaattttagcaagaactatggatgaaaaacttcaagctactaccttcgcggaagctgcaaagatacaaaagcgtttgagggctgatccaatcataagtgcaaagatggagctaacattagctcgttataaggctaaaggcatgctttag

SEQ ID NO: 80178 - DNA, 1323 bp, Saccharomyces pastorianus
atggccgaaaactccctcctgaggtttatcaccaagaacaaagtggccatcctagcaacggtctctgcggggactgctgctgtgggtgcttatgtttactacctgcaaattaagcagcagcaacagcagcaattgaagggtacaaaagacaaccgacgtcaaagtgaggcctttgctggtcaaaatgaagacgaggcggacttaaaggacgacggcagcgtcgtaagtggaagtaataagaggaagaagaagaagaataaacgcaagaggaacaataaggcaaaattgggagaagggtttgactatccctccttgcccaatggcgagcctgatattgcccaattgaaaggcctatcaccctcccagagacaagcatatgccgtgcaactgaagaacagaggtaaccacttcttcactgctaagaattttaatgaggccatcaaatactaccagtatgccattgagctggacccgaatgaaccagtgttctattccaacatatctgcttgttatatttctacgggcgacttagagaaggttatagagttcactacaaaggcacttgagataaaacctgaccattctaaagccttgctgagacgtgcatctgccaacgagtcactgggcaacttcactgatgctatgtttgatctatctgttttgtcattgaatggtgactttgatggagcctccattgaacctatgctggaaagaaatttaaataagcaagcaatgaaagtactaaatgaaaacctatcgaaggatgaaggcagaggctcgcaggttttgccgtctaacacatctctggcgtcattttttgggatttttgactctcacttagaagtttctagtgtgaacaccagttcaaactacgatactgcatacgctctattgtcagatgctttgcaaagactatattctgcaacagatgaaggttacttagtagcaaacgatcttttaacaaagtccactgacatgtaccactctctactttctgcaaatacagtggacgatcctttaagagagaatgctgccttggcattctgctacacgggtattttccatttcttaaaaaataacctgttagatgcccaagttcttttacaagaatctataaacctgcatccaacaccaaattcgtacatatttttggcattgaccttggccgataaagaaaactctcaagaatttttcaaatttttccaaaaagctgttgatctaaaccctgagtatccgccaacctattaccaccgtgggcagatgtattttattctacaagattataaaaatgccaggaagatttccaaaaggcccaaagcttga

SEQ ID NO: 80179 - DNA, 1560 bp, Saccharomyces pastorianus
atgttgaaaaaagtaaatgatctatcccgtatacttcaaaagtttagtttcggaaggggcgaggcattagaacttattcaaatggcacgttcactagaggtttcaagagaaataagaaaatatttactaaataacacgtcgttgatgaaagctacattaaagagtcaaatcacacagctgactgagtctttaaattttgaaaaaaatttgattgatgatattttgaagtttttaaatgaggaagagctagcaaagtcacaagatgctaaacagaatgcagatgtaactagaatgcttgacatagatgtaaaagacaagaaagaaagtaacaaagatgagatttttgaattaagagattttatcgtaaacccttcgttcaataccaaacttaggaaattgcatgacacttatcagggcgtttggcaaaaaaaaactgagtacaatgctttattaaaaggtttttttgttggcgacctaggtgctaagactttcaccttgaaggaaaggcaaaacggtgagtatgccctccatgtgacaggaacagcctctagtttaaagaaaattgatgagttaattagtaaatcgacggagtaccacggaagttgcttccatattttgcaaaaatcaagccaaacacgatggttgagtcacaaaatttggacagacttggggcacgagttggaattattaaatttaaagattaggaatgaagaggccaatattattgatctttttaaaaggaaatttattgatagaagtaacgaggtcagacaagttgcaattacactgggctatcttgataccttatcgtcctttgctgtgttagctaacgagagaaatttagtctgcccaaaagtggatgagagcaataaactagaagtagtgaatgggagacatctaatggttgaagagggtctttccgcgcgctctttggagacattcacggccaataactgcgaattggcgaaggacaatttatgggtaattaccggaccaaatatgggtggtaaatctacattcttaagacagaatgcaattatagtcattctggcgcaaattggatgttttgttccatgcagtaaggcgcgtgtgggtattgtagataagctttttagccgagttggttcagcagatgatctgtacaatgagatgagtacgttcatggttgagatgatagaaacatcgttcatcttgcaaggagctacggaacggtctttagctattctagatgagattggccgtgggactagtggtaaagaaggcattagcatcgcttatgcaactttaaagtatttgttagagaacaatcaatgtagaacgctttttgctacacattttggtcaagaactgaagcaaatcattggtaacaaatgttcgaaaggaatgcgcgaaaaggtcaagttttaccaaagcggaatcactgatttaggtggcaacaatttttgttacaaccataagttgaagccgggcatctgcacgaaatcagatgccattagagttgcggaattggccggatttccaatggaagcgttaaaagaagcccgcgaaatattgggataa

SEQ ID NO: 80180 - DNA, 663 bp, Saccharomyces pastorianus
atgaagcatttctttaagctaccgacagaattccggcccatttctagggtttccttacgatattctagtactgataccgctcaaccaaaaatatcaaaactcaaaattagttttaataaaatttctgaatcaaatagcgaaaaaaaagataatttgggttcaattgacacacgaaattgtctttcgactcagcaagatgacaaactatcaagcactgagccctcgaaggcttcccttccaccatcattacaatatgttcgtgacttgatggatttgtataaggatcatgtggttttaacacaaatggggtcattttatgaactttactttgaacaagcaattagatacgctccagaattaaatatatcattgacgaatcgagcttatagtcatggcaaagttccatttgctgggtttcctgtacaccagttaagtcgacatttaaaaatgcttgttaacaattgcggatacagtgtaactatcgcagagcaattcaaaaaaaaggcacgtggccagcatcaatgcaagccaataaattctcataggagcagtgcactagcaatcgttactccccggcacttttcattgatgaagcatttgacactttgcagggcaacatcacatatctcctgcacacatcgaatttcctgcaaaactgtatga

SEQ ID NO: 80181 - DNA, 1041 bp, Saccharomyces pastorianus
atggcgcccaacatcatcacattatcaggatttgctcttatagttatcaacgtgttgactgtattctattacgatccaaaccttaacacagatacgcctcgctggacatatttttcttacgctttaggtgtatttctatatcaaacgttcgatggatgtgatggtgtacacgctcgccgtatcaatcaatcaggacccttaggagaactattcgatcatagtattgatgccattaattctactctgtctattttcatcttcgcatccgaaactggaatgggattttcgtataacttaatgttatcccaatttgcgatgctgacgaatttttacttaagtacttgggaagagtaccatacacacacattatacttaagtgagttttctggacccgtggaaggcatcctgattgtttgcgtttcattgatactgacaggtatatacggaaaacaggtaatctggcatacctacttatttacaattacagttggtgataaggtaattgatgtagacactctagatattgttttttccctagctgttttcggtttggttatgaacgcattgtctgcgaaaagaaacgtggataagtattatagaaacagcacttcttcggccaacaatatcacgcaaattgagcaagatagtgctataaaaggtctgttgcccttttttgcctattatgcaagcatcgctttactagtatggatacaaccaagctttattacactctctttcatcctttccgttggtttcacgggagcatttaccgttggaagaataatcgtttgccatttaactaagcagagctttcccatgttcaatgcacccatgttaattcctttgtgccagatagtattgtacaaaatatgtctatccctttggggaattgagtctaataaaatcgtctttgccctatcttggcttgggttcggtctctcactaggtgttcacattatgtttatgaatgacattatccatgaatttactgagtacctggacgtttatgctttatccatcaagcgctccaagctgacataa

SEQ ID NO: 80182 - DNA, 2541 bp, Saccharomyces pastorianus
atggctctgccaatagagggcaaattatccatggcaaataataggatcgaaaggttaaaatcaccctcgtcttcatcaacatgctcaatggacgaggttctcattacttcaagcaataacagcagctctatatgtttagagaccatgcgtcaacttcctcgggaaggtgtttctggtcagataaatattatcaaggaaactgcagcttcgtcctcttctcacgctgctctcttcatcaagcaaggtctttacgagcatatagatcccctccctgcttatccaccgagctatgatctagtaaatcccaataaagaggtccgctttcctatatttggtgacacggcaccatgcccaaagtcttctctccctcctttgtatgcacctgcagtatatgaattgacgttgatatccttaaaattggaaaggctttcaccttatgaaatttctagtaacaggagctggaggaatttcatcattgaaattaattcgactcaactaaatttttaccatattgacgaatctttgacgaaacacattaggaattattcaagcggggaaacaaaatctgaaaaagaggatagaattcatagtgacttggtccatcgcagtgatcaatcacaacatctgcatcaccgtctcttcactctaccgacgagatcagcttcggagtttaaaaaagcagatcaagaacgggtctcttatagagtgaaacgtgatcgatcgcggtatttaaccgatgaagctctttacaagtctttcactttacaaaatgcaagatttgggataccaacggattataccaagaagagttttgtgttaagaatgtcttgtgaaagcgaacagtttttattacggttctctcatatagatgatatgattgactggtctatgtacctatcaatcgggatatctgtgtctttggacttggaagtcagggagtatccagattatcgaattgttcccagaagaaggagaaggagaaggaggagaaggaggagaagaagacacactcatagaagtgagagttcgatggggtctttttcgcagagattcattcgttcgaattccagaccggacttaatccaaagatatagtaccgggtctagcaccaataacaatacaactatcagggaacgctcgaataccttcacagctggtctactagatcattactgcactggcctctcaaagacgcctacagaggcattgatatcttcggctgtatcaggagaatccagtgataacagtaccctgggatcaacaaggtcattatctggttgctcagcttcccgttcgattgcatctagaagtttaaaatttaaaattaagaactttttcaggcctaaaaattcttcacgcacagaaaagcttcacagactcaggtccaactcaagtaacttaaatagtgttattgaaacggaagaagatgatgaacaccatgaatcaaacgggggagatcatccagagcctggtgtttcagtaaataccaccattaaagtagagcgtccaatgcacagaaatagagctatttccatgccccaaagacagtcattgaggcgtgcaattagcgaggaggttgtccccatcaaatttccaaatagcacagtggatgaatcagttcattcaccctctcctattgagcatctttccgttgatggctgcgagattatgctgcaatcacaaaatgcggttatgaaagaggaattacggagtgttgcgtcgaatttggtagccaatgaaagggatgaggcatctgttagacctaaacctcaaagctcttcgatatacctatcaggattagctcctaatggggaatccgccacagatttatcccaaagcagtaggtcgttatgtctcacaaaccgtgacgctgaaatcaatgacgatgaaagcgctactgagaccgatgaggacgaaaatgacggtgacaccgatgaatatgctggcgatgatactaatgatgatactgatgacagtaatattggttatgcttatggcagtgaaagtgattattcatgtttaattgaagaacgaataagaaatcgaaggcgagcatcatctactctaagttgcttctccaatataccttacggaacggatgatattaaatggaaaccagctattaaggaaatttcaagaaggcgttatttgagggattctctgaagtgcatcaaaccatttctagatagtaacgactgtttgggtaaggttatctatattccagtttcgggaccaacctttgaaacaagtaataaaattcactttagcaaccgccagagcttacagaagcagaagaatcattttttaaaaggcttcatcgtgggacctacggcgttgatagaacttaattgtaaaaataagaatgcaattgttggaacaacaaaggacgctgaagatcatggggaggacgacggtgacggtgatgatggtgaggatgatgatgacgacgacgaagacgacgacgatgacgatgacgatgatgacgacgacgaagacgacgacgatgacgatgacgatgatgacggacagattactgcataa

SEQ ID NO: 80183 - DNA, 285 bp, Saccharomyces pastorianus
atgttgatgaagacgagggtgattttaacctttcgatcctattatttgccatggataatttgccctctattggcagagccatccttaacaaacgaacaacttgtatgcacgatgtcggatcaaaaatatactgtggccccaagaaacaacgatttcttttgtgctggtcaacaaaattgtaatcttttcggtggaccctattatgaaacttttctcttttttttttttcttactgtaagacagttagatgcacccacctcactgaagcttgatgattacgactaa

SEQ ID NO: 80184 - DNA, 246 bp, Saccharomyces pastorianus
atggtctctaaacatatagagctgctgttattgcttgaagtaatgagaacctcgtccattgagcatgttgatgaagacgagggtgattttaacctttcgatcctattatttgccatggataatttgccctctattggcagagccatccttaacaaacgaacaacttgtatgcacgatgtcggatcaaaaatatactgtggccccaagaaacaacgatttcttttgtgctggtcaacaaaattgtaa

SEQ ID NO: 80185 - DNA, 297 bp, Saccharomyces pastorianus
atgacaggaataagtactaacacagggatagtgagaaaaaggggcaaaggtgtgaagttagggagtttgcatccagagggtatatcatctatagatagaggtaattccccgagagagttggcggcttttgcagccgaaaggagatatagagatgatcgctggtgcggagagacgaagaataacaaagatcaaataataagtgataatattagcagctccttagaagttgtaatccttgatgatgatgacgaggtactcccgggagatactcttatcgaagttattgatctcacttaa

SEQ ID NO: 80186 - DNA, 84 bp, Saccharomyces pastorianus
atggagtgtataatgggcaccatgctgcacgaattaactcacaatttattcggtccacacgacaaaaagtctacaataagctag

SEQ ID NO: 80187 - DNA, 741 bp, Saccharomyces pastorianus
atgagtgatgttattaaattgtgtggattccttggtgttttaccaaaggaaagaatagaaaacgatgaaaaggccggcgacttcatgcaacctgtatatatcaattatgatttcctgtctctttcaaaaaattttacaaaattgaccgtgttttatttaagcagtgtcatcattaagaccatgaaagttttactggcaatggtaatggttatcttcaaatgtttttcaaaagttaacaaaactttatactattgtcttttgatatctgcggtaaccaatttgttctttgttggtaaatctattcattcatatttctccgtaaagtcagccgaaaccctatttcagaactatgccaatggtgatcagcgaggacttcaaatcatgcatcggtctttgacagtgcctgatttgaacctacttacaagaaaaatgatggataacgaccaggaaaatccagtattcaagagatttgacgaagacaaaaatgcataccagtacaaaggaacaaggcaagaaattgcaattaaacgaaaccaagtgctgacggaattaaaaattctacaaaatacggaaaaggaactcgtacagggaagttacagaaaattcataataacagaaagagacaaatgcatcaccactcagaatgaaatctttgatttatggataaacgataccaaactacaagattattgtatggcatgttttgcagagtacaacagattatctgccattccagtctga

SEQ ID NO: 80188 - DNA, 2811 bp, Saccharomyces pastorianus
atgcatgaacacaaagcggagctacggctaataaccgttgcacttaacgaagcatccaccgattccccctcttttagagcttctgtcaattatttccataccagaatggaatctctgagtagttggatgcacagtactgtggattatgtagaaaatacgtacaagccttcgttccaagacttccaaagaataaaggagacactattttcacagctgctcccttctcctatattactctccaatggatttgtcagtaaccagccatatactcccttgcttgtaagagactttactagagatgtcagtgacctttcaaatacggttatgaaaataattttaggtgatgaaaactcacaatacactgcggcattgtctgctttgagctctgatgctattaacccttacttcaacaagagaaaaacttttgaatactaccaaaggaagtatgattcgtttttaactgactttttagcggccactaatgatggcaatactttaattccacaaaatctgcaaaatgaaacattcaaattattcgatattaaacacaaatatatagaagcttccttggatttgactgaggctatttcgttaatgaaagttaatttggataaattcctgatagagacaatagacattgtgcgcaaaaataacgttattactaccaaggacaccaaggacgttatcgacattactcccgaacttacggaaacattaaaggattggaccgattggatagaaagtaaccttcagactttacaagcattgtcatccaagctatctgaagctaagtatgccattctgaagctcagcttggcaagaatgaagccatctcgcctgatacaagactatgatttgaaaagcatacaaaatttgaagtttaaccttccaaaatcgataagtaacggaaataattctgaggaaaaagggctatcgggttggttgtacatgaaaactacagttggtcatgatccgaaaagagttgtgtgggtaagaagatggtgctttctacagaacaatgtttttggagttttttcactgtcgcctagcaaaacttatgtcgaagaaaccgataaattcggtatattatggataactgtagaatatctgcccaaagaacctagaaatttttgtttcaaactgaggattcaaaatccaaattgcaaaacagaagaagaaaatacatacatagatatcatcctgcaagctgaaagtattgacgagttaaaatcgtggataaacaccttaacttctcacaaaagaatcgcattgtcgataaaggaggaaaacgatcctcgttatcaattggcgagaaaaaaaattgaacctcaatttttcgagtttgcttcaagtagctcaacgtcaacagataaattattaacttcattttccagtaaaactttgacattggtagaagagctaaaaaaaaattatatgtcagaggatgatatatactctatcattgataataaggcataccatctgagagtaatttctacaccgatagccacgcagttgactcatttggctttattctctacatttctatctgtatcaaattattatccgtgtgctacccaggcaaacacctggggtacggcaaattggaatgatttgtcctatttagtcaatccactcaaaggaagttcagtacacaagccagccacagtatcgaattcttccaggttttccgttagctaccccgactattatccatacagcctgaaagtcgatgatatacaatttagatcaattttcttttcagtgaatcatgattttttacaagtcccaaaagaacttgttcttttaagatattcatcggtgtggtgcccgaacaataaacaaaaatttgcatctatggcttttgttacccttaaccacatttatgtctatttaaatatttcaggcttttcatatttgagaagaatagatttactagatatcgactcaatcgaatatgataaaagcccaaaacatgtttcttcaagaatgctgcacatgcaaagaggcgatggactcaggtttaatatgtccgtcttttttacagatcgaagagcagttgcctcaaagttacaatttctgatagaaaataaggcaatgcatatcccaaagggcgaaaaagaggttttagaaaatttccaggaattagacgaagagattgagaacgaaaaaaaaatcatcaaagataatttgtcagaatcagaacattattcaaaagattatgattatctattgaagagcacgtatgaccatcattttgagaatactaacgaaacgcctatggaattaatgagcaggaaagtccgtttagaaagggaagcctggtgctactttcaagacaattttaaagtcggaagcaagacgctattccacgttctttttggagacaaatctcaagtttttccaagttcactatttctttgcaagaagggcagtaacttgaataacaattcatactgggagcgcattaggcgcgcgaaagaagatgcaagttgtcaatttgaactttgccgtaagttacagtttcaactgaatcgaacttctaattttatcaaagatctgttatggttgaaggatgacaatgacaacttcaaattagttcttcagcagcgtgtgacaaaaataaaacaaggttattattttgaggtggaagaaggtcccattattgtgaaatttccgctatgccatcccttactccttcgtgtgaggttcataattgcagaatgtatcacctctcaaggagagtccctcaaaaaatgtgacctggcaatactatatgacttcaactatgtgattctattgataagttga

SEQ ID NO: 80189 - DNA, 750 bp, Saccharomyces pastorianus
atggtgacagtcggtgtgttttctgagagggctagtttgacccatcaattgggggaattcatcgtcaagaaacaagatgaggcgctgcaaaagaagtcagactttaaagtttccgttagcggtggctctttgatcgatgctctgtatgaaagtttagtagcggacgaatcactatcttctcgagtgcaatggtctaaatggcaaatctacttctctgatgaaagaattgtgccactgacggacgctgacagcaattatggtgccttcaagagagctgttctagataaattaccctcgactagtcagccaaacgtttatcccatggacgagtccttgattggcagcgatgctgaatctaacaacaaaattgctgcagagtacgagcgtatcgtacctcaagtgcttgatttggtactgttgggctgtggtcctgatggacacacttgttccttattccctggagaaacacataggtacttgctgaacgaaacaaccaaaagagttgcttggtgccacgattctcccaagcctccaagtgacagaatcaccttcactctgcctgtgttgaaagacgccaaagccctgtgttttgtggctgagggcagttccaaacaaaatataatgcatgagatctttgacttgaaaaacgatcaattgccaaccgcattggttaacaaattatttggtgaaaaaacatcctggttcgttaatgaggaagcttttggaaaagttcaaacgaaaactttttag

SEQ ID NO: 80190 - DNA, 120 bp, Saccharomyces pastorianus
atggtaatagtggtatattatataaagaggaaaggcctcgaggataatagaaggcaatgcaccatcaattgctttacccctggtccgcgaccaaatggtgacagtcggtgtgttttctga

SEQ ID NO: 80191 - DNA, 810 bp, Saccharomyces pastorianus
atgtgcggcgatattgtaactttgtctaatttcctaatttatgataataaattaaaatgcgggaataacgaagtttttgctcaatctttagagttaccaatgcctgaggccttgtcgcaatataggaatgaatcggctaactctaagcagtggcttgaggatatactagagcctacaagaaaagtggtatttttaaattatgataactgcccggatattatcgaacaaagcgaaaaggataacattacgaatcacggggaggcagaattgactctacaatgtgtggaaggaatgttattgagcggcgtaccatgcgaagatattggcgtaatgacgttatacagagcacagttaagattactgaagaagatattcaacaaaaatgtgtatgacgggctagagatcttgactgctgatcagtttcaaggtcgtgacaaaaagtgcattattatttccatggttagaagaaattctcaattaaatggaggagcgctgctgaaagagctaagaagagtcaatgttgccatgacaagggccaaatccaagctgatcattataggttcaaaaagtacaatcggctctgttcctgaaataaaatcgttcgtgaacctgttagaagagcgtaattgggtctatacaatgtgcaaggatgcactctacaaatacaaatttcccgacagatcaaacgctattgatgaggcacgcaaaggttgtggaaaaagaacaggtgccaaacccatcacatcaaagtctaaattcgtaagcgataaacctatcataaaggaaattctacaagagtatgaaagttga

SEQ ID NO: 80192 - DNA, 504 bp, Saccharomyces pastorianus
atgaccgcggagatccttagaagaaccctgaagcagttggaagtgagggtagcgtcgttgcactctcaaatgccccaacaggaaagaacaaattccttacatagatttcgagctaacgctgcaagaatcctcatcgctacagatgtagcatccagaggtttggatatcccaactgttgagcttgtagtgaattacgatataccttcagacccagatgtattcatccatagatctggtcgtacggcccgtgctggcagaattggtgacgccatatcattcgttacccagcgagatgtttctaggatacaggccattgaggaccgtatcaacaagaagatgacagagacaaacaaggtacacgataccgctgtaataagaaaagccttgaccaaggtaaccaaggcgaagagggaatcgctgatggcaatgcaaaaggaaaacttcggtgagagaaaaagacagcaaaagaagaagcaaaatgacgggaaaagtttgcgctcttga

SEQ ID NO: 80193 - DNA, 219 bp, Saccharomyces pastorianus
atggcagactttaaatctttaggtctttcaaaatggcttacggaatccttaagagctatgaaaattactcagccaaccgctatccaaaaggcttgtattcccaaaatcttagaaggaagagattgtattggtggtgccaagactggttctggtaaaactattgcatttgcagggcctatgctgactaaatggtcggaagattcctttaggaggagttaa

SEQ ID NO: 80194 - DNA, 1092 bp, Saccharomyces pastorianus
atgaaagtttctggatgggaaaggaatgtgcaaggtaagctagcaccacgtgttgttgatttaagttcattgttagatcctttaaaaattgctgaccaatccgtggatttaaatttgaagctaatgaaatggagaattcttcctgacttaaatctagatatcatcaaaaacacaaaagtactactactaggtgctggtacactaggttgttatgtttcacgcgcattgatagcatggggggttagaaaaataacatttgtggataacggtacagtttcatattcaaatccagtgaggcaagcgttatataattttgaggactgtggaaagccaaaggcagaacttgcggctgcgtctttgaaaagaatatttcctttaatggacgctactggtgtgaaattaagtattcctatgatcggtcataaattagtaaacgaggaggctcagcataaggattttgatagattaagagcattaataaaagagcatgatatcatttttttattggtggattctcgagaaagcagatggcttccgtcgttattgagcaacatcgaaaacaaaaccgttattaatgctgctctggggtttgatagctacttagttatgaggcatggtaatagagatgaacagtcttcaaaacaactgggctgttatttttgccatgatgtggtagcaccaactgacagtttaactgacaggactttggatcaaatgtgcacagtaactagacccggcgttgctatgatggcctcttctttagcagttgaattgatgacttccttactacagaccaaatactctggttcagaaacaacagtattaggggatatacctcatcaaatacgtgggtttttgcataatttttccatcttaaaattagaaactccagcctatgagcattgcccagcatgtagccctaaagttatcgaagcatttacagacttaggttgggaatttgttaaaaaggccttggagcatccactttaccttgaagaaattagcggtttgtcagtcataaagcaggaggtcgaacaactaggcaacgatgtttttgaatgggaagatgatgaatctgatgagattgcttaa

SEQ ID NO: 80195 - DNA, 684 bp, Saccharomyces pastorianus
atgtcgtcagaaagggtcttaaattatgcaccagcttttaaatcatttctggatacatcttttttccaagaattatcgagattgaaactcgatgttctgaaattagattcaacatgccaaccacttactgtgaatctagatttacacaacattcctaaatctgctgatcaagttccattattcttaacgaatcgaagctttgaaaaacacaataataagcgtactaacgaagtgcctttacagggcagtattttcaattttaatgtattagacgagtttaagaatcttgataagcaactatttttacatcaaagagcattggaatgctgggaagatggaataaaggatatcaataagtgtgtttcttttgtgattattagttttgctgacctaaaaaagtacaggttttattactggttaggtgttccctgttttcaaagaccctcttcaacagttttacatgtgcggccagagccgagtttaaaagggctgttctcaaagtgtcaaaaatggtttgatgtcaattactcaaaatgggtgtgtatactggatgcagacgatgaaatagtaaattatgacaagtgtattattggaaaaactaaagttttggcgataagggacacgagtacgatggaaacgtcccttctgacctgcagccatcaagcgtgcactgccgtcgtttac

SEQ ID NO: 80196 - DNA, 1677 bp, Saccharomyces pastorianus
atgtttttgaagaagctattgaataatataagccaagactattgcacaatgctgtatgaatggctaacacagggtattttaaacgacccttaccaagaattcatgacttatgatgatttggaaggtaagacggataacatatttgacgcaagagacagagcgtgggatacgcaatacttcataagaaaagatgttttgttgcgggattgtgactcagaagaggataagaatctactattcaagatgttaaggaccggtattttactcaaagtgattcgagctagcttacaaatacccaccataccttctaatagcagtgatataaccattcaagaaatcaatgatttcgctgacttaatggagggttctaatcttgaactttacgtggataaatgttacagcagagccaatgaaatatttttaaagctattttttcaaggttacgatttgatcaatgtattaaaacatttgcaacaaatttttcttgggtatcaatctggtcataatgttttaaagtttctaacaaaaaatatgggtgagttgaccaaacactacaggaatgataataatgcaaactatgacaagctgctacaaaattttgagttagagagacaatccgaaaatccaaacaacctgatgaggcaactcctgatgatacagttcgatacagaaacacttccacaagtcttatcgcactacctccaaatttatccagaagtacctgagaataactcagcaaatgacgacagcgacccattgatgcacgcaaataatttcaagaatatgaatgccattctttttgatgaattgagcaaagaacgaacgggggcctaccatggatccaatctagaactatatactccaaaaagcgcaatttatcatttaaaatttgacatcaacataccttatccattgaatattattattagtaggacatgcatgataaaataccaaataatcctgcgctaccaactagttttacaataccactcaaggcttttagatgagacttggatggacttaaacaaaacacccagctggaaatacagaggctattcgcacactgtgaagaggaggatagtaagggccacgagagtgctgcatgctaaaatgaaccacttcatcaaaaccatcatggaatatttcaaccaaaacgtaattgataaagaggtatactcattagaaaagtgctacagaaatcctactcttgccgttgccatccaaaatgaactagaaggtggattaacaaatataatgacaaatcgttgcttgtctgacttgattccactacagttacaaatatttgacattgtatataagttttgcaagttcatcaaatctatgagagcaaaattatgtcaactggaccccgtactatatgagaaacacaaaagcgggatgatgaaaacactaaacgaaggctatcgtacaaacaatggcggtcaggaagatgttggttaccaagaagatgccgccctggaattaattcagaagctgattgaatacattagcaacgcgtccagcatttttcggaagtgtctcataaactttactcaagagttaagtactgaaaaattcgacttttatgatagttcaagtgtcgacgctgcgggtatagaaagggttctttactctatagtgcctcctcgctcagcatctgcttcttcccaaagatga

SEQ ID NO: 80197 - DNA, 753 bp, Saccharomyces pastorianus
atggaaatcaaagaggtagatgacagggcagagctactgagatataccaacaatattccgttacttggaaagctagtcaaccatcaaccattatggagtacaaatcctaagttaaagtccttttcgctagaaaaaatatcagcccctgatcaaaggcgtgtacaagaggcattagttgtaaaagacctattaaatgtattgattggacttgaaggaacatacatcagatattttaatgattatgaacctagtgacccagagacaccgatagaatttaagattgccaagaaaatggatccatcattcaaaacattcagtagaagaattgttaggtatggtaagcaatacatgatattaacaagggcgtatgaaaaatggtctgacacaagctttgggatggttttgcaaagatttgcttatgaaatcagaagattcttagaagacgtctacttaaaaacgttagttgaaaggcttgaaagggactttaacaaagtaccaaatttttctatcagagaactggaacaaatcattaatgaaacagaagtaaacaaacaaatggagttgctgtacaatatttatgaagaaatttgtagagaaatagaagaaagaaggacgaaccagtcttcacaagaagatttcaataattttatggacagtatgaaaaatgaaagcagcttgcacttacgattaatggtagcatttgacacaacagtatatccggtagacctgcaggcatgcaagctggcactgccg

SEQ ID NO: 80198 - DNA, 267 bp, Saccharomyces pastorianus
atgatagtgagatcaaagccagaaagcaatggagaaaaaaaattaatgaaccacgatgaaccaaatgatcaatacaaccaaagatactaccctagtgaggtgtatgctgacttggtatcacacttcatgaattttgcatatggcaaagtccacgaaagtgggcttcagaaaaaaggcgtgcggtgtgtagatgtatcaattagtggatgccagttttggaacgggattccactttccgcaagttggtgcacgtcgttagtgacataa

SEQ ID NO: 80199 - DNA, 300 bp, Saccharomyces pastorianus
atgacgtgcatgcaggttcatgagcatgctccgataattgcgacagggactaaacaaataaagatatggacgacatctggagatcttttgaattcttttaaaaactcacataataatggcgtaacaagtacattagccgctacgggaatcccaaagtcactgtcctactcttccacttctgatgcatttttatcttcgatggctttccatcctcatagaatgatgattgcggccaccaattctcacgattctattgtaaatatctacaagtgtgaagacgagagaattgattatttttga

SEQ ID NO: 80200 - DNA, 2355 bp, Saccharomyces pastorianus
atgtcaatagattacaaaaacacgcaaagtgaattaatcaagaaaagggttatatgtatttgttacaggttagtacctgattggggtgttcctggcatgtcagctacaaatggctcagccatgataaatagtgggaacccgttgacaatgactgcatcgcagaatataaatggtccatcttcaagatattatgaacgccagcaaggaaatagaacatccaacttgggccacaataatcttccattttatcattctaataataccaccgatgaacaaaaagctatggctgtctttgttttggcatcattcgttcgaaactttcctctggggcaaaaaaattgttttagtttggaactggtcaacaagttgtgcttttatattgaaaattctgagatacccctactaagacagtggtgtgttattttattaggtttattgtttgctgataaccccttaaacaggtttgtatgtatgaatactggtgctgttgaaatattactaaaatctttgaaggaccctgtacctgaagttagaacagcttctatatttgcattgaagcatttcatatctggatttcaagatgcagaggtaattttgagattgcaacaagaatttgaagaacagtatcagcaattacattcgcaattacagcatctccaaaatcaatcccatctacaacaacaacagtcccagcaacagcagcagcatcttgagcagcagcagatgaaaattgaaaagcagattcgtcattgtcaagttatgcaaaatcaactagaagttattgatttgaggaagttaaaaagacaggaaattggcaacttgatctcaatcttacctttaatcaatgatggttcatcattagtccgtaaggaactagtcgtatatttttcgcatattgtgagtcgttactctaacttttttattgtagttgtattcaatgatttgttggaagaaataaaacttttagagaaaagtgatatcaatactcgaaacacttccgataagtattcagttagtcatggttccattttctacactgtttggaaatctctcttgattctagccgaagatccctttttagagaacaaggaattatccaagcaggttatagattatattttgcttgaattaagcgcccataaggaacttggtggaccatttgcagttatggaaaaatttttgttgaaaagaagctcgaaagctcaccaaactggtaaatttggatttaattcttcgcaggttcaatttgtaaaaagttcattacgatcattctcaccaaatgagagggtagataataatgcattcaaaaaagagcaacaacagcatgacccaaagatatctcatccaatgcggacatctttagctaaacttttccagagtcttggttttagcgaatccaatagtgactctgatactcaatcatcaaatacttcgatgaaatcgcatacctcaaaaaagggtccctcgggcttatatttattgaatggcaataataatatttatcctacagctgagactccaagattccggaagcatacagaacccttacaattgccattaaatagttcctttttagactattcacgtgaatatttccaagaaccacaaatgaaaaagcaagaggcggatgaacctggcagtgttgagtataatgctagattgtggagacgtaacagaaatgaaactattatccaggaaacacagggggagaaaaaattatcgatttatgggaattggtccaaaaaattgattagtttaaataacaaaagtcaaccaaaactgatgaagtttgcccagtttgaagatcagctgattactgcagatgatagaagtaccattacagtttttgattgggagaaaggaaagactttgtccaaattctccaatggtactccttttggcacaaaagttactgacctgaaactcattaacgaggatgactccgcccttttattgacaggttcttcagacggtgttatcaaaatatacagagactaccaagatgtcgacacctttaaaattgtatccgcctggagaggcttgaccgatatgttattgacacctagatccacaggtttactaaccgaatggttacaaataagaggatcattgttaacaactggtgatgttaaggttatccgtgtctgggatgcgcatacagaaacggttgaagtggacattcctgcaaaaacatcatctttaattacatccttgacggctgatcagctagcaggtaatatcttcgtagcagggtttgcagatggctccctgagagtatatgatcgccgtctcgatccaagagattccatgatacgtcgctggagagctggaaatgataagcagggagtttggatt

SEQ ID NO: 80201 - DNA, 1584 bp, Saccharomyces pastorianus
atgccggagatttatggacctcagccattaaagccactcaatacggtgatgagacatgggtttgaagagcaataccaaagtgaccaacttttacaatcactcgcgaatgatttcatattctactttgatgataaacgacacaaaactaatggaaatccgattcctgaagaggataaacaacgagatgtaaatcgttattaccagccgattaccgattggaagattatgaaagatcgacagaagacagtaagtgcggcccttttattatgcttgaatttaggtgtcgatccccctgatgttatgaagacacatccctgtgccagagttgaagcatgggtagacccattgaatttccaggactcgaagaaagcaatagaacaaattggtaaaaacttacaaacacagtacgaaactctgtctttgagaacacgctataaacaaagcttggatccttgtgtagaggatgtcaaacggttttgcaactcgctaagaagaacttctaaggaagataggatacttttccactacaacggacatggtgtgcctaagcctacaaaatcaggtgaaatttgggttttcaacagaggttatacacaatatattccggtatctttgtatgacctgcaaacttggttaggtgcgccatgtatatttgtctatgattgcaacagtgctgaaaatatattaatcaactttcagaagtttgtgcaaaagaggattaaagatgatgaagagggaaatcatgatgttgccgcgccatcaccaacttcagcttatcaagattgtttccaattagcctcttgcacttccgatgaacttttacttatgagtccggaactacccgcagatttgtttagttgttgtttgacctgtccaatagagattagcatccgtatctttctcatgcagtcacccttaaaagattctaaatataaaattttcttcgaaaatagtacttcaaatcaaccgtttggtgatagtaagaactcgttcaagtccaaaatacccaacgtcaatatccctggaatgttgtcggataggagaacgccgttgggagaactaaattggatttttacagctataacggacacaattgcatggacatccctcccccgaccacttttcaaaaaattattcagacatgatttaatgattgctacgcttttcagaaattttcttctagccaaaagaataatgccgtggtacaattgccatcctgtatctgatccagaattaccagatagtataactacacatccaatgtggaaatcttgggatttagccatggatgaagtactgactaaaatagtcattgatctgaaaaatgctcctcccgctactgccttagagagtcagatgattctacaacaacaagaaaccttacagaatggtggcagctctaagtcgaatgcccaagatacgaaagccggaagtattcaaacacaatcgagatttgcagtggccaatttaagtacaatgtctctagtaaataaccctgctctccaatcaagaaaatctatatctttgcaagctcacagcaacaattacaagcagcagcaacaacaacaaacaacaatttacagg

SEQ ID NO: 80202 - DNA, 399 bp, Saccharomyces pastorianus
atgttaattccagctaatacggacattgtaatgacttatcaattcgataaagctcttctgcaatttgccgagtatccaccagatgcaaaccatggttttgaaatcgatgcagctgtaatcaccgtgctatctttggagtcctcatcgtctctttatgaaatgagaacctctactctattgttatccctgtctacaccggattttagtatgccgtataacgtcatcattctaacatctacaatcatgggactcatattcggtatgctatacaatttgatggtgaagagaatggtcaccgtcgaagaggccgataagattacgttgcaatctggcttaaaatacaaattgctaaagctaaaggaaaagttcctagggaaaaaaaagactaaaacagactaa

SEQ ID NO: 80203 - DNA, 138 bp, Saccharomyces pastorianus
atgagagtttacgtatcctctcttcaaataacttctactacctctccgcaattgcaagaagacgatatcatcttagataaatactatttacaagcggccgatagaaaaagacctgccacttggagttcacgatgttaa

SEQ ID NO: 80204 - DNA, 450 bp, Saccharomyces pastorianus
atggtgtaccagttgcacaaacctttggacttaggcgaagacggggaagtaagggatgatatcaacaagaaggaggttgaaacgaacgaatcatcctcaaacgccaatactggcctggagactttaaaagcgttagaaaatttggaaaatgttacaatccctgaacccaaacacgaagtcccaaaggtcgtcgatgatactgccatattcaagaaaaggtcagtagaagaagtcattgaaagagagtctacatcttcacataagaaagtgaaattcgttgaagaaacaaccgtggataatggcgaagaattgattgtaaaaaaagctgtaagccaaactaaggaagaagagaagccaatggaggacagtgaagatgaagaacaggaggagtttgaaattcccgctatcgaattaagtgatgacgaagaagaggaggaagaagaagaataa

SEQ ID NO: 80205 - DNA, 921 bp, Saccharomyces pastorianus
atgcttgttgctttcatctctttaccaactccctttcccattcgagttccgctgggtggtattaattccctttgtgaagttttgttgggagttagtaacaaatatttaccgttaaaaaaagaattgcgtcgtgataatgaactaaatggggtcatcaataccatcttacctcaaatacaatttcaaggcattaggttatgggaaattatggtttcaaaatatggcaaatgcggtttatcatttttcgaaggaatcctttcttccattgaacttttcattccattaaaaaagaaaagtaacaatgaaattgattttaatgttgttgggtctttaaaatttgagtttgctactgttttcagattggtaaatatgattttgtctcatttaggccaccaactgaacataatcagcgtcatatcccaattaatcgaagtggcgttgttcttatctcatgataaaacattgattgattctttattcaaaaatcgtaaaagcatcatgaaacaacagactaaaacaaaacaatcaaagaggagtaaaagtgccgaaggtgcattttctgatatttatacgcacccagagctatttgtgtgtaaaaattccatgaattggttcaatgaaatcaatgatttttttattactgcactaaataattggattttgccttcaactccacatattcaaattttgaaatatagtatcacgcaatctttaagattaaaggaaagatttggttatattccagaaagctttgttaatctcctgcgttgcgaggttcttcacccaggtagtgaacgtgtttcaattttaccgattgcaatatcactattaaagaatatcaatgatgatatgtttgaattactgtgtcatcaaaagtgccagtcggtatggtgtaccagttgcacaaacctttggacttag

SEQ ID NO: 80206 - DNA, 549 bp, Saccharomyces pastorianus
atggccactgcgttgcagatcgctcagctgactttgaagcatcgccagaataaggtccaacatcaaaggattgtggcatttgtgtgtagcccaataagtgattctcgagacgaattgatcagattggcaaaaacactgaaaaagaataatgttgccgtggacatcatcaattttggagagattgaacagaacacggagcttttggatgagttcatagctgcagtgaacaaccctcaagaagaaactagtcatttgcttactgtgacgcctggccccagactgctgtacgagaacatcgcatcttcacccataattctcgaagaaggatcctccggtatgggcgcctttggtgggtctggcggtgattccgatgccaatggcacatttatggacttcggggtagacccatcaatggacccagaactggcaatggccttgcgtctgtctatggaagaagagcagcaaagacaggaaaggttaagacagcagcaacaacaacaagatcagcctgagcagtctgaacagcctgaacaacaccaagacaaatag

SEQ ID NO: 80207 - DNA, 288 bp, Saccharomyces pastorianus
atggtattggaagctacagtgttagtgattgataattcagagtactctcgcaatggcgactttcctaggacaaggtttgaagcccagatcgactcggtagagttcatatttcaagccaagagaaacagcaatcctgagaatacagtgggtcttatctctggtgctggcgccaaccccagggtgtatctacgtttaccgccgagtttgggaagattcttgctggactacacgacacgcagatcgagggtaagctgcatatggccactgcgttgcagatcgctcagctga

SEQ ID NO: 80208 - DNA, 591 bp, Saccharomyces pastorianus
atgcaacgtcacgtcaaagttgacggtaaggttagaactgacaccacctacccagctggtttcatggacgtcatcactctagatgccaccaatgaaaacttcagattggtctacgatgtcaagggtagattcgctgtccaccgtatcaccgatgaagaagcctcttacaaattgggtaaggtcaagaaggtccaattaggtaagaagggtgttccatacgttgttacccacgatggtagaactatcagatacccagacccaaacatcaaggtcaatgacactgttaagattgatttggcctctggtaagattactgatttcatcaagttcgatgccggtaagttggtttacgttactggtggtcgtaacttgggtcgtatcggtactatcgttcacaaggaaagacacgatggtggtttcgatttggttcacatcaaggactccttggacaacactttcgtcactagattggacaatgtcttcgtcattggtgaacaaggtaagccttacatttctttgccaaagggtaagggtatcaagttgtctattgctgaagaacgtgacagaagaagagctcaacaaggtttgtaa

SEQ ID NO: 80209 - DNA, 1413 bp, Saccharomyces pastorianus
atgttcttaggccaagttagactgtatccaatgattcataatttagcacatgcttcccaacaccaatggcacagtttgaaacctcgcgttatcgatgaagttgtgtccggtgatattttaatcaaatggacttacaaacagacaaagaaaagacattatggcccacaagattttgaagttcttcgattattgggtaagggtacttttggccaagtctaccaagttaagaagaaagacactcaaagaatttatgcaatgaaagttctctccaagaaagttattgtcaagaaaaatgagatcgcccacacaattggcgaaagaaatatcctagtcacgacagcgtccaaatcgtccccattcattgtcggattgaagttttcctttcaaacaccaacagatctctatttggtcactgattatatgagtggtggagaattattctggcatttacaaaaggagggccgtttttcagaagacagagcgaaattctatatcgctgagttagtcctagcgttagaacatttacacgataacgatatcgtttacagggacctaaagcctgaaaacattctactcgatgccaacggtaacatcgctctttgcgattttggtctttctaaagctgacttgaaggatagaacaaacacattttgcggcaccacggaatacctggcaccagaattgttactggacgaaaccggctacaccaaaatggtcgatttttggtctctaggtgttttgatatttgaaatgtgttgtggttggtcccctttctttgcggaaaataatcaaaaaatgtaccaaaaaattgcctttggtaaagtcaaattccccagagacgtactgtcacaagaggggaggtcttttgtaaagggtttactaaacagaaaccccaaacatagactcggtgccattgatgatggaagagaactacgagctcatccatttttcgcagatatcgactgggaggccttgaagcagaaaaaaattccaccacctttcaaacctcacctagtctcggagacggatacctccaattttgacccagagttcacaacagcttcaacttcatacatgaacaagcaccagccgatgatgactgctaccccgctatctccagcaatgcaagcaaagtttgctggtttcacctttgttgatgagtccgccatcgatgaacacgttaataacaacagaaaattcctacaaaactcgtactttatggaacctggctcctttatcccgggaaatccaaacttacctccagacgaagatgtcatcgatgatgacggggacgaggacatcaatgatggattcaaccaagagaaaaatatgaacaacagccattcgcagatggacttcgacggcgaccaacacatggatgacgaatttgtcagtggaagattcgaaatatga

SEQ ID NO: 80210 - DNA, 138 bp, Saccharomyces pastorianus
atgaagatgttcttgtttctgaacgaatcatacatctttgatagacttcgtatgtggagtactgttttatggcgcttatgtgtattcgtatgcgcagaatgtgggaattccaattataggggtgccggggtgccttga

SEQ ID NO: 80211 - DNA, 3318 bp, Saccharomyces pastorianus
atgatgatatcgggtattgttggcgacggcagtgaatacgattggaatgaagaaaaaacttttatctccagggatagtggtttaacatggaggttagtccataattccactggtttatatactactggtgatctgggaaatattatcatgtatattccatatcgttcgaatgaaaatggcgatgtgccttctaaattttattattccttggatcaaggtaagacatggggtgaatatgatctaatcatgcctatctatccatacagattaatcagcacaatatcagatggatctggttcaaaatttattctaacaggaacgtccattacagatgatccaatatccattacatattcaattgatttttcagcggtatttgattataaatcatgtgaagagggtgattttgaagattggaatctagcagatggaaaatgtgttaatggcgccaaatacaagtacagaaggaggaaacaggacgcccagtgtttggtaaaaaaagcactcaaagatttgagtttagatgaaacgccttgtaacagttgtactggatccgactacgaatgttcgtttgaattcgttagagatgcaaagggtgactgtataccagattataatctgattgccctttccgatatatgtgacaaatcgaagggtaaatctgtgctagtaaagccattacaactaatcaaaggtgataaatgtaaaacacccatgaaaattgaacccgtagacattccgtgtgacgaaattccaaaggagggttcgagtgacaaggaaatggtgactactgaaaacaaattcgactttgaaactaaattttaccaatacttcgatacagttgccgacgaatctttggtcatgctgaattcgataggagacgcctatatatcccacgatggtggacaaacgataaaaaggtttgacactgacggcgaaaaaattgtcgaagttgtgtttaacccatatttcaattcttcagcatatttgtttggctctaaaggtaacatattcttaacacacgatagaggatattctttcatgatagctaaattacctgaagccaggcaattaggcatgccactagattttagtgctagagcacaggatacttttatttactatggtggcaagaattgtgaatcaatcttaagtccagaatgtcatgcagtagcatacctcaccaaagatggaggtgaaacttttacagaaatgcttgataatgcaattcattgtgagtttgcaggcacactattcaaatatccgtcaaatgacgatatggttatgtgccaagtaaaggaaaagttttcgcaaacaagaagtttagtttcttcgatagattttttccaaggtgataataaaattatctttgaaaacattatcggctacttgtccactggtggctatattattgttgccgtacctcatgaagacaatgagttgagggcatatgtaactattgatggtactgagtttgccgaggcaaaattcccgtatgatcaagatgttagtaagcaagaggcattcactattttaggatctgagaaaggatcgatatttttacatttagcaacaaacttagaatcaggacacgattttggaaaccttttgaaatccaactcgaatggtacttcttttgtcactttagagcatgccgttaatagaaacacattcggttatgtcgactttgaaaaagttcaaggtcttgaaggtattattatcaccaacatcgtttcgaatagggaaaaggttggagagaacaaggaagacgaacaattgaagacgaaaatcacctttaatgacggttcagattggaactttttgaagcctccaaagaaggattcggaagggaaaaagtttccctgtgattctgtatcattagataaatgttctctacatttgcatggttacactgaacgtaaggatatcagggatacatattcctccggttccgcgttaggaatgatgtttggtgtcggaaatgttggcgataagcttctaccatatgaggagtgttccacttttttaaccactgatggaggagagacgtggactgaggttaaaaaaggcccccatcaatgggagtacggtgatcatggtggagtcttggttttggtccccgaaaacgcagaaactgattctatttcttactccaccgattttggtaaaacatggaaagattataaattctgtggcgacaaagtcctcgtaaaggatataatcaccgttcccagagattctgctttgaggtttttgctatttggagaagcaaaaaacatgggtagtggttcattcagaacgtatacaattgattttagaaacattttcgagaggcaatgtgagtttgatattacgggtaaaaaaagggcagattttaagtactctcctctgggttctaatactggttgtctatttggtcatcaaaccgagtttttacgtaaaaccgatgaaaaatgttttattgggaatattccactttctgaattttcgaggaacgtcaaaaactgttcatgtacgaggcaagatttcgaatgtgactataatttttataaagccagtgatggtacttgtaaattaatcaaaggcttaagttcggcgaatggtgccgatatctgcaaaaaggaacccgacttaattgaatactatgattcctctggctatcgaaaaattcccttatcaacctgtaaaggtgggctgaaattggatgcacatttagcaccacatccttgtccgggaaaagaaaaggcattcagggaaaaatactctataaacaccggcgcttatgcgctggtttttgttacaattcttctcgttattttctttgccgcatggtttgtatacgatagaggtatcaggagaaatgggagattttcaagatttgaagaaatcagattaggagacgatgggctgatagaaaacaataggaccgatagagttgtcaacatcattgtaagactaggattatgcatttctttaatcaccaagtctgcgtttcaacgcgcgaaggcaggtacagcgcaactttcttcaaaatttagggcaaggtttggcaacaaaaaaggtgccacttactcttcgctgcttcatgatcagctttcagatgaaccagatggcttgcatgaagattccaacgatttatccagtttcagaggtcaaggtagtaattctgaaattgagcaagaagatgttgacacatctcaacaagagcatacgtcgcggacagacctacttggtgctagcaatattccagacgctttgccagcgcgtagtgcttctcacgagtccgatttagcagctgcacgcagcgaagacaagtag

SEQ ID NO: 80212 - DNA, 669 bp, Saccharomyces pastorianus
atgtatgttggaagagagatttacacaactaatgatggagtatccttttcccaagttaaaccttcttttggaaaaattgatggtcatattagcacggcacgctgtgactttattaaatctagtgaggattctgatctgggcggtaatgatgcttcgatactctgtcttttccgaaacactgagtacattgaaagtacaggctcaactattgacaagtctgaattgattttaagtgccgatggaggtgaaacattcaaagaattagtccagttcaaagataaggttgttagtcgatacgagatacttaagcatcatgtgatcgttttgacacaagatgatatgtataatgaaatgtcatcaacaaacatttggatatccaatgatgtatccacttttcaagtggctcgtacacctactaagatacggcacgttaatatgggacaaattcatgaagattccatcggaagaatcgttttacctgtatccagagaaagagatgatgaagacagcaaccaaccgggagctgctgaagtgttaatatcagattctgaaggactaaaatttttgcctataaattggataccaaacaatcagtttggatatatcaatgtagcttatccaggtttcttaaaaggaacatttttttggttcgtttcatcccttcattga

SEQ ID NO: 80213 - DNA, 117 bp, Saccharomyces pastorianus
atggcattgtttcgtgccctgtatattatttgggtattcctactcattccactgtccaatgcagaagaattcaccccaaggttaccagaactttgtcaagatatgtattcgatatag

SEQ ID NO: 80214 - DNA, 954 bp, Saccharomyces pastorianus
atgacagttggtgaaatgcaacatgctactgatgagaccaagaggttgtatacaagtgcgtcaagacacgaacttaatgagttattcaacttttcccacactgatgtcgggacttcgcccaagttccgtcaaaatttgatcccatatgaactaaaggattggaaggttgcccttgctgaacttttcagatacgttaacggaactgattgttggtcaacaatttatctggaaaatcacgaccaacctcgttcaattaccagatttggtgacgattctcccaaaaaccgtgttatttctggtaagttgttgtctgtgttgttggtgtcactgagcggtactctatatgtgtaccaaggacaggaactgggtgaaatcaatttcaagaactggcctatcgaaaaatacgaggatgtcgaagttagaaataactatgatgcgatcaaggaagagcatggagaaaactcgaaggagatgaagaggtttttggaagcaattgcccttatttccagagaccatgctagaacacctatgcaatggtctcgtgaggagccaaatgctggtttttctggtcctaatgctaaaccatggttttacttgaacgagtctttcagggagggaattaacgctgaagacgaatccaaggaccccaactcggttttgaacttctggaaggaggccttgagatttagaaaggcacacaaggatattactgtgtatggatatgattttgagtttattgatttggacaataagaaactgttcagcttcacaaagaaatacgacaacaaaacattgtttgctgctttgaacttcagctctgattcgatcgacttcacgattccaaacaatagctcatcgtttaagttggaattcggaaactacccaagaagtgaagttgatgcgtcttccagaacattgaagccatgggagggcagaatttacatatctgaatga

SEQ ID NO: 80215 - DNA, 888 bp, Saccharomyces pastorianus
atgactatttcttctgcacatccagaaacagaacccaagtggtggaaagaggccacaatctatcaaatttatcccgcaagtttcaaagactccaacaacgatggttggggtgatatgaagggtatcgcctccaagttggagtacatcaaggagcttggcgccgatgccatttggatctcgccattttacgactcgccacaagatgatatgggttacgatattgccaactacgaaaaggtctggccaacctacggtacgaacgaggactgctttgccttgatcgaaaagacacataagctcggtatgaaatttatcactgacttggtcatcaatcactgttccagcgaacatgaatggttcaaagagagcagatcctcaaaaaccaatccaaaacgtgactggttcttctggagacctcctaagggttatgatgccgaaggcaagccaattcctccaaacaattggaggtcttactttggtggttctgcatggacgtttgatgaaaagacacaagagttttacttgcgtttgttttgctccacccaacctgatctcaactgggaaaacgaagactgcagaaaggcaatctacgaaagtgccgttggatactggttagaccatggtgtagacggctttagaattgatgtgggaagcttgtactccaaggttgctggtctaccggatgctcctgtgattgacgaaaactcaaagtggcaacccagtgatcctttcacaatgaacggaccacgtatccatgagtttcatcaagaaatgaacaagttcatcagtgttggaataaaaatcaactatcatctactaactagtatttacgttactagtatattatcatatacggtgttagaagatgacgcaaatgatgagaaatag

SEQ ID NO: 80216 - DNA, 1017 bp, Saccharomyces pastorianus
atggaaatgactcactatgaaaagacacctttgattcgtcaagtttttaacaatggtaagactaattcgtggttttacgttaagcatgagattttacaaccaggtggaagtttcaaatcgagaggaatcgggcatttgataaggaagaataatgaagaagcactaagcgagggttctgggaagcttgctgtattttctagctctgggggaaatgctggtttagcagcagcaactgcctgcagatcgatggcacttaattgcagtgtagtggttcctaaaactacaaaacctagaatggtaaagaaaattcaaagtgcaggagccaaagtcattatccatggtgatcattggggggaagcagatgaatacttgaggtacgaattaatggcgcaagaaagccaacatggttcgaagacactatatgtgcacccgtttgataatgagacaatttgggaaggtcattctacgattgtggatgaaatcatagaacaattgaaggaaaatgatatatccttacctagggtgaaagctttagtttgtagtgttggtggtggtgggctatttagtggcataattaaaggcctagagaggaatcaccttgctgaaaaaattccggtcgttgctgtagaaactgccggttgtgacgtattgcataagtctctcaaaaaaggtagtccagttactcttgaaaaattgacaagtgttgcaacttctttgggctccccatacatagcatcattcgcgtttgagagttttaacaagtatggatgtaagtctgtagttttatcagatcaagacgttctggcaacatgcttgagatatgccgatgactacaattttatagtggaaccagcctgtggagcatccttacatttatgttatcatccagagattcttgaagacattctggaacaaaaaatatatgaggatgatatcgttattataatcgcatgcggtggatcatgtatgacgtatgaagacttggtgaaagcgtcgagcacattaaacgtatcataa

SEQ ID NO: 80217 - DNA, 1368 bp, Saccharomyces pastorianus
atgtttgcctttttggatttaataaggaaaaatattgcaagggcagtttcagacaacttcattgttgacttgaaaatgaacacgaacgactacaaccttggccaaactgtttatctagttatatttctagcaagtgaactacccggcaatctgctgtccaaaagatttggtccagaaagggtcattccggttcaaattgtgttgtggagtgtaatttgtattactcaagctggtctgaaaaatcgaggtcaatttattgctactagatgcttattaggaatggtgcagggcgggttcatcccggacaatattctatacttgtcatattattatactggagctgagctcacattccgcctaagtttcttttggtgtgctatacctcttttccaaattttaggctctcttttagcttccggaatcatagagatgaggggtattcataacttagctggctggcagtacctatttataattgaagggtttctgtccctttctgttggcgtggcatccttttatttaatgcgtagaggacctacgcaaactggtgagtctgcatttcacaaaggaaaatcgttattcactgagtatgaggagaaaatcatggttaacagaattttaagggatgacccatcaaagggtgacatgagtaaccgacaaccagttaccttcaaggagattttgtacactctaacagaatttgatctatggccattgtttatccaaggtattacagcattcatatctcttcaaacagttggttcctatttatctctgatattaaagagtttaaattactctacatttctttcgaacattttagcaattccaggccaagcactgctgctaataaatttaccattagcggcactgttatcgcgtaaattgaaagaaaaatcactctgtgtgggaattgccaacgtttgggtgctccctttcatagtttctctggtcgctttaccgactgacacaaacccctggatcaagtatatattactaaccggtatacttggtcttccctatacacattccattcttgctggttgggtctccgagatttcaaattcggtaagatcgcgtacagtgggtacagcgttatacaatatgagtgcccaagttggagcaatcattgcttctaacatgtatagaaatgatgataaaccttactatactagaggtaacaaaatacttctaggattcacttgcttcaacatttgtatggcagttgctactaagttttactatattagtaggaataaatacaaggaccgcaaatggaactctatgacaaaagaagagcagatcaattacttggacacaactaaagataagggaatgaagcgtcttgattataggtttattcactag

SEQ ID NO: 80218 - DNA, 330 bp, Saccharomyces pastorianus
atgtccgtacaaaaagaagaatacgatattgtagaaaaggcccaattatctgtgtccgcagaaagcttaacatcagattcggagagtatttcacataacccatttgacgattttcataaagcagagcgttggagaaaagtctatgaatccagtggttatgaaggcttgtctaaattcgatcctgagtttacatggacaaaggatgaggaaaagaaattggtaagaaaaatggacttgaagattttttttgtgggtttttattatgtttgcctttttggatttaataaggaaaaatattgcaagggcagtttcagacaacttcattgttga

SEQ ID NO: 80219 - DNA, 282 bp, Saccharomyces pastorianus
atggtttactatagagcccttaggcaacatttttgtcaaacaaagtcgtttaagcattcctcgaaaagaaacgtctctatgatggtaataggcaaacatcgggcgtaccttaaaagtcttagacatcacataaagggatttataatcacattcctcgtcagtttttccagaaacctccatggaaaaaccctggacgtggggtcgattaacgctacgcgtatttcttcgcccccggataatttcctaaactgggttttttctttttattcctgttcagagtaa

SEQ ID NO: 80220 - DNA, 99 bp, Saccharomyces pastorianus
atgagaaactacatgaagcggtacttgaacttgggagagtccgtatacgactattcagttgccacttgtggctcctcgacgtatttcgctaggaaatag

SEQ ID NO: 80221 - DNA, 459 bp, Saccharomyces pastorianus
atgcaactactcaccaagggtgccggcgcagaggcggggaaccaaaggtccttcatcctctacacggacctgagcagcgagtccacctacgccctgacctatctcatgggcgcagctgtcaaccagggagacaccgtctacattgtccactgggagccctcgaagcccacggacgactcccagatgttcgccaacgttgccagaatcagaaagcacgtcatgcacctgtttgactgcgtcgcgggcgtgctcgacgacctcgacgtcgtcgtcctctccttgacccatccgtacccaaaacacctcctcaacgagatgatccacggcctcaagccagtcgccctgtgctgctccctctcggtcatcctgtccactctgcagaacttcgtctgctctgtgcccatcctcgcggttagaaagaagctgaaacgtgccaagcgcaagggcatcagcgagtga

SEQ ID NO: 80222 - DNA, 474 bp, Saccharomyces pastorianus
atgcagaagagcatattgctgactaaacctgacggaacacaatcgaatctacacagcatcaaaacggaaacgcccaccacggtggagttcgactcggagcagatggaaaggggccacagggaaagaggtcgtagcaagaagaaaagaggcgaacgagactcaaacgtgagcagtctgtcgcggtcgagaagcagggccagtagccgcagcagagtaagggaggaagagttcctcaagtggaccgtgttgaggcaggacccctcgatgcggttgagggtcgtggatgtggattctgaagaggaaggtgagggcaacgacgaagatgacgacgacggcgacggcgacgatatggacgaggaagagtccgatgaagagcaagtgagcgatatagagaacgatttagagattgacgaggagttccactacgatctgggcatgaaagtgttacccaacttttgtaccagcataaactaa

SEQ ID NO: 80223 - DNA, 858 bp, Saccharomyces pastorianus
atggtttattcgagaaggccatctaccatcggcctggatagagccctaggtaggacaagaagtctttcgtcacaatcttttgataacgaaacgtcgcctgcgcatccaagatctcccaacgaccatggttcaagactactaaggttttattcctacgctgacatgttgtccgatgacaacaataacaacgttagtaatgcgacatcaacatcatcaactgcgaaccccttgagaagacccccaatgcaaggtcactactcgttctcgtcgtcccttttgaattctccttctcatttgccttcccccccatcagcttcggcatcaccacctcaacatatgaacttcaccaaccctttcatcatatctagacgttactctaacacaacgatcaacaatgccaatgggggaaccagcgctagaagcactacgggggccgcactatcaagatcgccatcgaaccaacagtacttacttaaacaacaaaggtcaccttcagggagcgcccgttcaagaagaaacagcaataggcccggcagtgctgccaacattatgatcgggaaacctaaatccaaattccatatcgaatccagtggcagtgaagggttttcttccgaagaggaggacaacactatgattgaaagagataaactcaatctaaagcaaaaattgcagtcacaactggcacaaccaccatcaattgccaacatggttaacgataatcacaataatactaataaacacaagaatactattaataataacatcaaaaatagccctgcgttcacaaactcgaatccaagttcaaaatcaaattcaaactctacaataacctctatgaatccagacacaaccaaataa

SEQ ID NO: 80224 - DNA, 252 bp, Saccharomyces pastorianus
atggataccagcaaccacaaccaagaccacgactcccacgtggcggcacagagggagaacgacaataattatatgccaccttccccctccatgagcgagagttctatgatttttgaaagaaatgtagaggacccatcatacctttataaacgggttcaacaacgtgcaaatctcttctggcgagcacagaccgttgtcatcatatatctatatagacttcttattagcaagaggtgcggactcttgacttag

SEQ ID NO: 80225 - DNA, 609 bp, Saccharomyces pastorianus
atgagcatccattcattcatcaataataatcttcaaccaggtaagggtcatttagtaggtcgtttagcttccgttgttgctaagcaattattaaacggtcaaaaaatcgttgttgttagagctgaagaattaaacatttctggtgaatttttcagaaacaaattaaagtaccatgatttcttgagaaaggctaccgctttcaacaagacccgtggtccattccatttcagagccccatctagaatcttctacaaagctcttcgtggtatggtttctcacaagactgctcgtggtaaggctgctttggaacgtttaaaggtctttgaaggtatcccacctccatacgataagaagaagagagttgttgtcccacaagcattgagagttttgagattgaagccaggtagaaagtacaccaccttgggtaagttgtctacttccgttggttggaaatacgaagatgttgttgccaaattggaagcaaagagaaaggtttcatccgctgaatactatgccaagaagagagctttcaccaagaaagttgcctctgctaatgctactgctgctgaatctgatgttgctaaacaattagccgctttgggttactaa

SEQ ID NO: 80226 - DNA, 345 bp, Saccharomyces pastorianus
atgccaaacttagaacagaaagagattgcagataatttgacagaacgtcaaaagcttccctggaaaactctcaataacgaggaaatcaaagcagcttggtacatatcctacggcgagtggggacctagaagacctgtacacggaaaaggcgatgttgcatttataactaaaggagtatttttagggttaggaatctcatttgggctctttggtttagtgagactattagccaatcctgaaactccaaagactatgaacagggaatggcagttgaaatcagacgagtatctgaagtcaaaaaatgccaatccttggggaggttattctcaagttcaatctaaataa

SEQ ID NO: 80227 - DNA, 711 bp, Saccharomyces pastorianus
atgtctcccgtcctcactacgccaaagaggcacgcccctccgcctgaacaattacaaaatgtaacggactttaactatacaccatcgcatcagaagccgtttctacaaccgcaagcaggtacgacagttacaacacatcaagacatcaagcaaattgtggagatgacactggggtctgagggagtccttaaccaagctgtgaagttaccgcgtggtgaggatgagaatgaatggctagcggttcattgcgtggatttttacaatcagattaatatgttatacgggtccatcacagaattttgctccccacaaacatgcccgaggatgatagcgacgaacgaatatgaatatctttgggcatttcaaaagggtcagccccccgtttcggtaagtgcccctaagtatgtggaatgtttgatgaggtggtgtcaagaccaatttgatgacgaatctctttttccttccaaagtcaccggtaccttcccggagggattcatccaacgagtaattcaaccaattctaaggcgattattcagagtttatgcgcatatttactgtcatcattttaatgaaattcttgaactaaatttacaaaccgtactaaacacaagttttagacatttttgtctttttgcacaagagttcgaactactaagaccggctgattttggtccgctgttagaattagtgatggagttgagggataggtag

SEQ ID NO: 80228 - DNA, 342 bp, Saccharomyces pastorianus
atgttctatgcttcgaagcgccccccttgcgctgggcctcgaaccgcatccattgaacaacagcttggccttccctgtattctaccacatccattgctattgcccctctccccttctcctctctcttcttctccactatactgtgcttttcagcccattcggcgcgcgaaatcacaagctgtatatatacatttacatatacatatatatatatatatatgcataaatgtatgtacatatatgaatgccgggccgcgtggcgtctgtagcttgtgcgtgtacgtgtgtacacacttcaacatatatatacatacatatatatatctattattcgtgtactag

SEQ ID NO: 80229 - DNA, 276 bp, Saccharomyces pastorianus
atgtacatacatttatgcatatatatatatatatatgtatatgtaaatgtatatatacagcttgtgatttcgcgcgccgaatgggctgaaaagcacagtatagtggagaagaagagagaggagaaggggagaggggcaatagcaatggatgtggtagaatacagggaaggccaagctgttgttcaatggatgcggttcgaggcccagcgcaaggggggcgcttcgaagcatagaacattatccgcggaaacgggtattaggggtgagggtgaataa

SEQ ID NO: 80230 - DNA, 120 bp, Saccharomyces pastorianus
atgtatatatatgttgaagtgtgtacacacgtacacgcacaagctacagacgccacgcggcccggcattcatatatgtacatacatttatgcatatatatatatatatatgtatatgtaa

SEQ ID NO: 80231 - DNA, 801 bp, Saccharomyces pastorianus
atgcagattattctagataattttatttcggttttttttttctgttttgctaatttccaagaaccctttttcttctcttatcacaacgataagaggtacttaagaagatcttcatctttggattattattctttccctcttagaaaagtgaataatgagaagaatccattcttaaatttgggaatgcaacgtacgagggaattggaatcgagtgtcgcgatagaccaaactgaagtaccccgatccagattttttataatggttaaaaaattatcaagagttgccgatatcgtctatatagttgacacatttctaattccgccattgcatcctttaaagaagcagcatccaaaagttgcaaagtttttgaatgtacaacttgtctttgatttgatatcactgtttatttttgctacgcaccaactcctactgctagaagatggtagctttgggaagcactacttcaaaaggaaaacaaaacggtgctcgaaattttcgtgctctcgctgtaatgcaaacgctcaccaccccaagtggttcaaatttaaacattcactcctatgtctaggaacgttctgttttggggtttattcgttggtaaagattaataagttcttcaaaactgatcagactgttgatctaaacagactcatagagctattcttttggcaacttaatgcaattcttaatatgaagttattcgccttttacggggaccatttagaatcacatagtgcgcctcttgatgtgtatgaggattcttttgcaaacaaatcatcgtcaggtggtgacgaggtttaa

SEQ ID NO: 80232 - DNA, 1566 bp, Saccharomyces pastorianus
atgcaattagcatggcctataagattgaatccaaaagtcagaaggttcttgctggataagtgtcgacaaaaacgatatggtttcctctttttaggatgtatcttctccatactttactgtatggggacctggccatttttcacaaaagatattgtacatgatccaaataatttgccttattccttacaggattattcgactgacaaagacgagccatttttccggggctgcactgatacaaagctgtacttgcaaaatcctgcttactccaaaatgaacgcatctttcgttatgctaacgagaaacgaagaaatagaagacgtactgaaaactatgagaagtatagagggccatttcaataagtggttcaaatatccgtacgttttcttgaatgatgacccctttacaaatcattttaaggaccaaattcaagctgcaactaatgccactgtagagtttggcactgttgatgaaattatgtgggagtttcctgctaaggttcgtaattcattgcagtttaaggcttcattggaagaccaaaacgatcgcggtataatgtatggtaatatggaatcatatcacaagatgtgtcgattttactccgggatcttttataaacatccactagtttccaagtatgaatggtattggagaatagaacctgatgtggactttttttgtgacatctcgtatgatccctttttcgagatggccaaacataacaagaaatatgggtttaccgtacttataactgaactgtactggactgtccccaacttgttcagaacaaccaaaagctttataaaaaaaacggcaggtttaaaggaaaatctcggcacgttgtggaaattatttacatttaattataatattctagatacagatgatgaagaaatttctaggtgggtcaattttccctgggatgcaaagccaaagttgacagaaaagttgatggtagactttttgctagagaatcatggtcaagtcaataatgaggaggatttggaaggtatacaatatctcgttgaaagggcccgctctaaggtgccaatgctagaggattcccttgaaggggaagattacaatttgtgtcatttttggagtaactttgaaattgcccgcgttgatttattcgacaatgagatctataacgcctattttaaatttttggaagagtctggaggtttctggactgaaaggtggggtgacgcgccaattcattcaattgggttgggaatgaccttggatctagaagacgttcattatttcagagatattggttatagacactcatcgctgcagcattgtccgaagaatgccttacaaagccaagaaaatctcaacactttcgatgaaggttataacttcggatgtggatgtcgatgcgtgtgccccaagaaaggtgaagacatcgaagaccactccaccccttgcatggatattttttttgaattgcttcatggcagggaatatgagaaggaattccctggttgttacaagccctccataaaggacaaagacgtgattgaagagatcagaagagaaaattttagagtaattgaatag

SEQ ID NO: 80233 - DNA, 891 bp, Saccharomyces pastorianus
atggattactttaatatcaagcagaattactacacggggaacttcgtgcaatgtttgcaggaaatagagaagtttagcaaggtcacagataacaccttattattctacaaggcgaaaacccttttagctctaggccaatatcaatcacaagatcctacctctaagcttggcaaggtactagacttgtacgtccagttcttagatacgaaaaacattgaagaattagaaaatttgttaaaggataaacagaattcaccatatgaattatatctgttagccacggctcaagctatcttgggtgacttagataaaagtttggagacatgtgtagaagggattgacaatgacgaagcagaagggactacagaattattgctgcttgccatcgaagtcgctttgttaaacaacaacgtttcgaccgcgtccaccatctttgataactacactaatgctattgaggatactgtttccggtgacaacgaaatgattttaaacctggctgaatcgtacattaaatttgccacaaacaaagaaacggcaacatccaacttttactactatgaagagctatctcaaacctttcctacttggaaaactcaattgggactgctcaatttgcatttacagcaaagaaacatagctgaagctcagggtattgtcgagctattactatctgattactatagcgtcgaacaaaaagaaaacgccgtattgtacaaacctactttcttggcaaaccaaattacgcttgctcttatgcaaggtcttgatactgaagatttaacaaatcaattggttaaactggatcacgaacatgcattcatcaagcatcaccaagaaattgacgcaaaattcgatgaattagtgaggaaatatgatacgtccaactga

SEQ ID NO: 80234 - DNA, 2658 bp, Saccharomyces pastorianus
atgacaagcaagaatagcagcagcaataaatcaaatactcccacacaaatgtacgttattaaaagagacggccgcaaagagcccgttcaattcgataaaattacctcccgtatcacccgtttgtcatacggtttagacccaaaccgtattgatgctgttaaggtaacccaacgtattatttctggtgtgtactccggtgttactaccgttgagctggacaatcttgcagctgaaacatgtgcatacatgaccactgtgcaccctgattatgccactctagccgctagaatcgccatctctaacttacataagcaaaccacaaagcaattctccaaagttattgaggatttacacgactggattaacccagctactggaaaacatgctcctatgatttcggacgaaatttacaacattgtcatggaaaacaaagatactttgaactcggccatcgtgtacgatagggatttccagtatacgtatttcggattcaagacactggagcgttcgtacttgctaagactgaacggtgaagtggcagaacgtcctcagcatttggtaatgcgtgtggcgctaggtatccatggtagcgatatcgaatctgtgctgaagacttataatttgatgtcgttaagatacttcactcacgcttccccaactttattcaacgctggtacgccacatcctcaaatgtcttcatgtttcttaattgccatgaaggatgactctatcgaaggtatttatgatactttgaaagaatgtgctatgatttccaaaactgcaggtggtgttggtcttcatatcaacaacatccgttccacaggttcttatatcgctggtaccaacggtacttcaaacgggttgattcctatgattcgtgttttcaataatactgcccgttatgtggaccagggtggtaacaagagacctggtgccttcgcccttttcttggagccatggcatgcagatatcttcgactttgtcgatatcagaaaaacacatggtaaggaagaaattcgtgcaagagatttgttccctgctctatggatccctgatcttttcatgaaacgtgttcaagaggatgggccttggactttattttcgcccagtgctgccccaggtttagatgatgtgtggggtgatgaatttgaagaactatatactcgttacgaaagagaaggtcgtggtaaaacaattaaagcccaaaagttgtggtatgccattttgcaagcacagacagaaacaggtacacctttcatggtttataaggacgcatgtaacaggaagacaaaccaacagaacttaggtactatcaaatcatctaacttatgttgtgaaatcgtcgaatattcctccccggatgaaactgcagtttgtaatttagcttctattgccctaccggcattcgttgaggtttcagaagatggtaaaactgcaagctataatttcgagagattacacgagattgctaaagtcattacccacaacttgaacagagttatcgaccgtaattactatccagttcccgaggctagaaattcaaatatgaagcatagacctattgctcttggtgtccagggtttggccgatacttatatgatgttgcgtctaccctttgaatcagaagaagctcaaactctaaacaaacaaatcttcgaaactatttaccatgctactcttgaagcctcctgtgaattggcccaaaaagaaggtaaatattctacttttgaaggttctccagcttccaagggtattttacaattcgatatgtggaacgctaaaccatttggcatgtgggactgggaaaccttaagaaaggacattgttaaacatgggttaagaaactctttgactatggcaccaatgccaaccgcctcaacttcccaaattcttggttataatgaatgtttcgaaccagtgacctcaaacatgtactctcgtcgtgtcctgtctggtgaattccaagttgttaatccatatttactacgtgatttagtcgacctgggtatttgggatgatagtatgaaacaatatctaattacacaaaatggttctattcaaggcttaccaaatgtgccacaagaattgaaggaattatacaaaaccgtctgggaaatctctcaaaagaccattatcaatatggctgctgatcgtgccatctacatcgatcagtctcattccttgaatcttttcttgcaagcaccatcaatgggtaagattactagtatgcatttctacggttggaagaagggtttaaaaactggtatgtactacttaagaacgcaagccgcctccgctgctattcaatttaccattgatcaagaggttgccgatcaagccgctacacatattgcttccgtctcagaattggatcgtccagtttatgttccaaagggtacaaaattctctgaacaaaaggcggcatctgcgcttaccgaaagctcagataatgagaaggatgcatctccagttccatccgaacaatcatcggtgtcgagtgccatgtcaaatgtgaaattggaagatagtgttgccccagcagttccaacggaaacaataaaagaagattccgacgagaagaaatgtgacatttacaatgaaaaggtgattgcttgtactgctcctactccagaagcttgtgagtcatgttccggttga

SEQ ID NO: 80235 - DNA, 180 bp, Saccharomyces pastorianus
atggaggtttctgtaccattaccaccacagccactatactcacgtagtgaagtccctagcgtggaattgtgtggtatcgttgctatctgtcgttcgccaccctcggtatatccaacgtgcaggccaatatcactctctaagaaaatcgtatcaggattgttacggacaaactcttcatag

SEQ ID NO: 80236 - DNA, 1920 bp, Saccharomyces pastorianus
atgcaattgaagaaaatacacttgggtactgtatcatacacgtcggaaacattagacattgtatccgactatgtacaatctctggtaagctctaaaaatgactctttgaacaattctaaagttgccttatcaacaacaagaaaggatatgtcttttcgtgtacgtgatatgattttaactctagcaatttgccataacgttactcccacttttgaagatgacgaacttacatatcaagcggcatcacctgatgaaattgctattgttaaatttaccgagtcggttggcttatctcttttcaaaagagatcgccattcaatttctttattacacgaacattctggtaagactttaaattacgaaattttacaagtattcccatttaattctgattctaagcgtatgggtatcattgttcgtgatgagcaattggatgaatattggtttatgcaaaaaggggccgatactgtcatgtcaaaaattgtggaaagcaatgattggctagaggaagaaacaggtaatatggctcgtgaaggtctacgtactttggttatcggtcgtaaaaaattaaacaagaaaatttacgagcaatttcaaaaagaatacaacgatgcctcattgtcaatgctaaatcgtgatcaacagatgagtcaagttatcaccaagtatttagagcatgatcttgaattattgggtctaactggtgtagaagataagttacagaaggatgtgaagtcctctatcgagttattaagaaacgcaggtatcaagatttggatgctgacaggtgataaagttgaaactgctcgttgtgtttccataagtgcaaaattaatatctcgtggccaatatgttcatacgataacaaaagtcacaagaccggaaggtgcattcaatcagctggagtatctaaaaatcaatagaaatgcttgtcttttgatagatggtgaatccctgggaatgtttttgaaacattacgaacaggaattttttgatgtcgtggttcatttacccactgttattgcttgccgttgtacacctcaacagaaggcagacgttgctttggtaattcgtaaaatgacgggcaaaagggtatgctgtattggtgatggaggtaacgatgttagtatgattcaatgtgcagatgttggcgtagggattgtgggtaaagaaggtaaacaagcttctttagcagctgatttttctataacgcaattttgtcacctcaccgaattactattatggcatggtaggaactcttacaaaagatctgctaaattggctcaatttgtcatgcatagaggtttaatcattgcaatttgccaagcggtatattccatctgttcgttgttcgaacctattgctctttatcaaggttggttaatggttggttatgctacctgctatacaatggctccagtcttttcattaactcttgatcacgatatcgaagagtcattgactaaaatatacccagaattgtacaaagaattgactgaaggtaagagcttatcatataagacgttctttgtttgggttctattatcgctattccaaggttctgtaattcaattattttctcaggcctttacgagtttattagatactgatttcacaaggatggttgctatcagcttcactgctttggttgtaaatgaattaataatggttgccttagaaatctacacatggaataaaacaatgctcgtcactgaaattgctactttactattttacattgtatcggttccatttcttggcgattattttgatttaggttatatgactaccgtaaattactatgctggacttttagttatattactcatctcgatctttcctgtctggacggcaaaggcaatttatagaaggctacatcctccaagttatgcaaaagtgcaagagtttgccactccataa

SEQ ID NO: 80237 - DNA, 132 bp, Saccharomyces pastorianus
atggattggcgcgtgtactatatatattcatatgtcgtgtgtttgtatatgtgtgggagtgattgtgcgtgtatatgtgtgttggcgtgtgtggtacaatgtgtgtgttttaatgtagaaatgatgttgtag

SEQ ID NO: 80238 - DNA, 1392 bp, Saccharomyces pastorianus
atgatcaagatcgacttcatcagcattctgccgcaggagctgtcgctgaagatcttgagttatctggattgccaatctctttgcaacgccacgagagtgtgccgcaagtggcagaagctcgcggatgacgacagggtatggtaccacatgtgcgagcagcacatagataggaaatgtcccaactgtggctgggggctgcctcttttgcacatgaaacgtgcgcggatacaacagaatagtacaggatctagcagcaacgcagatatccagacgcaaactacgcgaccttggaaagtcatctacagagaacggttcaaagtggagtcaaactggagaaagggtcactgcaggattcaggaattcaagggccacatggatggtgtgttaacgctccagttcaactacaggcttttgttcacaggctcgtacgactccaccataggtatatgggacttattcacggggaagctaatacgaaggctcagcggccattcggacggcgtcaagacattatattttgacgatagaaagctgattacgggctcgctcgacaagacgatccgtgtttggaactacataacgggtgaatgcatttccacgtatcgaggccattcggatagcgttctgagcgtagattcataccagaaggttattgtttccggcagtgctgacaagacggtcaaggtatggcacgtggagtccaggacatgctacaccttgagaggccacacggaatgggttaattgcgtcaaattgcatccgaaaagcttttcatgttttagttgcagtgacgacaccacaatccgaatgtgggatatcaggaccaattcatgcctaaaagtgttcaggggtcatgtagggcaggtgcaaaagatcataccgcttaccattaaggatgtagagaatctagccaccgacaacacttctgatggcagctctccgcaggatgacccaacaatgactgatggtgcagacgaatcagacacaccgtcgaacgagcaagaaactgtcttagatgaaaacataccttatccaacacatctactatcttgcggactggataacacaatcaaactatgggacgtcaaaaccggtaaatgcataagaacacagtttgggcacgtggaaggtgtttgggacatcgccgctgacaacttcagaattataagtggttctcacgacggaagcattaaggtctgggacttgcaaagcgggaagtgtatgcacacgttcaacggtcgaagactacaaagggaaactcaggacacacaaacacaatccttgggtgataaagtcgcccctatcgcttgtgtttgtattggagattcagaatgctttagtggtgatgaatttgggtgcgtaaaaatgtacaaattcgatctcaatgattag

SEQ ID NO: 80239 - DNA, 372 bp, Saccharomyces pastorianus
atgaggagagagaggcaaaggatgatgagtttcgaggacgaggacaaggacgaccttgacaatagtaatagtaataacagcagtgaaatgacagatacggcgatgatgccaccattaaagagattgcttattacgggcagtagcgatgatttggcacaaggatcatcgggtaagaagaagatgacgatggcgacgaggtcgccatcgtcatcacccgatttggcgacaaacgacagcggcactagggtacagccattgccagaatataacttcaccaagttctgctatcggcataacccggacattcagttctcaccaactcatacagcgtgctacaagcaggatttgaacgacgcagagattatgctatga

SEQ ID NO: 80240 - DNA, 405 bp, Saccharomyces pastorianus
atgattgctggcggtactggtattgcgcccatgtatcagattatgaaagctattgccatggaccctcacgacactaccaaggtctctctagtctttgggaacgtccatgaggaggatattctgttgaagaaggaactggaagcgttggtggccatgaagccttcccaatttaagatagtttactacttagactctcctgaccgtgaagactgggctggtggtgtaggatacattaccaaggatgtcatcaaggaacacttgcccgctgctacagtggacaacgttcaaattttgatctgtggtcctccagccatggttgcctcagttagaagaagtaccgtggacttggggttcagacgttccaaaccgctttccaagatggaagaccaggtgtttgtgttttaa

SEQ ID NO: 80241 - DNA, 696 bp, Saccharomyces pastorianus
atgttcaaagtttacttggctggggcacggacgtgtacatcaagctcaaaggcccttctaaggccgcactactctccaaaaggtaacagtgctaaatttcctcgtaaagcggtaccattaagggctctttctacttctttaaattatctacatatgtataaatattcttattatataaggcgaaaaaatgaacgagaaaaaaaagtgttgaaagtatgcatccaactggctcttcaacaagagactcaatcaattaagcaatcgaagatggctattgatgctcaaaagcttgtggtggtcatcgtgatcgtggtcgtgcctttgctcttcaagttcattatcggaccgaagaccaagcctgtgctggatcccaaaaggaatgacttccaatcatttccgctggttgaaaaaaccatcttaacgcataatacttcgatgtacaagttcgggctacctcatgctgacgacgtactcggtttaccaattggtcagcatatcgtaattaaggccaatatcaatggtaaggatattaccagatcgtatacgcccacatcgttggatggagatacaaagggaaactttgaattactagtgaagtcttaccccacaggtaacgtttctaagatgattggagagttgaagataggtgactcgatccagatcaagggccctcgtggaaactatcattatgagtga

SEQ ID NO: 80242 - DNA, 165 bp, Saccharomyces pastorianus
atgcaagatatttatttcggactactgatagcattagagtcatttacgttctttttccaagcaactgtgctgttcattcaatggttcaaaagtactgtacagaatgtaaaagacgaggtttacactaagggtagagctttagaaaatttaccagatgaaagttaa

SEQ ID NO: 80243 - DNA, 1227 bp, Saccharomyces pastorianus
atggttttccacaagataggtccaagattatctcacaaggacttgaaagcacgtctgaaggtaagattccccatgatggatgatagaatggttgaatatttagcgagggaaatgagagctcatgacgaaaatcgtcaagagcaaggtcatgatagactgaacatgccagccgcagcagcagataataataataatgttattaatcccagaaacgataacgttccacctcaggatcctaatgaccatcggaattttgaaaaccttcgccacgtagacgaattagatcatgatgaggctacggaagagcacgagaacaacgactctgacaatagtttaccatcaggtgatgattcgtcacgaattttaccggggtcttcaagtgacaacgaagaagatgaagaagcagaggggcaacagcaacagcagcaaccagaagaagaggcagattaccgtgatcatatagagcccaatccgattgacatgtgggcaaatcgtcgtgcgcaaaatgaatttgatgacctaatcgctgctcaacagaacgcaataaacaggcccaacgctccggttttcatcccaccacctgcccaaaacagagctggaaatgtcgatcaagacgaacaagactttggcgcagctgttggtgtgccaccagcacaggctaacccagacgatcaaggacaaggccctctagtgataaatctcaaattgaaattgttgaatgtcattgcttatttcataattgccgtagttttcaccgcaatatacctggcaatttcctatttgtttccaacttttattgggttcggtttgttgaaaatttattttggtatatttaaggttattttgcgtgggttgtgccatctttactacttgtctggcgctcatatagcttacaatgggctgacgaaactggtccctaaagtagatgtcgcgatgagttggatttcagaccacttaattcatgacatcatttatctttacaacggctacactgaaaacaccatgaagcactcaattttcatcagagctttacctgctttaacgacgtatctaacctcagtcagtatcgtttgtgcttcatccaatcttgtctcgaggggttatggccgtgagaacggaatgagcaaccctactagaaggctgattttccagattttatttgcactcaaatgcactttcaaggtgttcactttatttttcatcgaattggctggatccccattctag

SEQ ID NO: 80244 - DNA, 1818 bp, Saccharomyces pastorianus
atgcactttcaaggtgttcactttatttttcatcgaattggctggatccccattctagctggtgtaatgctagatttctcattattttgcccaatcctggcatccaatagtcggatgctttgggttccttcaatatgcgcaatatggcctccattttcccttttcgtatactggacgattggtactctctacatgtattggtttgccaaatatatcggaatgattaggaaaaatatcattagaccaggtgttctattctttatcagatctccagaagatcctaatattaagatcttgcatgatagtttaattcatccgatgagtattcaattatcaaggctttgcttatccatgtttatttatgcgatttttattgtcttaggttttggcttccatactagaatttttttcccattcatgctcaaatcgaacttattatccgttcctgaagcttataaaccaacatcaattatttcatggaagttcaatacaattttgctaactttatattttacgaagaggatcctggagtctagctcttacgttaaacccttattggaaaggtattggaaaacaatttttaagttatgttcaagaaaattacgtttatcatcctttatcttaggtaaagataccccaacagagagaggccatattgtttaccgcaatttgttttacaagtacattgctgccaagaatgcagaatggtcaaaccaagaacttttcactaaaccaaagactctagaacaagcagaagaattgtttgggcaagttcgtgacgttcatgcttattttgtccccgatggcgttttaatgcgtgttccttcttctgatatagtatccagaaattatgtacaaacaatgtttgtccccgttacaaaggatgataagctgttgaaaccattagatttggaaagaattaaagagagaaacaaacgtgctgctggtgaatttggttatttagacgaacaaaacacggaatatgatcaatattatatcgtttacgtccctccagatttccgtttacgctatatgacattgcttggcctggtttggttatttgcttccattttaatgcttggtgttacatttattagtcaagctttaataaactttgtttgtagtttcggctttcttccagtcgtaaagctattgttaggtgaaagaaataaggtctatgttgcatggaaggaactctctgacattagctactcctatttgaacatttattatgtctgtgtcggatctgtttgtttatccaagattgctaaggatattcttcattttacagaaggccaaaacactctcgatgaacatgccgttgacgaaaacgaagtagaggaagtggaacacgatataccagagagagatatcaacaatgcccctgttaataatatcaataatgtggaagagggtcaaggaattttcatggccatctttaacagtatatttgatagtatgttggtgaagtataacctgatggtgtttatagctatcatgattgcggttattagaactatggtttcgtgggtcgtcttaaccgatggtatactagcctgttacaattatctcaccatcagagtgtttggcaattcttcatacactattggtaattccaaatggtttaaatatgacgagagtttgttattcgtcgtttggatcatttcgtcaatggtcaatttcggaaccgggtttaagtcattgaaactatttttcagaaacagaaatactagtaaattgaacttcttgaaaacaatggctttggaactgtttaaacaaggtttcctgcacatggtaatttacgtcttgccgatataa

SEQ ID NO: 80245 - DNA, 99 bp, Saccharomyces pastorianus
atgactttcacacttctagtctctttgattcaattagtggtactcttggctaaaaaaacagtttttgaaatcagtaacaaagaactattcttaacgtaa

SEQ ID NO: 80246 - DNA, 132 bp, Saccharomyces pastorianus
atgtcacatttaacatccgcgcctggttttgaaatgtctatattttttgaagctacccattccaacagacaggattcatgcatgtatttaattgagcccctgcatttacaaggatggaaaagaggattgtct

SEQ ID NO: 80247 - DNA, 165 bp, Saccharomyces pastorianus
atggatcaagacaaagttaattttgcatcgggtgataacaacaccgcttcaaatatgccgggaagtaacgaagacgtaatgatgacgggcgctgagcaagatccttactccaatgcatctcaaatgggtaatactggatcaggagggtatgataatgcttggtag

SEQ ID NO: 80248 - DNA, 585 bp, Saccharomyces pastorianus
atgggccgtaatattgggcatcctattatacaagataaagaaggtaacggtgttcttatttgtaaattgagaaaaggtcaagaattgaaactgacatgcgttgcgaaaaagggtatagccaaagagcacgccaagtggggtccagcagcagccatagagttcgagtatgatccttggaataagctcaaacataccgattactggtatgaacaggattctgccaaagaatggcctcagtctaaaaattgtgaatacgaagatcctccaaacgaaggtgaccccttcgattataaggctcaggcagatacattttatatgaatgtagaatctgtggggtctattcccgttgatcaagttgtcgtcagaggtatcgatacattacagaaaaaggttgcctcaatattgttagctctgacacagatggatcaagacaaagttaattttgcatcgggtgataacaacaccgcttcaaatatgccgggaagtaacgaagacgtaatgatgacgggcgctgagcaagatccttactccaatgcatctcaaatgggtaatactggatcaggagggtatgataatgcttggtag

SEQ ID NO: 80249 - DNA, 99 bp, Saccharomyces pastorianus
atgcccaatattacggcccatgagattagacacaattaccaagtccttgctgtagacgtttgtagtactttcgctttcgccgaacgcttgcaatgttaa

SEQ ID NO: 80250 - DNA, 129 bp, Saccharomyces pastorianus
atgcctgcaggtctagacgaactaagtcacgggaaagtagatttgacattcggtagttccttagatatatttggtggtaacctagttaagtttgaagactgctgtagatggaatgaaaagcaaggttag

SEQ ID NO: 80251 - DNA, 156 bp, Saccharomyces pastorianus
atgaatccagttgatcaccctcacggtggtggtaaccatcaacatattggtaaggcttctactatctctagaggtgccgtttctggtcaaaaggctggtttgattgctgccagaagaaccggtttactacgtggttctcaaaagacccaagattaa

SEQ ID NO: 80252 - DNA, 366 bp, Saccharomyces pastorianus
atggcagcaagggaaaaaagcagtaaaaagagggcttctaaaaagaacaagaaaggtaagaatcagtttgaaaaagcgccggttcctctgactctagaagaacaaattgacaatgtgtcgttgagatacggcaacgagttggaaggtcgtagcaaggatctaataaacagatttgatgtggaagatgaaaaggacatctacgagcgtaactattgcaacgaaatgcttttgaagttgctgattgagttagacagtatcgatttgattaacgtggatgagtccttaagaaggccgttgaaggaaaaaaggaaaggcgtcataaaggaaattcaggctatgttaaaaagtttggactctcttaaataa

SEQ ID NO: 80253 - DNA, 141 bp, Saccharomyces pastorianus
atgtcgcacaacgcaatggaacattggaagagcaagctgagcaaaacaagtacctcgacgtacgtcctcttggccgtgattgctgttgtatttttggttacaatcagaagacccaatggcagcaagggaaaaaagcagtaa

SEQ ID NO: 80254 - DNA, 1638 bp, Saccharomyces pastorianus
atgtattacgcaacaaccttagatataggtacaccgtcccaaagtctgacagtgttgtttgataccggatctgccgatttttgggttatggattctagcaatcccttctgcttaccaaattcaaatacgtcatcctattcaaacgcaacttataatggcgaagaagttaagccttcaattgattgcaggtctatgagtacttataatgagcatagatcttccacctaccaatatctggaaaatggtaggttttacatcacatatgctgacggaacatttgctgacggtagttgggggacggaaactgtatcaattaatggaattgacatccccaatatccagttcggagttgccaagtatgctacgacacccgttagtggtgttcttggaattgggtttcctagaagagagtccgttaagggctatgaaggtgctcctaatgaatattatcctaattttcctcagattttaaaaagtgaaaaaataatcgatgtggtcgcgtattcgctgttcttaaactcacctgattcaggtactggttcgattgtttttggtgccattgatgaatcaaagttttctggtgatttgttcactttccctatggtaaatgaatatcccacaataatcgacgctcctgcaactttagcaatgactatacaaggattaggtgcccaaaacaaaagtagttgtgaacatgaaacgtttacgacgaccaagtatccagttttgttggactcaggaacctcgctattaaatgcgcccaaggtcatagcagataaaatggcttcttttgtaaatgcgtcctatagtgaagaggaaggtatatatatattagactgtccagtatctgtaggtgacgtggaatacaattttgatttcggcgatttgcaaataagtgttccactgtctagtttgattttaagtcccgagacagaaggcagctattgtgggtttgcggtccagccaacaaacgattcgatggttctgggtgatgtgttcctgtcctctgcatacgtcgtattcgatctcgataattataagatatctttagcacaggcaaattggaacgcaagcgaagtttcgaaaaagctagtaaatattcaaacagatgggtctatttcaggtgccaaaattgctacagctgaaccctggtccaccaatgaaccatttacagtcacctctgacatttattcatctacaggctgcaagagtaggccttttcttcaatcatcgacagcctcttcgcttattgcagaaacaaacgtacaaagtcgcaactgctctacgaagatgccaggcactagatcaactactgtcttaagtaagcctactcaaaatagtgctatgcatcaaagtacaggtgctgtcacacaaacctcaaatgaaactaaattagaattatcctcgactatggcaaactcgggcagtgtctcgcttcccacttcgaattcaatagacaaagagttcgaacattcgaaatctcaaactaccagcgatccaagtgtagcggagcattctacgtttaaccaaacgtttgtacatgaaactaaatatcggcctactcataagacagtcataacagaaactgtcacgaagtattctacagtcttaataaatgtatgtaaaccaacatattaa

SEQ ID NO: 80255 - DNA, 189 bp, Saccharomyces pastorianus
atgatcattggcgatgctgacttagtctacgtaacaagtcctcgagcaatgtctcacttcaaaatttgcctaagcaacatttcgtccaaagaaatagtgcccgttctcaatataaaccaggccacgatatttgatattgatcaagtcggatcgttaagtactttcccatttgtatataaatatttatga

SEQ ID NO: 80256 - DNA, 282 bp, Saccharomyces pastorianus
atgccgaaagtaattttggagtctcattcaaagccaacagactcagtttttctacagccatggataaaggcattaattgaagacaactcggagcatgatcaatatcatccctctggccatgtaattcctagcttgaccaagcaggacttagcgctaccgcatatgagcccgacaattttaaccaatccgtgccatttcgccaaaattacaaaattttataacgtttgcgactacaaggtatacgcatcgataagagattcctcacaccaaatacttagttga

SEQ ID NO: 80257 - DNA, 246 bp, Saccharomyces pastorianus
atgggagctatgggtcagagaataaaagcactcaagtcattatcgttgaagatgggtgatgagattagaggcagcaatcaaactattgaccagcttggtgatactttccataacacttctgtaaaactcaaaaggacttttggaaacatgatggagatggccagaagatctgggatcagtataaaaacatggttaataatattttttatggtaggcgtgctatttttttgggtatggattacataa

SEQ ID NO: 80258 - DNA, 840 bp, Saccharomyces pastorianus
atgcggctttcacgaaatgttacacaaacacagcaacaagatctgcataataatggtaattcttcagctactaccgcttcagcagatattgctaaaaaacacacagattcttctattactagcgataccacgaaggcagattttacgagcaaattgaatggactgtttgcgctacctggtatggtgaaccctggacagcttccaccttccttggagaagaagttgtcctccccggatactgaatctaagctaggaacccaggaccaatcacaggaaaaaacgggacctctgggcggcactagaagaggtagaggacctcgtgggcgtaaattaccttctaaagtagctagcgtagagaagattgaagaagatgacaacactaataaaatagaaatatttaacaattggaatgtttcctcttccttctctaaggaaaaaatcttaatggatactactcctggtgagcaagcagaaagggccttggatggaaagtcaaagagcattcccgaggaacaacgagaacaatctccaaataagatggaggctgctctttgtccttttgagctggacgaaaaggaaaagttacctgctaatgctgagtcggatcctctttctcagttgccacagacgaacgccgtaggtaatagaaaagccataagtgaggaatctctgtccccatcggaggccatcgccaacagagatcaaaacgatacgacagaaatacaggaacagcagatggaggaccaaatggaggttgatatggaaagagaactctcaggtggctacgaagacgttgattctgccttacattcagaagaagcgtcttttcactccctttag

SEQ ID NO: 80259 - DNA, 1776 bp, Saccharomyces pastorianus
atgccatcggaagttacgccaaaagtacctgagaggccctcaaggaggaagacatctgagctgtttccgttatctggctctgaatcaggagatattaaagctaatagcgagccaccaacaccagcaggaacgcccaatgtaccaacacgtagacccatacttaaagcaaagacgatgacttcgtttgagagtggtatggatcaagagagtttgcccaaggtaccattgcagaggccagttagacgctccactactgaagaactaaataatgtaatgaataacaccagtaaggagttagaggagattgaaagtttgatttcaaagcacaatatacacagtgtttccaggaaaaaaagtccaacttctgtgcaagagggaaaggcggccgccattcatcaaaacgggcaaagaagtgcatcagataacaaaacttctacaaatccctccccactcgaaaaaaatgagcacaagggtgatgagggcaatgagtctgctatttcaccttctaattcagttaacaagtctaataatgaagtgacagagcatagtgactccgaagaccttactgaaaagcaaaaggtacatgctgccctagataatgaggcaggggatagaagccattttgaagaaaagctcattcctggagatatgaaagtacaggtagatgttagtaaggacgtagaagaaggcagcctcaatgctctgcctccatctggaatcacagaatcagacgacaaagctgaaaagttcactaaacatcctgaatctagtttagaagagctacagaagcatcaagaacaacaggaagaaaaaattttccaaaatccaaccgatgaagaaagtactacctctttgaatgagaaacaagaaggcaaggacaacatggaagtgaattctcagccgcaaggaccttctgatactgaaacagttatagcagcaactagctcaaacgttccttcacaaattgcaagtgaagaggaaaatgacgttccagtgattccaaggagtaggcctaagaaggattttgaagcacacgtacaaaaagaggagttgcctaacacacaagagaagcgagtatcagaagagtgtgattcgaccctaattagtaccgaagaggaaagtaaaatcccaaaaattccctctgaaagaccaaagagacgtgccccacctccggttcccaaaaaaccttcttcaagaattgcggcctttcaagaaatgttacaaaaacaacagcaacaagatctgcataataatggtaattcttcagctactaccgcttcagcagatattgctaaaaaacacacagattcttctattactagcgataccacgaaggcagattttacgagcaaattgaatggactgtttgcactacctggtatggtgaaccctggacagcttccaccttccttggagaagaagttgtcctccccggatactgaatctaagctaggaccccaggaccaatcacaggcaaaaacgggacctctgggcggaactagaagaggtagaggacctcgtgggcgtaaattaccttctaaagtagctagcgtagagaagattgaagaagatgacaacactaataaaatagaaatatttaacaattggaatgtttcctcttccttctctaaggaaaaagtcttaatagatactactcctggtgagcaagcagaaagggccttggatgaaaagtcaaagagcattcccgaggaacaacgagaacaatctccaataagatggagctgctcttgtccttttgagctggacgaaaaggaa

SEQ ID NO: 80260 - DNA, 1365 bp, Saccharomyces pastorianus
atgaaggaaaaattagctaaatttgataagaataggcgaaatgttactcaaagttccagatcgattagcagtgaaaactctcgagaacagccacaacagattgctggttcttccaatttagttgaacctagagcaactccattccaagaagaaaaatatgtggaagtcgctcaaccaactcaacctgttcaatcaacacaacctgttcaaccaactcaacctgttcagccaactcaacctgttcagccaactcaacctgttcagccaactcaacctgttcaaccaactcaacctgttcagaatgtatataatgcaaagcaagaatccgatgatgaagatgaagatgatgaagaaaagcgtttacaagaggagctaaaacgattgaaacttaaaaaaaaggctgataaagaaaaaagacttgcagctttacgtaagcaaattgaggatgctcaaaatgaaagtgacgaagaggagacaaacggaaaagacaactttggcggccatgtgaacgttcctcaggccgctccagtggcaccatctgcagctttttcgcaaaattctactaatgctcctcgctcggtacacgctgctgttacccctgccgcaggtaagaacagtactggtctgccttccacgacaatgggccataatccatacttcaaggatgcatcagctagctctacatctactttcgatgctcgcgctgcagaaatgcaaagaagaatccaaagaggattggatgaggacgaggatgatggatggtctgatgaagacgagagtaataaccgcgtagctgtagataataaggttgaagaagcaaagattggtcatcctgatcatgcacgtgctccacctgttactgctgctcccttgccgtctgttacccctattccaccggctgtccctgtccctcaggcgaatacctctaatgaaaagagtagtcctattccaatagctccgataccaccttctgttactcaggagccacccgtcccgttggctccccctttgcctgctgttgatggctttcaagaacctccaattccctcagcacctgcaatagctactgccgtgcaaaaatcgggttcttccaccccagctttagttggaggcgttttgcctccacccccacctttaccaactcaacaagcttccacttcagaacctattatcgctcacgttgataactacaatggtgctgaaaaaggcacgggcgcatatggatccgattctgatgatgacgttttatcgattcctgaatcagttggtacagatgaagaggaagaaggggcacaaccagtttctactgcaggtatcccatcaattccacctgcaggtattcctccacccccaccccttccatga

SEQ ID NO: 80261 - DNA, 2025 bp, Saccharomyces pastorianus
atgtataacccgtaccagcaacagggcatgggttaccagcagcaacagcagcaacagcagcaacaaccaaatggattctacccgcagcagcagcaaggtcagtcttcaaaccagccccaaggccagcctcaaccacaacagcaaatggcgtttaaccagcctcaggctaccggaattggtgggatgcctcaaagttttggtaattctttctcaagtatgccacagcagccccaaacgggttacaataataatggaaataatggtagtgtatatggtaatggtaattttggccaacaaccccagcagcaacaacagcaggtgaaaccgcagcatacgggatacgtaccaaattccagtatgcctatgatgaatactactggcaccatgcctccacctaatccggctcaacagcctcagctacaatccatacaaccccaaggaacaggctattaccaatctgctaatactgcaaatgtacactcagtacaacctttgcaatctcaagggacaggatattatgtgtctacacccaatttgatctcttctaatcaaacccagcagccccttcaggcccagggcactggttattatcaatctcaacctcaacaggtgccacctcctcagcaagcacagtccttgcaacctttgaagccgcagcaaacaggattttaccttcaaccgcaaaaccaagctcccttagaaccattaaagcccaccgcaactggctttgtcaactcatttgccaacaacggtctaaacaatgatatcaaaatccctgccattagattgtcgtttattactgcccaagatcaggcaaaatttgagactctattcagatcaattgttaccaatggttcgaatactgtttccggtgctaattgtaggaaaattttgatgagatccggtttgccaccttctcaactcgcaagaatttggacgctttgtgatacatcaaaagcaggtgagttactgtttcctgaatttgcattagcaatgcatttgatcaatgatgtcttacaaggtgacactatcccttacgaattggattctaagacaaaaaacgaagtttcaagttttattgacgccattaatttaagcattgcaaaccaggattcttccgcaaatgatgccccaaaaactccctttgatgaattcattacagcgggcgtacaaaatttgcaacctcaaccaacaggatatatgcctcaaactagttttggtatcccattacagtctcaaattactggaggcggtgttgcctcggcgttgaatcctcaatccacaggatttatggcaccaaccactttcaacatgtcaatgaataccggaactcccggattgaacccccaaattactggaggagcacctgcctctatgcaacccaacattactggcaatgctttgcaacctcagacaactggtatgatgccacagacaactggtatgatgccacagacttcatttggcgttaatttaggacctcagttgaccggcggtgctttgcaatctcagtataccggaggatatggttccgttatgccccagcaaagcggtcctgcaagtatgcccaatttgtcctttaatcaacaaggattacaatctcagttaaccgggttgcaaccccaaccaacgggttttctaccaccatctaactttagtgctaccatgccgttgactgcccaaaagacaggatttggtaataacgaaatttataccaaatccaactttaataataacttaattgataactcaagtcaagacaaaatttccacggaggaaaaatctttgttttataaaatttttgaaacttttgatactcaaaacaaaggtttgttagattcccccactgctgtggagatttttagaaaatctggcttaaatcgtgcagatttggagcaaatttggaacctttgtgatataaacaacaccggccaattgaataaacaagaatttgcactaggtatgcacttggtttacggtaaattaacgggaagccaatccccaatgtcctaccttcaagtttaa

SEQ ID NO: 80262 - DNA, 963 bp, Saccharomyces pastorianus
atgtctgctctaacaggaaaatcaacggaatcggaggattcactttccatggaagatgaacagcaaagtgctgaaatcaagagaatccagcaggaaaacggtaagaaccaagaaatcattaaagacataaggtcatctatatcagatatttctgcatccttgaagtctactatgacaggatcgaatatgatatccaatcaagaatttgaaagatgggaatttggcatagggttagaagatggtgttcgtgaatttttggatgatctgaagtcaaattcaaataaatcagtgactgagtcatctccctttgtgccttcctcaacaccaacccctgtagatgaccgttcctcgtcgccttcttattctcagttcaaaactgctgaagaaagagcagcttatctgaaagaacaggcaaaaaagagaatgaaggaaaaattagctaaatttgataagaataggcgaaatgttactcaaagttccagatcgattagcagtgaaaactctcgagaacagccacaacagattgctggttcttccaatttagttgaacctagagcaactccattccaagaagaaaaatatgtggaagtcgctcaaccaactcaacctgttcaaccaactcaacctgttcaaccaactcaacctgttcagaatgtatataatgcaaagcaagaatccgatgatgaagatgaagatgatgaagaaaagcgtttacaagaggagctaaaacgattgaaacttaaaaaaaaggctgataaagaaaaaagacttgcagctttacgtaagcaaattgaggatgctcaaaatgaaagtgacgaagaggagacaaacggaaaagacaactttggcggccatgtgaacgttcctcaggccgctccagtggcaccatctgcagctttttcgcaaaattctactaatgctcctcgctcggtacacgctgctgttacaccctgccgcaggtaa

SEQ ID NO: 80263 - DNA, 501 bp, Saccharomyces pastorianus
atgaacgtgaacaatctttcggaacatctacagaacctgatatcaagcgattcagagctgggctcgcgcttgctatcattgctgctggttagcagtggcaacgcggaggagctcattagcatgataaataatggccaggatgtctcgcagtttaagaagctccgcgagccgagaaaggggaaggttgccgcaacaacagcagttgttgtaaaagaagaggaagctcccgtgagcacttctaacgaactggataagattaagcaagagcggagaagaaagaacacagaggcgtcgcagcggttccgcattcgcaagaaacaaaagaattttgagaacatgaataagctgcagaacttaaacacgcaaatcaacaaacttcgcgatcgtatagagcaattgaacaaggaaaatgagttttggaaagcaaagctcaatgacattaacgagattaagtctttgaaattgttgaatgacattaagagacggaacatgggcaggtag

SEQ ID NO: 80264 - DNA, 174 bp, Saccharomyces pastorianus
atggctcccgttgtcacatctccatctctaactggtccactacaatctgcttctggttctgcagtcgctacatactctgttccttctatctcgagtacttaccaaggtgctgctaatatcaaggttcttggaaactttatgtggttgctactcgctcttccagttgtattctaa

SEQ ID NO: 80265 - DNA, 1053 bp, Saccharomyces pastorianus
atgcaaagaccatttctactcgcttatttggtcctttcgcttctatttaactcagctttgggttttccaactgcactagttcctagaggatcctccgaaggaactagctgtaattctatcgttaatggctgtcccaacttagacttcaattggcacatgaaccaacaaaatatcatgcagtatactttggatgtgacttccgtttcttgggttcaagacaacacataccaaatcactattcatgtcaaaggtgaagaaaacattgacctaaaatatctatggtctttgaaaatcattggtgtcactggtccaaaaggtaccgtccaactatacggttacaacgaaaatacctatttgattgacaacccaactgatttcacagccacttttgaagtctatgccacacaagatgtcaacagctgtcaggtgtggatgcctgacttccaaattcaatttgagtatttgcaagatagtgccgctcaatatgcaagctcttggaaatggggaactacatcttttgctttgtctactggttgtaacaactatgacaatcaaggccactctcaaacagatttcccaggcttctattggaacatagatgacttcgtaccgccacaattgttgtcacaatctaccactacatcaactagtacttccgagtcatctaccactacatctagcacttccgagtcatctaccactacatcaactaccacttcagaatcatctacatcatcatcaaccaccgctcctgctacaccaaccactacctcatgcagtaaggaaaagcctacacctcctcatcacgacaccactccatgtacaaagaagaaaaccaccacatctaagacatgcactaagaagactactactccagtaccaaccccatcaagctctactactgaaagttcttctactccagtaaccagctccaccactgaaagctcttctgctccagtaccaactccatccagctctactaccgaaagctcttctactccagtaaccagctccaccactgaaagctcttctgctccagtaccaactccataa

SEQ ID NO: 80266 - DNA, 198 bp, Saccharomyces pastorianus
ttttttcctgccgcgaaagttaatttgcctgccggcgttcctattggagccaggaaaagatcacgaggaattacagctgtgagaacatactctggggctggcgtaggcacacaatccggtattcctaaagttttgtggtacaaaactccatacctaaaacatagaacaaatctcgcccgtggatccttttattcataa

SEQ ID NO: 80267 - DNA, 249 bp, Saccharomyces pastorianus
atgccacatcgagagaccaaaaagtttctcaatggcgtctttttagtgtcataccattcttttttactacctaggatcatcgacaatgattttagagttttaaaatttgctttgcggcaatacaaatctatagccgggatcaccgaccttgttatattcttcggagacatctttagagtaaccacagatattcaataccaacctatacttccattgctgcttgtctcacatctaaacttcgccgtttag

SEQ ID NO: 80268 - DNA, 405 bp, Saccharomyces pastorianus
atggaagggttttcctttaatgagactcttatgggagtcaattcgcaccagaaggtgtcaatgaattcaggattgcagacagctgcaagcaaacgagctttttcattggtagaagttacgtacactccttggcatttcgcgtatagtaggtgttctaggatgtttgattgcagtttacaattaaaatccaccagatctgatcgctctctttctatagaaacaagattcgtcatattaggagatacaccaagaatcgatatgatcttttcagttgcaaaaagtgtatcaacaggtagtaaactaatattctgtcttctttcagttgcaaatgtactgtcaaagggtattttttgccaatcgaccaagctagtgttaaacttatcatcaacggtcatcttgcaataa

SEQ ID NO: 80269 - DNA, 867 bp, Saccharomyces pastorianus
atgatgttcaacttcaaacacacctcagtaggcgaaagtcctgaatgtaagtatgagcttatcccctttactttgaaagattttaagctggctcttgctgagagttttttgtttattgaaaacactgactgctggtctaccatctatttggaaaatcatgatcaacctcgtagcgtttcgagatttggctcagattctcctaaatggcgtgcgatttcgtcgaaaatgttggccacccttatcatttcattgactggtacagtttttatctaccaaggacaagaattgggtatgtccaacttcaaaaacagaagaattgagcaaatcaaatgcgttgaaggtactggtacatatgccgccattaaacgtgattatggtgaagattctgaaaagatgaaaaagttttttgaagcattagctttaatctctagagatcatgggagaacaccattcccatggagtgctgatgagccttctgcaggtttctcgaaggatgccaaaccatggattgacatgaatgaatcatttagagacggaatcaacgcagaagctgagttaaaagataaaaattcagtcttcttcttctggaaaaaggccttacaagttagaaaggagcacaaagatatccttgtttatgggcataactttcagttcattgatcttgataatgacaagctattcatgtttacaaaggacacagataacaaaaaaatgtttgcagttttcaatttcagtagcgataatacagacttttcagttcctgataatgaggcctcctacaccatgttttttggcaactatgcaaactcaaatggtgattcccgcaccttgcaaccatgggaaggaagactttacttgttgaagtaa

SEQ ID NO: 80270 - DNA, 858 bp, Saccharomyces pastorianus
atgacgatcatccataatcctaaatggtggaaagaagccaccgtctaccaaatttatcctgctagtttcaaggactccaacaatgacggatggggtgatttagctgggattacctccaaacttgactatgtcaaagaattaggtgtcgatgcgatatgggtgtgcccattttatgactctcctcaagaagatatgggttacgatattgccaactatgagaaggtttggccacgttacggtaccaatgaggattgtttccaaatgatagaagaagctcataagagaggtatcaaggttattgttgacctggttatcaaccactgttctgaagagcatgaatggttcaaggagagtaaatcttccaagaccaatccaaagcgtgactggtttttctggagacctccaaagggtttcgatgagaaaggtaatccaattcctcccaacaattggagatctttctttggtggatctgcttggagatatgacgaaaaaactggtgagttctttctgcatgtgtttgctcctggccaacctgatttcaattgggaaaatgaaaagtgccgtaaagccatttatgactcctcagtgggctattggctacgtcacaacgttgatggctttcgtattgacgtaggcagcatgtattctaaggttgagggcctacccgatgctcctatcactgatcctacagttccttaccaaaaaggaactgaatttttcataaatggaccacgaattcacgagtaccataaagaaatgcgtaaatatatgctttctcaaatcccagaaggtaaagaaatcatgactgttggagaagttggtgttgggacctgcaggcatgcagctgcatgccgtcgt

SEQ ID NO: 80271 - DNA, 282 bp, Saccharomyces pastorianus
atgggggttcctaatcggttttttactccttttattacttcggcaattaatttctactacggttatgttttcatgggttgcttagcattttcatatttttacgtcttcttctttgttccagaaacaaaaggtctaactttagaagaagttgatgagatgtggatggacggtgtattaccttggaaatctgaatcctgggtaccagcttctagaagggatggtgattatgataacgaaaaattacagcatgacgagaaacccttctacaaaagaatgttttag

SEQ ID NO: 80272 - DNA, 279 bp, Saccharomyces pastorianus
atgactgatcgtaaaaccaacttaccagaagaaccgattttcgaagaggcagaagatgacggctgcccttcaatagaaaattcttcacatctgtcagtacccacagtggaggaaaacaaggacttttccgagtataatggggaagaggcagaggaagttgttgttccagaaaagcctgcttcagcctatgctactgtttctatcatgtgtttatgtatggctttcggtggatttatgtccggttgggacacaggtacgatttctggtttcgtcaattag

SEQ ID NO: 80273 - DNA, 1002 bp, Saccharomyces pastorianus
atgggtttaactatagtcattgtcgtttatatggttggtattgtcattcaaattgcctctatagataagtggtatcagtattttattggaagaattatcgctggtataggtgctggttccattagtgttcttgccccgatgcttatttcggaaactgcgccaaagcatatcagaggtacgttgctagcctgttggcaattgatggtgactttcgcaattttcttgggttattgtaccaattatggtaccaagacttactcgaattctgtccagtggcgtgttccgcttggtctatgttttgcatgggctattattatgattggtggtatgacgtttgttccggaatctcctcggtttttggtgcaagtcggtaagattgagcaagctaaagcttcttttgccaagtcgaacaagcttagtgttgacgatcctgctgtggttgcagagattgatcttctcgttgctggtgtggaggcagaagaagcaatgggaactgcttcatggaaggaattattttcgagaaagactaaagtttttcaacgtttaacgatgacagtcatgattaactctctgcagcaactaaccggtgacaactatttcttctactacggtactactattttcaaatctgtcggtatgaatgactcttttgagacttcaattgtcttgggtattgtgaattttgcttcctgcttcttttcactttattctgttgataagttgggccgtcgtagatgtcttttacttggagcagccaccatgacggcgtgcatggttatttacgcctccgttggcgtcacaagactatatccgaacggtaaaggtcaaccatcatctaaaggtgctggtaattgtatgattgttttcacgtgtttttacattttctgcttttcctgcacctggggacctgtatgttatgtgattatttctgaaacatttccattaagggtgagatccaagtgtatgtccgttgcaacagcggcttattatgggggttcctaa

SEQ ID NO: 80274 - DNA, 306 bp, Saccharomyces pastorianus
atgaaaattgcccagaaaaaaaaagttaaaatttgttttggttcagatttattgggtcctctatatggttatcaaacgcaagagtttcgtattagagggaaagttcaatcggcacaagaggttttgctctcagcaactgttactcctgccgaaatgaacggattaggcgataaattgggacagattaagccagggttcattgctgacctactgatgatgaaatcaaatccgttggacgatataacgattttggatgaacccgagagcaacatactatttgtcatgaaagagggaaggatatattga

SEQ ID NO: 80275 - DNA, 1113 bp, Saccharomyces pastorianus
atgagcgaatataaaagcatcatatttgctggtatgtggcgtagcttttctttccaattgaagggacatcgaaacagtatattaaccaagataaaaatgacaacttatcaaatcgatgtcaatgaaggaatgaacaagtccctggccgacttggtggcaccatggcgcccagagccactcaaaaattactgtataagtaacactaatttgatagatgtggtaagcggcgtcagtctccccggagcttacatcttcatagaacagggtatcatttccaaggtcgaatttggttctgaaaagccggtaaccgttgacgaagttgcctttgaaattattgacggcaccggtaagtatgtcactccaggtctgatcgacagtcatgtccacattgcgtcggttgcaggagaggctgatctgaccaagttaatgctgatgccaaagtcagttgcattactcagaataagatacactttggaagccgctctggcaagaggtttcacaacagtgagagactgtgggggtgcagaaggctttctgaaagcagagattcgtcagggatccttgaatggtcccagattaattacgtgtggacatgccatttcccaaactggtggtcatggcgatctgagatctggtgccctacctgctagtgcctttgacagctgttcatgccactttggtcaagttggtgttgtagcagatggtgttcccgaatgctacaaagcggccagagaagagtttagaagaggtgcagactttattaagattatgggtggtggaggtgtggcctctccaactgacaaaatatcaaacaaacaattttgcgacgacgaaataaaagcacttgtagatgtcgcaaatagttacctcacatacgtaacagcacacgcctacactgcggaagcgatacaaaattgtatcaagttaggtgttaagggtatcgaacacggaaacttattagatgaacgtaccgcagaacttatggcagaattgggttgctacttgactccaacactagttacctacaaagtgatgggttctgatcaatttagtgcattcttgggacctgaaaatagtagaaaaaatacagaggtgctttacaaaggaatttga

SEQ ID NO: 80276 - DNA, 2034 bp, Saccharomyces pastorianus
atgttgtgcttagaatccgaaaaatatgaaaatctgctccttgccctcagcaacaaaattgcagatctcattaaaatatcatttcgtggatctacagtgaggaatgaaggcatgaagttaacgggactacacattttgaattttgttctcaagaactactcgaccatgagagatcctcaggttcctggatcgtcgattttagaacagcaagaggcccaaataactagcgcattgatgcctgcttttagtaaaggaagctcacctactgtaatgtcctttgctattactgttgctgctgaagtgttggcatcgaatataatgccaccagataaattgggaagaatttcacaattactaattgaccttcttggtaactttaaagatcctaattccggtatacggataggggaagctataatcgttacacccaaagcgaaaagaaaaattgaacttgccgttttggacgcgtgggctgaggtagtgcaaagatccatcacatcgtcaaatgatgcgcttttctcttttaccaggaaatattggagcattttagtcccattatggatcatttctttacgtgaatacatgatgataaagtataacgataatgattctactgtgcaagtaaagaatgactcgaaagaaaatagtctcattgaaccaagaagtacgaaaattgagttatatgagccggtctggttaaattttgtagaggcccttgggtgcactctggattcagacgttcaagtcattttggcatctcttaacgacgaggaattagagtattttctttttattttatttagccaatgtttggaggctatcgtcaaaaatattgatgatcattcagtcaagatgcaagttttaccggctttacacaatgttttgaagagcaatctgtgcataaaaagtatatttgaggatgatattattactgaagttgttgagattatggacagactgatttctacaggtgacagtaaagaagaatttttgcttgttgatatcatcagtgacttgatcattgggtattcgaagtgtaatgctactcctgaaacatttctacaagatattgacaaactatatgagctactgcgactactgatgacaattatttctgagaggttgccatttattaagtataacgtgcttaccagcgaagaagatgataatgaaataaaaatctctcccacagatattagtctgttgaaaaaaacatttattgcgttcgaatcaaatatcagtaacttcgacaatatgttcaaagtagatctttattcatgtcttttattcatcatagggaaaatttatgaatgtagtcatcgtgaagtaataattccaatcatactcccacttttcaaggcactagtaaaagcgcttacggaatctgaggacgaaaaaaatattgtgttactagaaatattctacgggtcaataaaagatgttatttatcataagctggattcaaagaataaagttgcaaccattttgatcttgctgtctaatggatactctaagctaagttttcaggaactgaatcagtgcgcaaatattctctcggaggcattgaataatcctgctacgcagccaattgctctacaaggcttcaagagaataatatccaatatttttaaatacccgttgttgcagtattttatgaagttggttataaaaagattctttcaagatattcaaacaaacgattccttatcgcaggcaagcattaaaactaagttgataattcagttttccgaggaagtaatcaaacaagatcaccaaaaggcatcattgtcaattgctttatgtctttctttctttgccgcatatcatagcgcatatacagagaaagtagacaacgaagtagcaagtggcatagttgctttggctaaattggacaaaaattcatttaaagaagccatttctagcactataagtcctcaacaaaaagcaattataggttccgtgatggaggcatacgttaaatcgcagtctttgggctctgtcgaagaggcctttcaactgaaatctttcgactaa

SEQ ID NO: 80277 - DNA, 3396 bp, Saccharomyces pastorianus
atggagaaaagtaaatattatcatgctaccttcatgacaacccttcttcagctttttaatgcgattctaagaaattccaataatgatgataaaatccttgatccagccacatatgcgaaattttcgaaactatccaaaaccgtttttgacagtatttccactgatgagaaggacttttcagttacttttgtgtctgtcctaattgaatgctggacagctcatttcaaacaaactaattttatcagagagcactcccatgatattatagagaccatatattctagatttaccgaaggtgaaataggtgtttatggttttgcaaacgacgaaactcgtatctttaccgcaaaatctttagcggagatattatttgattattacttttctaaaaatattttaactctacaagaagtatggtccatctacgttaagatattcttaaactgtgatacacgagacgtggaaagtggttgcttcgaatctattattcatttgataaacttgaatttattagctgacaacacttttttgagtaactcaaaatatttggatatagttctctctttaagcggcgtcttcagcagttacgaagtgaataataggagcatgaatacattatcaaggtatttgagatactttcaacatatgcatgaagtaatattgccacatttgaatgattctgcaaagactcaaatgttgtactacatcctaggttgttctgatacttaccagagctcctctaaaagtgattcagcttcaaatttcaaatatagtattgatgcgaagcctgaaacacagtggcttacattactgcagcttgacttcacgtatgtgttaatcagcgacttaggttctactttcaccactgaggaaaataccgttaaagagattagagataaactggttgatttagctacatgtgaaatctttacgatacgagttcacactgtggaaattttgaaggtttttttgaacaactgtccagaatatctttcggagaccattgaaaactccttacgtgcactatccactgattttaaatctacaggaaaatttatttttcataaaaatcatggccatgcttttataatagcaaatctaatcaaaggtgccgagagcgattatatttcctatgagttgatcatgagaattacagtgttttctacatcattcattaagaataatactacatctacctcttctaatttgtacttcaagggtcttttatgctggatattattgataggattgatgaattataaagatgaacagtatttgaagctgcagataccccaactatttcttttctggaaagttttattaacacatacctacacataccacgacgaggatgaattatacaagaacctagaaatccgaaatcatgcattgacttgtttattgacgtatttaagcaatacgacaattgataaagaaatggctaaacaagtatcatatttgctaactaagtgctccaattttaatcattccattgacctgaaatcgaaaaacattgacaatgctttactgcataatgaaaacagaattttacaggtataccttaagctggagaaatacataaatagcgattttaatagttctttactaatattaatcgtgaagaatttttcagaccccaatctttacaccgagtcaagtagttccgttttgggaagcttaaaagatattggtaacaggaaagtgagtaacaaggacgacatggaaagtaatatagtattagaatcttcaattaatactctacttcgtcaaaacaacggctttgcattcggcctatccagcaaaataactggggaccgtatcgtgaatttatcgatgtccagtgcttacaagtatgatgaatcaataagtggaagttggccatccaaggattacaattggtacaatattttcgaagtggaagtatcaaaaccaatttcacccattttatctttagattcactgattctactatatggatctgggtcttattcccaaattgaccgctacgcacctcaggtcactacatctttaattgactcttctatggaacttttttcatctgtattcccttttttgaatagcaaaatacagtattccattatggaaactttaaatttgtccatgttctccaaaatgactacaccattgagaagcgtggctgtggctgctaatgtttgtagtgctctgcataatgctttacgcatcatgcaagaaaacaatctagagttggactattcagtggggcagctaattatcgaatcaataaagaagattcagttttttaatgacatttttctcacaaaaatcaaggcagattgtgtaggattgctgacagcggctatcgcaagaacacttggcgatgaagaaagacaaaaattccttacagagcaatcaaggatattcattaaaaacgtcgcagatatggacgaaccatacttaaggatgtttcatgtcttatcattggctacaatttttaaatataactcacaatatgctaattttgaagaatactttgatgtaatttttgcattaatgagggatccacaccctgttgttcattcatggtcattgaaagcaatgcatattcttcttgagaaacatttagtgattgatttaaagacggcagctctgttgctaagttctatggaagagcttttggtccaggataagtatggtatttacgggcgctctactcttcgctgtaactataatagggactttaattctcacgtagcaatcggtgaaatttcaaggacattgactgaaactgtggggccaaattttctagaacttaacaccaaggttcttgattcgttcagaaacattacactctccatgttaatttcaaataatattctcaacagcataaccagcattaaaatgtttgaaaacatagctacttttaaaatgaaaaacattctaaactatgaaatctttattcttgcttctaagagcataattaaaagttcaatagtgactggaataggctcatcatattttgacactacattcatgggctcaaatgaactcatttctcgaacttcaagtctaaaaggcgcctttgaaaactttgatttattgacgttgttgtacaaattacagatggaggaatttttcatgaaagaaatggaaaatttgagctggagatatctcgcactttttccaaattccggtcctgtcaagaattattttaccgaatggatattacatacttttaaaagagataatcattggttcgataaattatactcaatatttaatatgagtttaggaagactcttccaaagctataacagagacgtgtcagccctactagaggtaaatggcctaaaaaaatcttcagaaaaggaaattaaaggcgaagaagaagaatcaatagcgaatgttaccaactga

SEQ ID NO: 80278 - DNA, 339 bp, Saccharomyces pastorianus
atggcaaaccgatccctcaagaaagtgatagaaacatcatcaaacaatggtcacgatttattaacttggataaccaccaatttggaaaagcttatatgtttgaaagaagttaatgataatgaaatacaggaggttaaggaaatacacactcaactggatgagtttgtgaggtatatctccgtactagaaaatacggatgatttagaactgcattcagtgtttatcagtttgtctcagctctatacgatttccatatggcgtttgaaggacgaatatcctggtgtagtttttgattccgcagcattcttaacaaacgtattgtgtgaagggatcctctag

SEQ ID NO: 80279 - DNA, 105 bp, Saccharomyces pastorianus
atggtaggctgtctcagctactatgtgtacgaaaggaaaatggggcgtccacaaggtcatcatttacacgagctcataaagaagcgatgggacgatcgcaaataa

SEQ ID NO: 80280 - DNA, 1545 bp, Saccharomyces pastorianus
atgtttgcaaagttacccaaagagaccaagttctatttacaaaagatttttattgttcatgagtcattcttcgttaggtcggtctatcaagtaatttcaaacgctatgaactttaacttcttggactcaaaagatagtcagcatgattttccaagtttagttcatgtcttggacctgacttctttatccgaactaatagatattacgcgacttagaatatcgttgaacgtgtacttatatgattaccagatacgcgaacatataaatgtcccggaggaatattataacagattgacccctctggcaataagacagtataggcagttagtattcgataaaattttcaagaaattacagaatgacgctctgttgtgtgaattgatattccagaagccgggaaactataaaaaggtaaacatttttttggatattatcaaaagaaacaactacattgatttatctcaatgggatatttattctttggcatccgtgtggttgaattacttcattaagaataaagccaaacctctaatcccaattgaattaattccgttaccaattgttgatgatctaaagttcacaagtgaaacattccgcaaaattattaaattcaaccaataccaggacctctttatggtcataattcctttttttaataggatcatagcgcatggtgaatcgactaaacatgattcaaggaccctaagtaaagctttaactccggcgttatgtaaggaaaaactttccatgatgactaatgatcgtttagctattgggtcgagatatattaaaaatttactggactttttccccgaaatcgcgaaggaaatatcatcacctccttcatccgtatcatcgtcttctactatccctgttttgcctaagccaaggaagtcgtcgccaaccagatacagtgaactaggctgcttaacccttcctagaagtcgaagccctagtccacaaagatctgttacgtctccaacgtacacacctgtcgcattacaaaatacaccagtcttgaaacctaagtcttcaagcagaaatgtttcatccccatcattcaatgccaaacctccacttcctattaaggcagttacacgaccacaactgtctctaacttccaattctaatacagatttggcattagcttcttcttctacagatacattatcctcaccgacgaagactccatcagcagactcgcttccattgagtaacagcagcaccgatttaacgatatcagataatatcaaagaaatggttaaggacgagccagcaaaggataaaaattctgtggaaacagatatattcgtacaacagtttgaaagtttaaccctcgtccaaaacgcgaagattaagaagttcgacaaagaactacaagaaaagaagaagaaaaatgaaactacttcaaagacagcagataaattctctcaaaagggatattcagatattaaagcaagcaacaaggttagcaggctagctgcattgtacgaagaacgtttacaaggtttacaagtaatgaatgaaatgaaacaaaggtggtaa

SEQ ID NO: 80281 - DNA, 234 bp, Saccharomyces pastorianus
atgatagatatcaacgttaataacatattttttagatcttactcagttgatcctaactctggtcacgcaatttatgtctttgattcgacttatttgccagcatctgatgaaattggcgataagcaagtttatgacttgcttattaatgccctcatggatcgattggtaatgaaattgccacaggcaccatattcactggtgattttttatctgggttttcccagagaaaaataa

SEQ ID NO: 80282 - DNA, 279 bp, Saccharomyces pastorianus
atgaaagtcaaggccgacagagacgaatcctctccatacgctgctatgttggctgcccaagatgttgccgctaagtgtaaggaagtcggtatcactgccgttcacgttaagatcagagctactggtggtaccagaaccaagaccccaggaccaggtggtcaagccgctttgagagctttggccagatctggtttgagaattggccgtatcgaagacgttactccagtcccatcagactccaccagaaagaagggtggtagaagaggtagaagattatga

SEQ ID NO: 80283 - DNA, 120 bp, Saccharomyces pastorianus
atggctaaggctaagaagcaaaacagaccattgccacaatggatcagattgagaaccaacaacactatccgttacaacgctaagagaagaaactggagaagaactaagatgaacatctaa

SEQ ID NO: 80284 - DNA, 105 bp, Saccharomyces pastorianus
atgaaaaaaaaagccaagaaaaacttgaaactgacgcgcgaaaacgcgtcactaagaataaggaaaatgcatcaatacagtgccattattccaagtgggacctga

SEQ ID NO: 80285 - DNA, 147 bp, Saccharomyces pastorianus
atgacggggtacagggtcatacacctcacaggcatatattataccttctatcaccgaaaaagcttcttcttcttcttccttgaatatctccataatagtttgcgcgtactgtcctggaagggtataataaccgaaatggcagcttga

SEQ ID NO: 80286 - DNA, 816 bp, Saccharomyces pastorianus
atggtatcgaagacttggatatgtggcttcatcagtataattacagtggtacaggccttgtcgtgcgagaagcatgatgtattgaaaaagtatcaggtgggaaaatttagctcactaacttctacggaaagggatactccgccaagcacaactattgaaaagtggtggataaacgtttgcgaagagcataccgtagaacctcctgaagattgtaaaaaaaatgacatgctatgtggtttaacagatgtcatcttgcctggtaaggatgctatcaccactcaaattatagattttgacaaaaacattggcttcaatgtcgaggaaactgagagtgcgcttacattgacactaaaaggcgctacgtggggcgccaattcttttgacgcaaaactagaatttcagtgtaatgacaatatgaaacaagacgagctgactagtcacacatgggccgacaaaagtatccaattgaccctaaaaggaccatctggctgtttgaagagcaaagatgatgacaaaaaaaatggcgacggcgataatggtaaggatggtgacaacgaggggaaaaagccagctaagaaggcaggcgggacttcgtggttcacttggttattcctatacgctctactgtttacattgatatacctgatggttgtatcatttttgaataccagaggaggctcttttcaagatttccgtgctgagttcattcaacgttctactcaatttctcacttccttacctgaattctgcagggaagtggtttcgagaatcttaggcagaagtactgcccaaagaggcggttatagcgccgtttaa

SEQ ID NO: 80287 - DNA, 2025 bp, Saccharomyces pastorianus
atgcctgcaggtcgtgacgttaaaaacatggaggacgtcaaaatacaaaaagaggaagaaccagagaataacactgttattgaaggtgtcaaagaagaaagtcagccagatgagaacacaaaggaaatggatgaagtggaagaagatgatgaggatgacgatcaaccgatgattagtcctgataattccatttttggagacacaaagagtgagtctaaacaactaggcaacacttcgtcggttgctaatactccatctgaaattccagatgcgcataaagctgaacaggaggatatcatagaaaagacggaaagtgtagataagaaggtagatagtggcgaagagagaaacgaacaggaacgtgaaatcatgaacgatcactccaaaagtgccaatccaaagaaaaccactatcaccagagtagaacccgaaacttttgagataccgcaagcacatgaaattgttattccaagttattctaaatggttcaatctagaaaaaattcattccattgaagttcaatcgttacctgaatttttcaccaataggattccatcaaagacacctgaagtttacatgagatacagaaacttcatggtaaattcttacaggctgaaccccaacgaatatttcagtgtcactacggcgaggagaaacgtctctggtgatgctgctgcattattcagattgcataaattcttaacaaaatgggggctaataaactatcaggttgactccaaactattacctaagaacatcgaacccccactaacgtctcaatattccacaaggcatgatgcccccagaggactattcccattcgaaagttacaaaccatctgtacaactgccggatatggcaaagcttaaaaaaatgatgaacactagtgattcggagagtactttatataaatatttgaaagaaagcaaaagaaaatatgatgaaataactcacccccccagtaccactgatgatgaaaatggtgacaaaaatgataatggtggtaaaatgaacaatgaagtaagtacgtcaacaagcatgactggtgatgccaatctattggaagaaggcgaaacttcacgtcctctgaaaaaagtcaaaattctagaacaaattgatgaaaattggtcaaaagaagatttgcaaaagctattaaagggaatacaagaattcggcgctgactggtacaaagtggccaaaaacgttggcaataagtcgcctgaacagtgtatcttacgtttccttcaattgcccattgaagataaatttttatacggtgacggcaatggcaagggtgataatgacaacgggttaggacctttgaaatatgctcctcacttgccattttcgaagagcgaaaaccccgttttatcaacaatagcattcttggtgggtttggtcaatccgaagactgtacagtcgatgacccagagagccattcagtccgcagaatcaataaaatcacaaaaagaggaaatctctgaccaaaagccaattgaacatattaaagaaggttcagaaattgccatatcatcattgggttataggagtcatattttcgctactaacgaggaaaggcaaatgaattttttgactaacgagctaataagacttcaaatggaaaaattggacgctaaattaaatcatttaaagaaactagaaaaatttatggagctagaaaggaaaaccctagaaagacaacaggaaaacttactaattcagagattgaacttcaaccaaaactccagcaagattgtaaacgttttaagcaaatgcttgaatttaatatccgacagcaatatcaataatagttcagtggcggagaaggaggaaatcaggtcgcagatagaccatttcaaaagtatgctatcgaaacctgaaactttaagtattggaaagaatccatttaacaaacctaatattgaaacaggtgaaaaccataatggccaaagtatatctaacgagaatgatgtcaaacccatttctattgaagcacctcaattttacaggtattggtcggcataa

SEQ ID NO: 80288 - DNA, 672 bp, Saccharomyces pastorianus
atgtctcatgtccaaaatcaggttatgataagggttgtggggtttaccgtagtggcattccagcttactatgggtacggaggtacaatcaaaaatgtttctgtttgaattcgaaatgcctactgaaactgagaacaatagcagctctattgggtactatgacttgcctgctatttggttgctaaacgatcacattgcaaggacttctcaatatccaaccaatgccaactgttcatgttgggctagtggatgtggggaatacgatatttttgaagctatgaatggtacggagaaaaaccatctctattctactttccacactttccaaggtatcgaggatttgggtactggtatccaatcttacggatacataacaagaaatactactggaacgatgaaaggtggtgttgtttttgattctagtggaaatgtcgtctctttcatatccgatgccactccattcaatggaacagtttctgctgatactgttaacgatttattggctgcaattccagaaaacgaaacatattcttctcaattgatgagcatttctgctactgcgccttcgaccacctcgaagtcgaatggtgttgctttaacgaagatgcaaaacggtgtatggtattatattttggccatattcactgccttcacgcaagtggttttgatttga

SEQ ID NO: 80289 - DNA, 627 bp, Saccharomyces pastorianus
atgttacagagtatagtcctttccgtgtgcatgtttatgttgcacacagtcgctgccagtggacctcagtcgtaccaaaagttggatttcactaatgttggttttacaggctcctacgtagatgtgaataagtttaaagatatcaccaacaatgaatcgtgtacttgcgaagtgggtgacagagtatggtttagtggtaagaacgctccactagcagactatttatccgttcatttccgtggaccattgaagttgaaacaatttgctttttacacatcccctggatttaccgtcaacaacagcagaagttcttctgattggaaccgtcttgcctactatgagtccagttccaaaaccgctgataacgttacctttctaaatcatggaggtgaagcttccccttgtttaggaaatgctttgtcctacgctagttctaacggtactggcagcgccagtgaagctaccgttttggcagatggcactttgatttcttcagatcaagaatacataatctattcgaatgtctcatgtccaaaatcaggttatgataagggttgtggggtttaccgtagtggcattccagcttactatgggtacggaggtacaatcaaaaatgtttctgtttga

SEQ ID NO: 80290 - DNA, 630 bp, Saccharomyces pastorianus
atgactactttagcatcaagtattgagcataaaacaaaacatctagccgcgcccttcgagaacgatgagaacccttggatgaaaaaatactgttgccaatgcaaatcatgtaaaatgagtgtgcctgtccaaccttggctgccaaggttttttgtttttggaatcttgtgccccgttttctggttggtgaatcttttagcctggtggttcttacagtattggcaaccacatgaattggaattccacgacttgcaagaagacgaatacccaggattttatgaatatgaagccataactaaaagaacggtgatacccataaaggaagaagtcctccaagagattcgcgtcatgcagaatttcagtgatagcaacagcgaagaatattacgagagcaaagacggtatgccgtcgtctatcctaaacgtgaacacggaacaagtcgaggacgagaatgacaccttgaaaaaatatcgttacgcgtttttgaagaaggtagcccacgatgtgctggagtcgcacgatttattacgtaagaccttccgcgactggaatttacggtctttgcttggcctcctcatcgattctatactcataatatttgtagttctcctatgtaagaaaagccgttag

SEQ ID NO: 80291 - DNA, 102 bp, Saccharomyces pastorianus
atgatgtcttctaccaatgtttgtccggtactttctacaacttgtacgacgaacacattggtagtcaatgtactccagtccacttggaagctatcgatttga

SEQ ID NO: 80292 - DNA, 273 bp, Saccharomyces pastorianus
atgaacttaaagggcggtatcttaactgacggtaagggtagaattggttctattgttgctaacagacaattccaatttgacggtccaccaccacaagctggtgccatctacgctgctggttggtctataactccagacggtaacttggctattggtgacaatgatgtcttctaccaatgtttgtccggtactttctacaacttgtacgacgaacacattggtagtcaatgtactccagtccacttggaagctatcgatttgatagactgttaa

SEQ ID NO: 80293 - DNA, 114 bp, Saccharomyces pastorianus
atgaaagtaaacagatatttccttacttggaaaaataaagcgacaatgaaggtgagttttatagtcgctcctacagtgatgcaagtgcaatgtcttttttttttcatcctgtaa

SEQ ID NO: 80294 - DNA, 144 bp, Saccharomyces pastorianus
atgttgaaaattgcatcgctgaaaaaaaaagatatgcaaacaaaagaaagttgcattctgaaacgaccgagtctctcttgcccgcctaacaaaaccaaagaggtaaatgaaagtaaacagatatttccttacttggaaaaataa

SEQ ID NO: 80295 - DNA, 1728 bp, Saccharomyces pastorianus
atgtcaccttacagaaggcttagcgcatatcctcctagtacaagtcccccactacaaccccctttcaagcagttacgaagagatgaagtacaaggtcagaaattgtccattcctcagatgcaaccttgcaactctaaaaacgatcttcaacctgtcttaaatgctactccaaagtttagacgtgcgtcgctcaattccaagacgatatctcccctagtcagtgtcacgaaaagcctgattaccacatattctttatgttctccagaatttacctaccaaacgtccaaaaaccctaagagagtacttacgaagcccagtgaagggaaatgtaacaacggattcgacaacataaacagtgactatattctttatgtgaatgacgttttgggtgtagagcagaacagaaagtaccttgtgctagacattttgggtcaaggtacatttggtcaagtggtcaaatgtcaaaatttgctgacgaaagaaatattggctgtaaaagtggttaaatcgaggacagaatatttgactcaaagtataacggaagctaaaattttagagctactgaatcaaaagatagaccctactaataaacaccattttttaaggatgcatgactcctttgtccacaagaaccacttatgtttagtgtttgaattactaagcaataatttgtacgaattattgaaacaaaacaaatttcatgggctctctatacaacttatcagaacattcaccactcaaatactggattcgttatgcgttttgaaggaaagcaaactgattcattgcgatctgaagccagagaatatcttgctctgcgcacctgatatgccggaattgaaaattattgattttggctcatcttgcgaagaggcaagaaccgtttatacatacatccagtccaggttttatcgtgctcctgaaattatactgggtataccgtattcaaccagtattgacatgtggtcgttaggttgtattgttgctgaattatttttgggtataccgatcttcccaggcgcttctgaatataaccaattaacaagaataatagacacgcttggatatcctccatcgtggatgatagatatgggtaaaaactctggaaaatttatgaagaaattggcaccagaagaaagttcttcctctacacaaaagcatcgtatgaaaactattgaagagttttgcagagaatacaatataatggaaaagcccagtaaacaatattttaagtggagaaagttaccagatattattagaaactacaggtatcctaaaagcatacagaactcccaagaacttatcgaccaagaaatgcagaatagggagtgtttgatccactttttaggcggtgtgctaaatttgaacccgttagaaagatggacaccacaacaagctatgctacaccccttcataacaaagcaggagtttacaggtgagtggtttcctccaggatcgtctttaccgggtccttcagaaaaacatgacgatgcaaaaggccagcaaagtgaatatggaagtgcgaaggactctagtaacaatacaggccacaactatgtctataatcctagctctgccactggtggtgctgatagcgtcgacattggtgctatcagtaaaaggaaggagaatatatctggcgacatctccaataattttgctgttactcattctgttcaagaagggccaacaagcgcgttcaataaacttcacattgtcgaagaataa

SEQ ID NO: 80296 - DNA, 786 bp, Saccharomyces pastorianus
atggtttacgtcacttttggagaagattcgatcatgagaagaggttgtttaatatggggatccaagtcatatagaaatatgtgtcgctttaattctggtttttttttccggcagtcaatactggacaactatgattactactttagggtggaacccaatgtcaagtattattgcgatttcccatatgacccgttcagagttatgagattgaagggcaaaaaatacggatttgtcatatcattatatgaatatgaggaaaccataccaaccttatgggacgcggtagaggagtatttagtggccagcgaagagaccattttacgtaaagaggacagtgcctatgcatttttgaccgattcaggactagttggtaagcattatcccgttgttgaagcaaactctgactacaatttgtgccatttttggtcgaattttgagattggcgacttgaatttcttcagaagtgacgaatataagcatttttttgaaactttagatgccaagggcggattttactacgaaaggtggggtgacgcacctgtacattcaattggtgtctccctactgctgagacctgacgaaatcattcattttgacgaacttggctattttcactcaccgtttggcacctgtccagcatcttacgctgttagactcgatcagaggtgtagatgcaaaagcgatgatgaaagtgtcatagatataaccccacatagttgtttgatgagatggtggaaaaacggtagcggcaaatatttcttaaaagaagagcaagacgagatttaa

SEQ ID NO: 80297 - DNA, 669 bp, Saccharomyces pastorianus
atggcaaaaggaggctcgctatacatcgttggcatattcttaccaatatggacctttatgatctatatttttggcaaagagttattcctcatacgaaaataccaaaagattgacagtacgtatactgctctttcccaaagagtaaaagaacaatatgatacaagtcgaagaagaaactattttcctaaagtaaaactttcccgcaatagctacgacgactacactttaaattataccagacagaatgattctgattcttttcacctacgagaaaatgcaacaattttaatgctggtgagaaattcagaattagaaggggcattggattcaatgagatcattagaggacagatttaacaacaagtatcattatgattggacttttctaaatgacgttcctttcgatcaagacttcattgaagctacaacatcaatggcgagtgggaagacccaatatgctttaataccaccagaagattggaatcggccgcaatggattaacgatacactttttgaagaaagactccgagtcatggaggatgagggtgttttatatgggggatccaagtcatatagaaatatgtgtcgctttaattctggtttttttttccggcagtcaatactggacaactatgattactactttagggtgaacccaatgacctgcagc

SEQ ID NO: 80298 - DNA, 495 bp, Saccharomyces pastorianus
atgttcggtgcagccatatattcttggaattttgaaggtatgagttttgtagccgtatctcaaccaatgtttgacactgtgtttatatatattgagaagtctgggcaaatagagtttttcttaaaactggttctaaaggttaaggcaaaatcagattccatcccggatgagtttggttcatctttgctgtttaatgacgaagaaaagaaattgtacgtttcctccccaggcagtttcgatgcaagaggaagtatatggaaaattagtatggatgagctattaaaggtgggaaacgatccgaagcgcaaaacccttttgattaataatttaaggcatctcatgctcataaatcctgacaaaagtagcaagggtgtgtcaaattttggtaatagcatgattttgggtccccaaaatcaccttatagtaggcattccccaatatgggtatggaaattttgatcacatgcagctaaccggtagaatcttggtactttaa

SEQ ID NO: 80299 - DNA, 5049 bp, Saccharomyces pastorianus
atgaaagatgaatttgaggcgttaggagttaaagtattgggtactccaatcgatactattattaccacggaagaccgtgaactcttcagtaatgccattgacgaaattaatgaaaaatgtgctaaatctcaagctgctaattcagtggacgaggcattggccgctgtcaaggagatcggtttcccagttattgtacgtgctgcatatgcattgggtggtttaggttccggtttcgctaataatgaaaaagaattggttgatctatgtaatgttgcattttcatcctcacctcaagttttagtcgagaaatctatgaaaggttggaaagaagtcgaatatgaagttgttcgtgatgcttttgacaactgtattactgtttgtaatatggaaaattttgatccactaggtattcacaccggtgattccatcgttgtagccccatctcaaactttatctgatgaagattacaatatgttaagaactactgctgttaatgttattagacacttaggtgttgttggtgaatgtaatatccaatatgctttaaatcccgtttctaaggattattgcatcattgaagttaatgcgcgtttgtcacgttcctctgctttagcttctaaggctactggttacccattggcctacactgcggctaagttaggtttgaatatcccattaaatgaagttaagaactccgtcacaaaatccacatgtgcttgttttgaaccttctctagactactgtgttgtcaaaatgccaagatgggatttgaagaagttcaccagagtttctaccgaattatcttcatcaatgaaatctgttggtgaagttatgagcatcggtagaaccttcgaagaagctattcaaaaagctatcagatccacagaatatgctaacctcggattcaatgagacagatctagatatcgacattgattacgagttgaacaaccctacggatatgcgtgtcttcgccattgcaaatgcttttgctaagaagggatattctgttgataaagtctgggaaatgactagaattgataagtggtttttaaacaaactgcacgatctggtccaatttgctgagaaaattagttcatttggtactaaagaggaattaccttccttagttttaagacaggctaagcagttaggttttgatgacagacagattgcaagatttttggattccaacgaagttgccatccgtagattaagaaaagaatatggaattacaccatttgtcaaacaaattgatacagttgccgctgaattccccgcttacacgaactatttatacatgacatacaatgctgactcacacgatttatcctttgatgaccacggtgttatggtcttgggttctggtgtttaccgtatcggttcttctgtcgaatttgattggtgtgctgttactgcagttagaacattacgtgccaacaatatcaaaactatcatggtcaactataatccagaaactgtttccacagattatgatgaggctgatagactatactttgaaaccatcaaccttgaaagagttttggatatttacgagattgaaaactcaagcggtgttgtcgtatcaatgggtggtcaaacttccaacaacatcgccatgactttacatcgtgaaaatgtaaagattcttggtacatcccctgacatgattgattctgctgaaaaccgttacaagttctctcgtatgttggatcaaattggtgttgaccaaccagcttggaaagaattgacatccatggacgaagctgaatcttttgccgaaaaggtgggttatccagttttggtacgtccatcttatgtgttatccggtgccgccatgaatactgtttattctaaaaacgatttggaatcctacttaaaccaagccgtcgaagtttcacgtgattatcctgttgttatcactaaatatattgaaaacgcaaaggagattgaaatggatgcagttgcaagaaatggtgaattggttatgcatgttgtctctgagcatgttgaaaatgcaggtgtccactcgggtgatgcaacattaatcgttccacctcaagatttggctcctgaaactgtggatagaattgttgtcgccactgctaaaattggtaaggctttgaaaattacaggtccatacaacatccaattcattgcaaaggacaatgaaatcaaggtcatagaatgtaatgttcgtgcttcgagatctttcccattcatttcaaaggttgttggcgtcaatctgattgaattggcaacaaaggccataatgggtttgcctttgacgccttatcctgttgaaaaattaccagatgattatgtcgccgttaaagtaccacaattctctttcccacgtttagcaggagctgatccagtcttaggtgttgaaatggcctctactggtgaagtcgctacttttggccactcgaagtatgaagcatacttaaagtctttgttggcaaccggcttcaaacttccaaagaagaatattttattgtctattggttcttacaaggaaaaacaagaattgctttcttccgtacaaaaactatacaacatgggatataaattatttgcaacatcaggtactgctgactttttatctgaacatggtattgccgtccaatatctggaggttttaaacaaggatgatgatgatcaaaaatcagaatactcacttactcaacatttggctaataatgaaattgacctttacatcaacttgccttctgccaacaggttccgtcgtcctgcatcctatgtttcaaaggggtataaaacacgtcgtttggctgtcgattattcggttccgttggttactaacgttaaatgtgcaaaattgttgattgaagccatttcaagaaatatcactttagatgtttctgaacgtgatgcacaaacttcccacagaactattaccttacctggtttaatcaatatcgcaacttatgttccaaatgcatcccatgttatcaaaggcccagctgaactgaaggagaccacacgtctatttttggaatccggttttacatactgtcaattgatgcccagatccatcagcggacctgttattactgacgttgcatccttgaaggccgcaaactctgtttcccaagattcatcttacactgacttttctttcactattgctggtacagcacacaatgctcatagtgttacgcaatctgctagcaaagtgacagcattgtttttgcccctacgtgaattaaagaacaagatcacagcagtagctgaacttctgaatcagtggccaactgaaaagcaagtgattgcagaagctaaaactgcagatttggcatcggttttattgttaacctcccttcaaaacagatctattcacattactggtgtttcgaataaggaagatttagctttgattatgacggtcaaggcaaaagaccctagagtgacttgtgatgtcaatatttattctttgtttattgcccaagatgactatccagaggcagttttcttgcctactaaggaagatcaagagtttttctggaacaaccttgatagtatcgatgctttctctgtcggtgctcttcctgttgccttggcaaatgtcacaggtaacaaggttgatgttggtatgggtatcaaagattcattaccactattgttggctgctgttgaagaaggtaaattaaccattgatgatatcgtcctccgtctgcatgacaatcccgctaaaattttcaacatccctactcaggactcagttgtcgaaattgatttggattattctttcagacgtaataagagatggtcaccattcaacaaagatatgaacggtggtattgagcgtgttgtctataatggcgaaacattagttttgagcggtgaattaatttcaccaggcgccaaaggaaaatgcattgttaatccaagtccagcttccataactgcttccgcagagctccaatctactagtactaaaagaaggttctcgatcacggaagaagcaatcgctgataatttagatgccgcggaggatgcaattccagaacagcctttggaacaaaaattgatgtcttcaaggccaccaagagaacttgttgctccaggcgccatccagaatttgatccgtagtaacaatccattccgcggaagacatatattgtctatcaaacaattcaaacgttctgatttccatgtgttgtttgctgttgcgcaagaactaagggcagctgtcgcaagagaaggtgtcttagatttaatgaaaggccacgttattactacaattttctttgaaccatctactcgtacttgttcttcattcattgctgctatggaacgtttgggtggtagaattgtaaatgttaatccattggtgtcttctgtcaagaaaggtgaaacccttcaagatactatcagaactttggcttgttacagtgatgccattgtcatgcgtcattcagaagaaatgtctgttcatatcgccgctaaatattctcctgttccaattattaatggtggtaatggttctcgcgagcatcctacgcaggccttcttggatttgtttacgattcgtgaagaaatcggtactgttaatggtattactgttactttcatgggtgatctcaaacatggtagaaccgtacattcattgtgtcgtttgttaatgcactatcaagtcagaattaatcttgtttctcctccggaattgaggttaccagaaggattaatagaagagctaagaaaagctggcttacttggtgttgagagcattgaattaacccctcatatcatctcaaagaccgatgttctgtattgtacaagggtccaagaagaaagattcaatagccctgaagaatatgcacgtctgaaggatacttatatcgtggacaacaagatcttggcacacgccaaagaaaatatggctatcatgcatccattgcctcgtgtaaatgaaatcaaagaggaagtggactacgatcatcgtgctgcttacttcagacaaatgaagtatggtttgttcgtcagaatggctttgttggccatggtcatgggtgttgatatgtga

SEQ ID NO: 80300 - DNA, 426 bp, Saccharomyces pastorianus
atggccactattgctcccactgctccaatcacccctccaatggaatctacgggtgaccgtctggttacgttggaacttaaggacggcacggtcttacaaggttattcatttggtgctgagaaatccaccgctggtgaattagttttccaaactggtatggttggttatcctgaatctgtgaccgatccatcttatgaaggccagatcttagtcatcacttacccattggtaggcaattatggtgtcccagatatgcacttgagagatgaattggtcgaagaattgccaagatattttgaaagtaatagaatccatattgccggtttagttatttctcactataccgacgagtactctcattatcttgctaaatcttccttaggtaaatggttacaaatgaagggatcccagctgtttatggtgtga

SEQ ID NO: 80301 - DNA, 1089 bp, Saccharomyces pastorianus
atgtttaaaatttctcctgatttatcacagatgagagaaagtttaggttttctcttagaccatccacgtcgttgtttcaccttgctatttcctaaggcagctacatggtggctacttttaacgcttgcaggattgaatataactgattggattttatttattattctagattttggctcaacagttgtgaaatcattatcgaaaggctatagagtccttgtcggcctgtttcaatctgttagcacaagaactgctggattcagcgttgtcgatttaagtcaactgcatccttctatccaagtctcctatatgctaatgatgtatgtctccgtattaccattggccatctctattcgacggacaaatgtttacgaggagcaatctttaggactatatggagatatggggggagaaccagaagatacggatactgaagacgatggtaacgatgaagatgacgacgaggaaaacgagagtcacgaaggtcaaagtagtcaaagaagtagttcaaacaacaacaacaataacaacaggaaaaagaaaaagaaaaagaaaactgaaaatccaaatgaaatatctacaaaatcctttatcggtgcccatttaaggaaacagctttcatttgacttgtggtttctatttttagggttatttatcatttgcatttgtgaaggggacaagataaaggacgtacaagaaccaaactttaatatatttgcaattctttttgaaattgttagcgcttacggtacagttgggctatcgctaggttatccggacaccaaccaatcgttttcaagacagtttactacattatctaagttggtgatcatagctatgctgatcagaggcaagaatagaggtctaccatactcactggatcgtgcaattatcttgcctagtgatagacttgaacatattgaccaccttgagggcatgaaattgaagagacaggctagaaccaatacagaagacccaatgacggaacatttcaagagaagtttcactgatgtgaaacatcgttggggagctcttaagcgtaagaccacacattcccgaaatcctaaaaggagcagcacaacgctctaa

SEQ ID NO: 80302 - DNA, 2385 bp, Saccharomyces pastorianus
  modified_base (2336)..(2336): a, c, g, t, unknown, or other
atgcattttagaagaacgatgagtagagtgcccacattggcatctcttgaaatacgatataaaaaatctttcggccataaatttcgtgattttattgctctatgtggtcactattttgctccagttaaaaaatatatcttccccagttttatcgcggttcactacttctacacgatatccctgacattaataacttcaatcctgctatatcccattaagaataccagatacattgatacattgtttttagcagcgggcgcagttacacaaggtggcttaaatactgtggatatcaacaatctaagcttataccaacaaattgttctgtatatcgtatgctgcatatcaacaccaattgcagttcatagttgcttggcatttgtacggctttactggtttgagcgctacttcgatggtattagagactcttctagacgaaattttaagatgagaagaacgaaaacaatcttagaaagggaactaacagcaagaaccatgaccaagaatagaacaggtacccaaagaacgtcttatcctaggaaacaagctaaaacagatgatttccaagaaaaattgttcagcggagaaatggttaatagagatgagcaggactcagttcacagcgaccagaattctcatgacgttagtagggacagcagcaataataatacgaatcacaatggtagcagtggcagtttagatgatttcgttaaggaagacgaaacggatgacaatggagaatatcaggagaacaactcctactcgagggtaggtagttcgtctaacacagttgcagacgaaagtttaaatcagaagccgaagccaagcagtcttcggtttggtgagccacacagcaaacaaagacccgcaagagttccctcagagaaatttgcaaaaagaaggggttcaagagatattagcccagccgatatgtatcgatccattatgatgctacaaggtaagcatgaagcaactgctgaagatgaaggtccccctttagtcatcgggtcccctgcggatggcacaagatataaaagtaatgtcaataagctaaagaaggccaccggcataaatggtagcaaaatcaagattcgagataagggaaatgaaagtaacactgatcaaaattccgtgtcaagtgaagcaaacagtacggcgagcgtttcggacgaaagctcgttacacacaaattttggtaacaaagtaccttcattaagaacaaatactcatagatcaaattcgggcccgatagccattactgataacgcagaaacagacaaaaagcatgggccatcaattcaattcgatataactaaacctcctagaaaaatttcaaaaagagtttcaaccttcgatgatttgaacccaaaatcttccgttctttatcgaaaaaaagcatcgaagaagtacctcatgaaacattttcctaaagcgcggcgaatacggcaacaaattaagagaaggctttctactggttcaattgagaaaaacagcagtaacaatgtttcagatagaaaacctattactgatatggatgatgatgatgatgacgatgacaacgacggcgataacaacgaagaatactttgctgacaacgaaagcggcgatgaagatgaacgagtacagcagtctgaaccacattctgattcagaactcaaatcgcaccaacaacagcaagaaaaacaccaactgcagcagaacctgcaccgcatgtataaaaccaaatcatttgatgataatcgttcaagagctgttcctatggaacgttccaggaccatcgatatggcagaggctaaggatctaaatgagctcgcaaggacgcctgattttcaaaaaatggtctatcaaaattggaaagcccatcatagaaaaaaaccgaactttaggaagaggggatggaataacaagatatttgaacatggtccctatgcatctgacagcgatcgcaattatcctgataatagtaatactggaaacagtattcttcattacgcagagtctattttacatcatgatggctctcataaaaatggaagcgaagaagcctcttccgactctaatgagaatatctattccacgaatggaggaagcgaccacaatggtcttaacaactatcctacttacaacgacgatgaagaaggctattatggtttacatttcgataccgattatgacctagatcctcgtcatgatttatctaaaggcagtggtaaaacgtatctatcatggcaaccaactattggacgtaactcaaacttccttggattaacaagagctcagaaagatgaattaggtggtgtcgagtacagagcaatcaacttttatgcacatattgngttgtctactacgttggatggcatgggatcctctagagtcacctgcagc

SEQ ID NO: 80303 - DNA, 165 bp, Saccharomyces pastorianus
atgtacccaataatggaaatccagatggtggctgttccacttgctcttcccagtccaactgcactggtgcattatcagcagcagcaacagcagctcccgcaacatcatccctggtacgacctctcgctttctgaagaagccctctcgacctgctgttgtagttga

SEQ ID NO: 80304 - DNA, 2313 bp, Saccharomyces pastorianus
atggacggtagaaatgaaaaaccaaccactcctgtgtcagattttcgggtgggaagctccgagcaaagtcaagcgggagtgaatcttgaagatagtagtgaccatcgcacttccaattcagccgagagcaaaaaaggcaatttaagtggtaaaagcatcagtgatctaggtatttctaataatgataacaaaaatgtaagattcactgctgatacggatgctctagaaaatgatttgtcttcaagatctacagaaaccagcgataattctaagggcacagatggacaagatgaacaagataggcctgctcgccacaagaggaagcctaaagtttctttcacacatttaaggaacaatggtaaggatggagacgatgagacgttcatcaagaagataataaataacctgactggaaatcaagggggtttggtccctggcttggcaccaataccttcagaaaatgaaaatgggaagaatgatatagaaaaaaataaccgtaatgaagaaattcccttatccgatctagctgatgcgtctaaaatcgtagacgttcatgagggcgacgataaagaaaaactggaggctctcaaattagaaggtgacgtaaattgtacgtcggatggcgaaacgttaggctcaagttcaaaaaattcatttctggcgcctgcagtggatcattttgatgattatgcggaaaacaattcatccgacgataacgaagggtttattgaaacctccacatatgtaccccctccatctcaagtgaaaagtggagtactagggtcattattgaaactttaccaaaatgaagatcaaaattcaagctcaatcttttcagattcacaagctgtaacaacagatgatgaaggtatttcttctactgctggaaacaaagacgtaccagttgccaagcgtagcagattacaaaatttaaaaggcaaggctaaaaaaggcagaatgcctagactgaagaaaagactaaaaactgaagcgaaaattacggttcacattgcagacattttacaaagacaccggttcatcctacgcatgtgtagagctcttatgatgtatggtgctccgacgcataggcttgaagaatatatggttatgacttctagagtccttgaaatagatggtcagtttttgtatcttccaggttgtatgattgtttcatttggtgatgcaacaacaagaacttccgaagttcaattggttaggtgtactcaaggtctaaacctttggaagctgcatcaagttcatgccgtttacaaaagagttgtccatgataccttaggtgccgatgaaggtaatgctttactcgatcaaattttggctgacacgaatctatatccaccttggatgtgtgttcttttatatgcattttgttccgctatggtcactccgtatgcctttggtggcgattgggtaaacctggcaatctcattttttatggggctttgtgtggggtcattacaatttattctttcacaaaagtcatacatgtattcaaacgtcttcgaaatttctgcatctattgtcgttagcttctgcggtagagcttttggctctatccctcgttctcacatctgctttggtgcagttacacaaggctcattggcattaatcctgccaggttatattattctgtgtggtgcactagaactgcaaagtcgaagcctagttgctggcgcggtccgtatgttctacgccattatttattctttgtttttgggttttggcataacattgggctcagctttgtttggatggatgtatcacaatgccactaacgaaatttcatgtcctcaattaatttctccgtggttcaggttcctcttcgttccagcgtttaccattagtatctcgttattaaatcaagcacacatctcacaactgccagttatggtcttcatttcttgcaccggttatgtcgtaacatattgggccggtaagcattttgcgaattcgacagagtttactgccgccttagctgcatttgtcataggtgttttaggtaatctatattccagaatttggaaaggtttagcggtatcagctatgcttcccgcaatcttcgttcaagtgccatctcgtattgcttcacaaaattcgttgttgtctgggttgcaaagtgcaaatacaattgttaatgctaatgaaaccattacgacaagcacctccgatccatcgtcctcaatgtcatttagtatgacaatgattcaagtttgtgtcggtatttctgtgggactatttgcttcttcactctttgtctatccctttggtaaaaagaaaactggtcttttcagtttataa

SEQ ID NO: 80305 - DNA, 114 bp, Saccharomyces pastorianus
atgccagattttactccaagaaatttcttgatacctacattaaaaaaatcacgggaaaagttcgagcctcatctatccaattcaaaccaacattttggaaatgtaaccttctaa

SEQ ID NO: 80306 - DNA, 1821 bp, Saccharomyces pastorianus
atggttgaaaaacgtagtagacagagttccagtagtggctcagagttcagtgttccacctgatgtcgataacccgccactttctatccctttgaagactttatcagacagatatcagctgatcgaaaaactaggtgcaggatcatttggttgtgtaactttagccaaagcgcaatttcctttatcgaacatattgggtaaacaacatgatataaggggtactttaatggatcagcctaaaaatggtcaccaaaactatataacaaagacacaaggtgtagtggctataaagacaatgatgacaaaactgcatacactccaggattatacgagggtcagagaaattaagttcatactggcaatcccagcgaatgaccatctgatacaaatttttgaggtctttattgactctgaaaattaccaattacatatcgtgatggaatgtatggagcaaaacctatatcaaatgatgaaacatagaaggcgccgagttttttcgattccttctttgaaatctattctatcgcagatactggctgggttaaaacacatccacgaacataatttcttccacagagatttaaaacctgaaaatattcttatcacaccaagtacccagtattttgaaaaggagtacatgaaccagattggatatcaagataactatgtcattaaacttgcagattttggtttggcacgccatgttgaaaataaaaacccgtatacggcctacgtttccacaagatggtatagatcgcctgaaatattattaagaagtggttactattccaaacctttggatatttgggcattcgggtgcgtggcggtggaagttactgtattcagagctctcttccccggtgctaacgaaatcgatcagatatggaaaattttagaagttcttggtacacctatcaaacgttctgattttgttaatacaaaccacatcacagctccaccacctggtggattttgggatgatgccagtaatttggtccataaattaaacttgaaattgccttatgtagaaggttcatcgttggatcatctactttctagctcccaactatccgatttatctgaggttgtcaaaaagtgtttaagatgggatcctaatgaaagggcaacagcccaagagctttgtaaaatgccattttttgaaaacaccgtggcagcccaagtagacgcaagaggcaatgtgactaatacagaacaagcattgatttttgcaggtataaatccagtagcgaccaacacaaagcccatatattttaactcttcaacaaaattgcccgcagaaacagagtctaatgatattgatatcagcaacaacgatcacgattctcatgctatgtgctcaccaacattaaatcaagaaaaactaactttggtagaatttttaaacgaattcgttgaagaagataatgatgatcactcaatacctgatgttggaacagattctaccatttcagattctattgatgagactgaattatcaaaagaaattcgtaataatttggccctttgtcaactaccagatgaagaagtcttagatcattcattatcgaatattaggcagttgacaaatgatattgaaattataaataaagatgaagcagacaacatggaacagctattttttgacctggaaattcctgaaaaggatgagtttcagagaaaacaaccatttaatgaacatgcagatattgatgaagacatcgttctaccatatgtgaacaactcaaattacacacatacagataggtcacatcatagaggtgataatgttttgggtgatgcctctttaggcgaattcgtttaa

SEQ ID NO: 80307 - DNA, 1230 bp, Saccharomyces pastorianus
atgagagcagaaggtaacaaacctaaaaatggttgcatctgcggttcaagtgactccaaggatgagttgtttatacagtgtaacaaatgtaaaacgtggcagcacaagttatgttatgctttcaaaaaatcagatccaataaaaagagattttgtttgcaaaagatgtgacagtgatacgaaagtgcaggttaatcaagtaaaaccaatgatattccctagaaaaatgggagatgagcgattatttcaattttcatccatagtgacaacttcagcatcgaacacaaatcagcatcaacagtctgtgaataacatagaggaacagcccaagaaacgtcaacttcattataccgccccaacaactgaaaatagcaatagtatacggaaaaaattgaggcaagaaaaaccggtagtatcaagccactttctgaagccactactgaatgaggtaagttcttccaatgacacggaattcaaagcaataacaatatcagagtataaggacaaatatgttaagatgtttattgataaccattatgatgacgattgggttgtttgttctaactgggaaagctcaaggtcagctgacatcgaggtaagaaaatcatcaaatgaaagagattttggagtcttcgctgcagattcttgtgttaaaggtgagctaattcaagaatatttgggcaaaattgattttcaaaaaaattatcagacagatccaaataatgactatcgtttgatgggaacgacaaaacctaaagtactttttcatccacattggcctttatatatagactctcgagaaacaggcggattaacaagatacataagacggagttgtgagcccaatgtggaactagtaacggtaagaccgcttgacgaaaaaccaagaggagataatgattgtagagttaaatttgttttaagggctataagagatattcgtaagggagaagagataagcgtagaatggcaatgggatttgagaaatcctatttgggagataataaatgcatctaaagatttggattccctaccggatcccgacaagttctggttgatggggtcaataaagactattttaacaaattgtgattgtgcatgtgggtacttgggccataattgtccaataactaaaatcaaaaacttttctgaagaatttatgaggaatacgaaggaatccctatctaataaatcttactttaacacaataatgcacaactgtaagccataa

SEQ ID NO: 80308 - DNA, 411 bp, Saccharomyces pastorianus
atgacttcaccggaatcactatcttctcgtcatatcaggcaaggaaggacatacacaaccacagacaaggtcatatcgcggtcgtcgtcgtactcatctaatagttcaatgtctaaagattacggcgatcacacacccttgtccgtcagcagtgcagcttcagagacattaccctcacctcagtatatgccgataaggacattcaatacaatgcctacagctggcccaacgcctttacatttatttcaaaatgacaggggcattttcaaccatcattcttcatcaggctcatcaaaaacggcatcaacaaataaaagaggaatagcagcagcagtagcattggcaactgctgccaccataccatttccactgaaaaaacagaatcagatgataattccaaggtctcggtaa

SEQ ID NO: 80309 - DNA, 405 bp, Saccharomyces pastorianus
  modified_base (60)..(60): a, c, g, t, unknown, or other
tcgactctagaggatccccgagattttccatacatccagaagcaatggttatttcctcanatttgtacgccaatcctatgccaaaaagggtttgtaaccaaagattggaaagaattaaagcattcttccaaacacgagagactatactattatttaaagctaatttctgatagagcaagcggtgaattgccaacaacagcaaaattctttagaaattttgtactacaacatccagattacaaacatgattcaaaaatttcaaagtcgatcgattatgatttgctttctacgtgtgatagacttacccatttagacgattcaaaaggtgaattgacatcctttttaggagctgaaattgcagaatatgtaaaaaaaaataagccttcaatagaaagcaaatgttaa

SEQ ID NO: 80310 - DNA, 1731 bp, Saccharomyces pastorianus
atgggactcttagctttgggcacgcctttgcagtggtttgagtctaggacgtacaatgaacacataagggatgaaggtatcgagcagttgttgtatattttccaagctgctggtaaaagagacaatgaccctcttttttggggagacgagcttgagtacatggttgtagattttgatgataaggagagaaattctatgctcgacgtttgccatgacaagatactcactgagcttaatatggaggattcgtccctttgtgaggctaacgatgtgagttttcaccctgagtatggccggtatatgttagaggcaacaccagcttctccatatttgaattacgtgggtagttacgttgaggttaacatgcaaaaaagacgtgccattgcagaatataagctatctgaatatgcgagacaagatagtaaaaataacttgcatgtgggctccaggtctgtccctttgacgctgactgtcttcccgaggatgggatgccccgactttattaacattaaggatccgtggaatcataaaaatgccgcttccaggtctctgtttttacccgatgaagtcattaacagacatgtcaggtttcctaacttgacagcatccatcaggaccaggcgtggtgaaaaagtttgcatgaatgttcccatgtataaagatatagctactccagaaacggatgactccatctacgatcgagattggtttttaccagaagacaaagaggcgaaactggcttccaaaccgggtttcatttatatggattccatgggttttggcatgggctgttcgtgcttacaagtgacctttcaggcacccaatatcaacaaggcacgttacctgtacgatgcattagtgaattttgcacctataatgctagccttctctgccgctgcgcctgcttttaaaggttggctagccgaccaagatgttcgttggaatgtgatatctggtgcggtggacgaccgtactccgaaggaaagaggtgttgcgccactactacccaaatacaacaagaacggatttggaggcattgccaaagacgtacaagataaagtccttgaaataccaaagtcaagatatagttcggttgatcttttcttgggtgggtcgaaattcttcaataggacttataacgacacaaatgtacctattaatgaaaaagtattaggacgactactagagaatgataaggcgccactggactatgatcttgctaaacattttgcgcatctctacataagagatccagtatctacattcgaagaactgttgaatcaggacaacaaaacgtcttcaaatcactttgaaaacatccaaagtacaaattggcagacattacgttttaaaccccccacacaacaagcaaccccggacaaaaaggattctcctggttggagagtggaattcagaccatttgaagtgcaactattagattttgagaacgctgcgtattccgtgctcatatacttgattgtcgatagcattttgaccttttccgataatattaacgcatatattcatatgtccaaagtatgggaaaatatgaagatagcccatcacagagatgctatcctatttgaaaaatttcattggaaaaaatcatttcgcaacgacaccgatgtggaaactgaagattattctataagcgagattttccataatccagagaatggtatatttcctcaattagttacgcaaatcctactgccaacaaagggtttgtaa

SEQ ID NO: 80311 - DNA, 480 bp, Saccharomyces pastorianus
atgagatctcatttcctaccgatattgacaagcactaattggtgggaagagtcgtacccagaattcttggccctatttagcagggaccaagattttaacgtccgaatgtggaagaagcaatgggcagtattaaaaggacaggcgttcaacgttgtcgaaacattgaaagacccacgacaaggccccttggaattggttagaaggacaaggtgccaggtaatagatgagaagatgcaagttccctgttgcccacctccagtttctattttcaaaaacgccatagacgaacctattggatcatattccacttcaccaatggtactccctagcaccccaagcacaattccatttcatgcacataaccaaagcaatagtaatcctgtatactatgattccactctgcacccatttgctaataaaacagtgatagcagagcggctacaaatagtcaattccacccccgtattcacctggtgttga

SEQ ID NO: 80312 - DNA, 1065 bp, Saccharomyces pastorianus
atgagtaacgaagcttaccagcatgatcataccgtaaatcctcaccagaagatagttgtgaacagctacgattggttacagttccgtgatgagcaagatcactgtaaaagtaagaacccgataacgcacgcttctccaggggtcggttcgaatgcacagaattcagacatagcggaggcccctcaggtattccacccttcctatcaatctctggtcaacgtaccgtccgagagcccgcgacctgatcagacttcagggtccaatcctgccgttggactgcttcataatgcagaggacaaagcgtcagggcaagaagaagaaggaagtcaatatgagattcaatattcggtatttcgtccgctgcatgcatatccaaccaagggcctagcatatgagcagctccgaagaaaagaagaacaagaacagagggaaaacttcaaccatttggtttctgactgtattgaggctgtagagacatttggacgcgaactcgagagaatccaaactggctcaagtgggtcatactttgtgtatggaacacgggccgacgaaagcgttccggtgggggtcttcaagcccaaggatgaggaaccatatggcccattttctcccaaatggaccaaatgggcacaccgcacgtttttcccatgtctgtttggcagaagttgtctgattccaaacctcgggtacatctgtgaaagtgcggctagtttgttggataggcgactggaaacgcatctagtaccctatacagatactgcatctatagagtcttttaatttttatgataatagaaaaaaatgggtattgggatacaaccttcagaagaagaaacaaaaaaagctgggttctttccaactttttttgaaggagtacatcaacgccgatgagttctttcataaatacccattacctgggatgtattcagatgttaaacattcatttcatcgtaagtcatccggcgaagatatcaatcataaaccagagacaaccaggaacctaacagatgagacagaaccgtccaagcaactaaacttcctctccaatttcgacggaactctgaag

SEQ ID NO: 80313 - DNA, 486 bp, Saccharomyces pastorianus
atgctacaactgaaattcatatggccagtggccagaatcacacctatttataggccatttaccagtcatccattcagaaatttagctacttcctcaagcatcagtagtacaaaagctaagactactaagacagatacaactccactaaaattatcaaatgaactatatgcaatattcaagattcataatcgtccatatttggtgaccgagggcgacagagttattcttccattcaaattgaagcaagcggaggtgggtgacattttaaacatgaccgatgtaacaactttaggatctagaaactacaagctagttggtcatccaatcaatacttctctgtatactttaaaagcaaccgttgttgggaaaactaaaagggctttccaaactagggaggtaacgaagagaagaaatagacgggtccgtcatgcaaagagtaaaggtgatttgacaatcttaagaatatcagaactgagtatgaactga

SEQ ID NO: 80314 - DNA, 2634 bp, Saccharomyces pastorianus
atgacagactttgattgcaatattggtgctgcaattccagatgatactttggaatttttgaaaaaaagcttgtttttgaacacttctggaaaaatttatatcaaagaccaaatgaagcttcaacaaaaaccgaaacctgctcctctcacctcagaaaacaatgttcctttaaaatcggtgaaaagtaagagttcaatgaggtccggaacaagcagtctgatagcatcgacagatgatgtttccattgtcacttcgtcttctgacataacatcatttgatgaacatacatcaggaagtgggcgcaggtacccccaaaccccgagttattactatgacagagtttccaatactaatccaactgaagaattgaattattggaatattaaagaagttctttctcatgaggaaaatgcaccaaaaatggtttttaaaacaagtccaaaattagaactcaacctaccagataaaggaagtaaattaaatattcctacccccataacagaaaatgaaagcaagagtagttttcaagtgctaagaaaagatgaggggactgaaattgatttcaatcatcgtagggaatcgccttatacaaaaccagaactggcaccaaaaagagaagctcccaagcctcccgcaaatacttctcctcagaggaccttatcaacttctaaacagaataaaccgatccgcctagtgagggcaagtacaaaaatttcgagaagcaaaagatcgaaaccattgccgccacaattattatcatctcctatagaagctagcagctcgtctcctgattcgcttacttcctcatatactcctgcttcgactcatgttttgataccgcaaccttataagggtgcaaacgatgctatgcgtaggttgaaaacagaccaggactcgacgagtacttccccatctttgaaaatgaaacagaaagtgaatcgctcaaattcaactgtatcgacttcaaattcaattttctattctccttcaccattgttaaaaagaggtaactcaaaaagagttgtttcgtcgacatctgcggccgatatatttgaagagaatgacataacattcgcggatgctccgccgatgtctgacagcgatgatagtgatgacaattctagttcatccgatgacattatctggtccaagaaaaaaacagctcctgagactaataatgaaagcaaaaaggatgagaaaagcgataacagttctacgcattctgacgaaatattctatgattctcaaacgcaggacaaaatggagagaaagatgacctttagaccatctccggaggtcgtttatcaaaatttagagaaattcttcccaagggctaacttagataagccaatcactgaaggaatagcttcaccaacatctccgaaatccttagacagcctactttcaccaaagaatgtggcttcatcgagaactgagccaagcactccttcccgtcccgtccctcctgatagctcatacgagttcatacaggatggacttaacggtaaaaataaaccattgaatcaagctaagacacctaaaagaacaaaaaccataagaaccattgcacatgaagctagtttagcaagaaaaaactctgtaaaactaaaaagacagaacaccaaaatgtggggtacaagaatggtcgaagtgaccgaaaaccatatggtgtcaattaataaagccaaaaattcgaaaggtgagtataaggaattcgcctggatgaagggtgaaatgatagggaagggatctttcggtgctgtttatttatgtttaaacgttactacaggtgagatgatggccgttaagcaggttgaggtccccaagtatagctcacaaaatgaagccattctaagtaccgtggaagcattaagatctgaagtgtccacgttaaaagatttagatcatcttaatattgttcaatacttaggttttgagaataaaaacaatatttacagtttgtttttagaatatgttgctggtggctccgtgggatccttgattagaatgtatggaagattcgatgaaccgttgatcaaacatttaacaacacaagtattaaaaggattggcatacctacactcgaaaggtattctccacagggatatgaaggcagacaacttacttttggatgaagatggtatctgcaaaatcagtgacttcggaatttcaagaaaatcaaaggacatatactctaattcggatatgaccatgcgaggaacagtcttctggatggctcctgaaatggttgatacaaagcaaggctacagtgcaaaagttgatatatggtctctgggatgcatcgttctggaaatgtttgctggtaagcgcccgtggtccaacttagaagtcgtcgcagccatgttcaaaattggaaagtcaaaatcggcaccaccaattcctgaggacactttaccattgatatcgcaaatcggacgaaattttctggacgcatgcttcgagataaatccagagaaaaggccaaccgctaacgagcttctttctcatccttttagtgaagtaaatgaaacattcaatttcaaatctaccagactcgcgaagtttataaagtcaaatgataagttaaactcttcaaaattaaggataacctctcaggagaataaaactgaatag

SEQ ID NO: 80315 - DNA, 1806 bp, Saccharomyces pastorianus
atgccctttttgaggaaaatagtggggacagcacatacacattctaggtctgattcgaactcatctgtgaaattcggccatcagccgactagttcggtagcatcaaccaaaagttcaagcaaaagccctcgtgcaacatctcgcaaaagcatttatgatgatattagaagccaatttcccaacctaacccccaactctacctcttctcagttttacgaaagcacgccagttatcgaacaatcctttaattggacgacagatgaccacatctcagctggaacgcttgaaaacccaacgagctttacaaacagttcttataaaaatgacaatggacctagtagcctctctgattcgaggaaatcctccggtggcaatagcgtaaatagtttgtcctttgacaagctaattctatcgtgggatcctacagaccctgatgaatggacaatgcatcgcgtcacctcatggtttaaatttcatgattttccagaatccaggatattgtttttcaaaaagcatcaattgtttggtcacagatttataaagttgcttgcatatgataatttcgctgtttatgaaaagtatttgccgcagactaaaactgcttcatataccaggtttcagcagttattgaaaaaaacaatgaccaagaacgtaacaaatagccatattcgtcagaagagcgctagcaaacttaaaagttccaggtcttccagcgaatcgatcaaatcaaaattaaaaaatagtaaatcgcaagaggatatttcaaattctagatcaacgtcagaatctgcattgagcccaacaaaatcgggcccttccaagaccgatgaaaagaattttttacattctacttcaacacaccaaaaaaccaaaagcgcaagttcactatacagaagaagttttatatccctaagaggctcatcatcgagcaatgcttcctcagcaaaatcaccttcaaacatcaagttaagtataccggctcggccgcactcaattattgaatctaacagtacacttaccaaatcggcgagcccacctgcatctccttcgtatcctagcatatttagaagacatcacaaaagtagttcatctgagtcgtcattattaaattccctttttggtagcggaataggcgaggaagctccaacaaagcctaatccacaaggtcatagtctgtctagtgaaaatttagctaaaggaaaatctaaacactatgaaactaatgtgtcttcacctttaaaacaatcttcactacccacttcggatgataaaggtaatttatggaataaattcaaaagaaagagccaaataggggttcctagcccaaatacggtagcttatgtaacgtctcaagaaactccatccttaaaatcgaattcgagtactgctaccttaaccgtacaaacggcagatgtaaatataccatctccatcttcatcaccaccgccaatacccaaaactgcaaacagaagtttggaggtcatcagcacagaagatacacctaaaatttcttcaaccacggcgtcttttaaagaaacgtatcctgattgtattaatccagacaagacagttccagtgccggtaaataatcaaaagtatagtgtaaagaactttttactggaccaaaaattttatcctctgaagaaaacagggttaaatgatagtgagaataaatatattctggttaccaaagataatgttaattttgttccgctaaacttaaaaagtgtagcaaattatccagtttcaaagaatctgctctcacaaaattgggaatcaatcacaaaaatgtcactttccatatga

SEQ ID NO: 80316 - DNA, 696 bp, Saccharomyces pastorianus
atggattccacagatctgatcttattgccattcaaaggggcctcgtatgagtatagagggagcccagtcttcattgatgaaaaatacgcaaactttgatcacatttattctcatctcctaggtctgaatgaactatcatctactttcttcaagtctattttccagtcactcaaggcaaattttgccgttcaaatttcaaatacctatggcagattaaatgctgatcgctttaagaggaaacggttcaatttattacttccaaaaccatacctgacacaatccgattatcttggactatatcttctcttattgatatgctatagagatggctataataatgataatgcatcctgtagtatatttattaacagcaagaatattgatttcgcaaaagatttgtcaactacatttgctgagcatgactggctaaacgaatctaccattaaaattgtggatatcccctttgaaacgaaagttccagaagaagcaattgaaaagccgtcctttatagagactgtgcttgatgttggtttatcagatactgctttagctgatatagaggagactacctttattattggagaggaccttcctgatgaaagtgagcccttcagcgaagaggtgaggactgtaatatttgaagggtcgaatcgtcgttttgacacccttattgtgcaccatttttcgtctgaataa

SEQ ID NO: 80317 - DNA, 1746 bp, Saccharomyces pastorianus
atggcaaacactgtaggaggaattctgtcgggtgtaaatccgttccactacaactccagttcgccgcttacattatttctctttcaagcatgtctcatactactggtatgcaatttaattcacattcccttttcaatgatgaggcagcctaaagtcatttcagaagttatatctggtgttattttggggcctactgtatttggtcaaattccaaactatacaaacacaattttccctacatcatcgatcccggggctaaatttagtggcgaatttgggaataatactgtttatgttttttttaggtttagaagtggatattgctttcatcaagaaacacctaaagaaagcactcgtgataggtatagccactttagcagtgccattcggttttggttgtctgctggcgattcctttatttcacacttatgcaaacaaaacagaaggcgaaaggcatattaaattctctgtcttcatggtatttatagctgtttccatctccgttacggcttttccagttttatgtcgtattttaaatgaattgcgcttgatcaaggatagagcaggtatcgttgtccttgcggcgggtatcattaacgatataatgggatggattttgttagcattaagtattattctttctagtgcagaagggagccctgtcaataccgtttatattctgcttatcacgtttgcatggtttttgatttatttctttcccttaaaatacctattaagatgggtgctcataaggacccatgaattggacagaagcaagccttcaccgttggcaacgatgtgcattctattcatcatgttcatttctgcttattttacggatattattggagttcatcctatttttggcgccttcattgctggcttagtagttcctagagatgatcactacgttgttaaattaacagaaaggatggaagatattcctaacattgttttcattccaatctactttgctgttgcaggattaaatgtcgatttgactctattaaatgagggaagagattggggctatgttttcgccacaatcggcatcgccattttcaccaaaattatttcaggtactcttacagctaaacttactggcttattttggagagaagccactgcagccggtgttttgatgtcatgcaaaggtatcgttgaaatcgttgtcttaactgttggtttgaatgcgggcattatcagtagaaaaatatttggtatgtttgtgttgatggcattagtttctacttttgtcactactcctctgactcagcttgtttacccagattcataccgggatggtgttcgcaaatccttatctacacctgcagaagatgatggtgcagcagatggtctcgattctgagggtgtggacaagactgaaattaacactcaacttaattcattggcagatgttagcaaatatagaattggtgaactgaccacggtgataaacactacagaagcgatctctccatctctaaagctgctaaattacctgtctttaggggtatctcccaagcctaagaataataaacataagaacgaaacctccttgagcagaatgacaacagctactgattccacattgaaatctaacacattcaaaataaaaaagatggttcatatctggtctaaaagcgttgacgatgtggataccaatttaagtgttatagatgaaaaattgaccccgtttgagggagtcggtgcattgagggccattcaatttacaattgctcactga

SEQ ID NO: 80318 - DNA, 135 bp, Saccharomyces pastorianus
atgaaaaagacacagaaattttccaaaaaggtgaagaatgaacctgcatcaagtcaaatggatatattttctcagctgtcacgtgcgaaaaaaaagtcaaaattaaacaacggtgaaatcatagtcatcgattag

SEQ ID NO: 80319 - DNA, 2976 bp, Saccharomyces pastorianus
atgtcgtcgaacaatgatctttggttgcatttagtatcccagttaaatactcaacagagagcagcggccctctttgattacactagagggctgcaggtcattgccggtcccggcacagggaagactaaggttttaacttcaagagtagcgtatcttattctgcaccaccatattcatccccgcgatattatagtgactactttcactaacaaagctgctaacgaaatgaaagagcgtttgcaagaaatgttacgcggggcaggcgtgaatatttcggagctcttaattggtacttttcatagtatttgcctgaaaatactttatagatttggccacctggtggatctacagaaagactggagaattattgatgagaaggaaatagatgtcattttagatgatatgatcgaaaaagttcccgaccaaataagggattatgcttcctcaaccacaaggaaagtaaatctttgtatgccgagtaaaaatggagatgaatggactattcatccgaagctgatcaagaaacagatatcaaagctaaaatcaaacgcaatattacctgaggaatacatcttagattcgaatcatgacgccgcgcttggctacttttaccaaatataccaatcagagctaagcaagaaaaatacgttagattttgatgacttattaatgtacacctttcgtttgctgactagagtgcgtgttttatccaacataaaacatgttttagttgacgaatttcaagatactaacggcattcaattggacttgatgtttctttttgctaagggaaatcatcatctttcgagggggatgaccatcgtaggtgatcctgatcaaagcatatatgctttcagaaacgccttagcgcacaactttctagaaatgggcagaaaatgccccatcgagtactcaactatcatacttgttgaaaattatcgttcatcacaaaaaattctaaatacaagcgaaattttaataacgcaacaaaacaaaggtcggcagaatagggctccactccgtgcccaatttgacctggattttccaccagtttacatgaatttccccgcttactttttggaagcaccttctttagttcgggaactactatatttgaaggcattgccaaacctattcacatttaatgactttgctatcctagtaagacaacgaagacaaattaaaaggatcgaaagtgcattaatagaacatcggataccctataaaattattaggggccacagtttctgggattccaaggaaacaagagcgatgttaaatttattaaaattgatattttctccgaatgacaaacatgcaattcttgcttcacttttatatccagcaaggggccttggtcctgctaccggtgagaagattaagaacgcattggacacgttagctaccgatgtgtcatgtttccaaatattgaaagacataagtagtaaaaaaataatgctagacataccgacgaaaggccgttctgtgattgctgacttcatttcaatgatagaaaattgtcaattgttgctccagagcactttactagggggtctttcagatttatttgataagctatatgaattatcaggtctgaaatacgaatacttgtacaaggatggtaagaaaaaaaatgatcagcttgaaaaatccgaacctaatttattaaacgcaagacataagaatattgaacttttgaaaaactatttcctggctcttctttccaagtcagaatcttcagataaagaaaaaaatgaagccattaaagcagcaacagatgaagccgaaccaatagagaacaaggtcatcactccaaaagaatacctccgtaatttcttcaattcactttcccttcattctgatgcagctgaggaggaagagtcggaatccaataaagatgcaaaaataaaacgtgagaagaatgggtttgtcacaatatctacaattcacggtgccaaaggtcttgagtggccggtagtttttattcctggatgcgaagaaggtataattccttgtgtgttcaacgatgataagaaagacgaatcagaggaggacgaagaagaagatcaagaaaatagtaagaaagatgcaagcccaaaaaagactagagttttatccgtggaagattctatagatgaggaaagaagaatgttttttgttgcacagactcgtgcaaaatacctgttgtacctatcaaatactgtaactgtggaagatgtcgatagaccaagaattgcaagccgatttttgactactgacttgataaaagccatgtccgatagccaaaaattatttgaaagtacgaatagtatcaaaaaactataccgaattttgaacaaaaagccgccggctgaagatgataaactattctcccttgaccaattgcgcaaagactataaccaattcattgaaaataggagagaaaggatgatttggcaagggatacaaatgaatgatgtctatggaatacagttgtctagaaataaattattgggttctgttagtgatttcacgtcagctgcggaccagttacgactcgaaacgcaaaactctatattcccacagaagaaacttattgaaaaatcacgcccatccaaaatcaatggcaattacgctcctaaaagtagagttaaaagtccagaaaaaaggtacgctccagaaactacatcattccattctcctacaaagaaaaaggtgtatgcacctcaatacgtttcaacaactaatgtacctagtaggcaggagtttcattcttctactgggaaaaatattccttttctgagaagagaagataggtccatcacagacatatcaccacgatcatcaacgaggtcgttaaaaggagcatctccaaataagacgagccacatgccagatgatttaatgagaccatcacccacgaggaaggacaaagttactcgtaatattcatttcccactgcaggactttcagaatagaaacccaggcaaatggtga

SEQ ID NO: 80320 - DNA, 1137 bp, Saccharomyces pastorianus
atgattacacagcggttccaactagaaaaaaagccgtatattactgcgtatcgtggtgggatgcttattctgactgctattgccatcttggctgtagattttccaattttcccaaggaggtttgccaaggtggaaacttgggggacatccctgatggatcttggtgtaggatcattcgttttcagtaacggtattgtttcttctagggcactgttgaaaaacctaagcttgaagagtaaacccagcttcttaaaaaatgcatttaatgccttaaaatcaggaggaactctattgttcctaggattgctgaggttgttttttgtaaaaaatttggaatatcaagaacatgtcacagaatatggggttcattggaatttttttatcaccctatcattgttgccacttgtattgacctttattgatcccgtcacaagaatggttccacgctgctcaattgcaatattcatttcatgcatttatgaatggctacttttaaaggacgatcgcactttaaactttttaattttggctgatagaaattgtttcttcagtgctaatagagaaggcatcttctcatttctaggttattgctcgatttttctttggggccaaaacacgggattttacttgttgggaaataaaccaactttaaacaatctttataagccttctacgcaagacgtagttgcagcatcaaagaagtcttcgacttgggactattggacttcagtaaccccattaactggcctctgtatatggagtacaatttttcttgttatcagccagttggtttttcaataccatccttatagtgtttcaagaaggtttgctaacttaccatatactttgtgggtcattacttataatttactatttttgactgggtactgcttgactgacaaaattttcggtaattcttctgaatattataaagttgccgaatgcttggaatcaatcaactccaatgggttgtttttatttttgttggcaaatgtctctactggtttagtcaatatgtctatggtcacgatagattcttcacccttaaaatcattcctggttttgttggcatactgctcattcatagctgtcatatcggttttcttgtatagaaaaagaatattcattaagctataa

SEQ ID NO: 80321 - DNA, 363 bp, Saccharomyces pastorianus
atggcaacagtacatcagaagaatatgtcgactttaaaacagagaaaagaggactttgtgacagggctcaatggcggttctatgacagaaattaacgcagtgacatcaattgctttggtaacttacatatcatggaacttattgaaaaattccaaccttatgcctcctggcatatccagcgtgcaatacataattgattttgcattgaactgggttgctttgcttctatctattactatttatgctagtgaaccataccttctaaacacgctaatactgttaccttgtttgctcgcattcatatatggaaaattactagctcgagtaaaccttctaatcccatataccattaaaaaaaaatga

SEQ ID NO: 80322 - DNA, 762 bp, Saccharomyces pastorianus
atgtttttaggtaaagaggatattcagcttggtgtcaatgaatcattttacgataccaccaaggttgtatcatctatggtttcatgtatttttgcccgtgtgaacaaacatgaagacatacttgctttttgcaaggattcctcggtaccgatcatcaactctctatgtgacaaattccaccctttgcaagcaatttgtgatcttttaacaataatcgaaaacttcaatatatctctagatgaagtaaataagggaatcaattcaaaattgaagatggcatggattggtgatgccaataatgtcataaatgatatgtgcatcgcatgtctgaaattcggtataagtgtcagtatttccactccccccggtattgaaatggattccgatattgtcgatgaagcaaagaaagttgctgagagaaacggtgcgacatttgaattaacacacgactctttaaaggcctccaccaatgccaatatattagtaaccgatactttcgtttccatgggtgaagaatttgcgaaacaggccaagctgaaacaattcaaaggttttcaaatcaatcaagaacttgtctctgtggctgatccaaactacaaatttatgcattgtctgccaagacatcaagaagaagttagtgatgatgtcttttatggagagcattccatagtctttgaagaagcagaaaacagattatatgcagctatgtctgccattgatatctttgttaataataaaggtaatttcaaggacttgaaataa

SEQ ID NO: 80323 - DNA, 117 bp, Saccharomyces pastorianus
atgcccatgtatgaaagattctacagtagatataaagactctttcaagaatcctagaaagcatatcaaatatacccctgacgaactaactactgttcttaaccaattagtgagatag

SEQ ID NO: 80324 - DNA, 1512 bp, Saccharomyces pastorianus
atgcccgctgaaattgacattgatgaagctgacgtattagttttatcacaggagttacaaaagacaagtaaactcactttcgaaatcaataaatctttgaaaaaaattgcagctacatccaatcaatccagtcaactcttcactcctattcttgctagaaataatgttttaaccacattacaaagaaatattgaaagtacattgaattccgttgcctcagttaaggatctagcaaacgaagcttccaagtatgagatcattttacaaaagggtattaatcaagtcggtttaaagcaatacacccaagtagtacataagctagatgatatgttggaagacattcagtctggacaagccaatcgagaagaaaactcagaattccatgggattttaactcacttggaacaattgatcaaacgtagcgaggctcaactaagagtatattttatttcaattttgaacagtattaaaccgtctgatccacaaatcaatatcaccaaaaagatgccatttccatactacgaggaccagcagttaggcgctttatcgtggattttagattattttcatggaaattcagaaggttctattatacaggacatactcgtcggtgaaaggagtaaattaatcctcaagtgcatggcattccttgaaccttttgccaaagaaatcagcactgcaaaaaacgccccgtatgagaagggcagtagcgggatgaacagctacacggaggccttattaggcttcatcgccaatgaaaaatcactagtagacgacctctactctcaatatacagaaagtaaaccccacgtcttgtcacagatcttgtcgcctttaattagcgcatatgctaagcttttcggtgcaaatttgaaaattgtacgaagcaacctcgagaactttggattctttagttttgagctagtggaaagcataaatgatgtgaaaaaatctcttcgaggcaaggaactacaaaactataatttattgcaagattgtacgcaagaagtacgtcaagtaacacagtcattattcagagatgccattgataggattatcaaaaaggcaaattctatttctactattccttccaataatggtgtcactgaagcaactgtagataccatgtcaagactaagaaagttcagtgagtacaaaaacggatgtttaggcgccatggacaatatcacacgtgaaaattggttaccatccaattataaggagaaagaatacactttgcaaaacgaggctttaaattgggaagatcataatgtattactatcatgttttataagtgattgcatagacactttggcagttaatcttgagagaaaggcacaaatagcactgatgcctaaccaagagccagatgtggctaatcctaatagctctaaaaataagcacaagcaacgtattggattcttcattttaatgaacctgacgcttgttgagcagatcgtggaaaagtcagaattaaacttaatgttagctggagaaggtcactccagatag

SEQ ID NO: 80325 - DNA, 546 bp, Saccharomyces pastorianus
atgcttagaaaagttcaacaatttaataatatgcagaagaaattaaacctacaagaaccactagactcaatagcaacatcacctgtccttgaactggcttatttctacaacggttacaacaggatgactgaaaacgatttaattttgaccaaaaagatgttgacagagtatcacaaccctgccattgattcggaagacccagatcaagagctgatcagaaacttactactatccttgaccttaagaagattggggaatgctgaaagaagtttagccttgttagatgacattgttctgccaaaaatattctacattcaaaatggcaaagtcaaatatttcaaaaaaaccgaagacccatgggcatatccagccgctctttatgagagagctttattctgttggaaactgggtggcatggaaagtttgaatgaatgtagggaatggctgctaagagcccaaaattatgccgccgattacgaattgagtacgcgtatcggtatgaagatcaaagccgcccttgatagagttgaaaacgcgcttgcttaa

SEQ ID NO: 80326 - DNA, 1605 bp, Saccharomyces pastorianus
atgtttagagtatttggttcatttggatcaaagggtaatcaatcttctggtgaagagcaatcaacaaagacaaaacaggttctgaagcaggctaatgactttgagatcgccttaaaggcaatggattttgtccttgatgatagaacggatgaagggttgaatttgctgaaaaaagctgaaatggaaactggttcagatcaaactatcttgactttggcaagaggtgttattgaatttcttcaagccactttgagttttgaaactgaagaaatgaaaagagctgcaattactttaggcaaagctgagcaaatgtcctggaaaagtaagcaaaatgctgaaaagaccaattttaggagcagttcaatatatcctcccggtactgtctatgctgtaacatatactgagtcatgtctgttgcatgccttgttgatgttatttagtgaaagcatgatggaagcagccaaggctttgctaaagttaaggagggcttatacaatgttacaagatatcatggttactgtcaaaaaagctgaacgatcgaaaaattcgagctctccctctccaagcgaaaagagccaagagtcatgcggaagttttgtttctgcagagacaactttcatatcggttgatataccatacaaattgtcttccgaggacaagtccaatccactcctattggaatttgctgaaaaaatctacacgatgagaatgggaaggttatcaggtgcccatattggcaatactccatcttttcataggttaagggatgatttgggtttacagacgactccgcctcaagcttccgaccgccattctgtttcagatgatttcgatttagaacaggctaccatcgacgaattcatccattcaggtgctaatttatgctatggtatcttgcaagtcgtcttatccttacttccacctgcaatcggtgctgtgctatctattgttggattcaagggatcccgtgaagaaggtttgaggctagtttggaaggctacaaaggagagaaatgttcacgggtgtataggtttgttaggtctgatgttttattacgacggtcctttccaatttacagatgctgactttgatataccaccaaacgataatggatcgagggctttaaacaaaagcagaacaaacgatagtagccttttaccaggttatatggacagtgcaaccttattgcatcctggaaaaattctggaggacgcattactaaaagcaagagcactttttcctaatagtgccctgtggctgctaaatgaggccaaaatgcttgctggaaagggcaggcttcgtgattctctggccctaatggactctattgatgtcaatagtatccgtatgagacaagtgaaatcgttgatggtgtttgaacgtgcgatccttttagtcaacttacacgaatacaacagagctgccgatgatttaataagtttgcttgatattagtgattggtctcacgcattgtacacttattttgcgggttgctgttacttggaaaattggaggatgacacaattaggcttattaaatgacggtaaagaacagttctataagagcgggctcgagaactcatatttgacgctccatctttgttag

SEQ ID NO: 80327 - DNA, 171 bp, Saccharomyces pastorianus
atgattgttggcccaggtggttctaacatcaaaaagattagagaagcggccgacgttatcatcaacgtcccaaggaagtctgacaaagtcaatgatgttgtgtacattagaggtaccaaagctggtgtcgaaaaggccggtgaaatggttttgaaatccttaagaagatag

SEQ ID NO: 80328 - DNA, 3501 bp, Saccharomyces pastorianus
atgtctgaagaacaaaccgctattgactctcccccttccactgtcgaaggatctgttgaaaccgtaactaccattgattcgccaagtactactgcctccactattgctgctaccgctgaagaacatcctcagttggagaaaaagccaactccattgccatctttgaaggatcttccttctttgggttcaaatgctgccttcgcgaacgttaaggttagctggggcccaaacatgaaacctgctgtctctaactcgccatcaccttccccttctgctccttcattgactactggccttggggccaagaggatgcgttcaaagaacatccaagaggctttcactttggacctgcaatctcagttgtcaatcaccaaacctgaattatctcgtattgtccaatctgttaagaaaaatcatgatgtttctgttgaatcaactctttctaagaatgctcgtacttttttggtttctggtgtagctgctaacgttcatgaagcaaagagagagttagtgaagaaattaacaaaaccaatcaatgctgtcatcgaggtcccatccaaatgtaaagccagtattatcggttcaggtggtagaactattcgtgaaattagtgatgcttacgaagttaaaatcaatgtctcaaaggaagtcaatgaaaactcatatgatgaagacatggatgatactacaagtaacgtttctttatttggtgattttgaatcggtcaacttggctaaggctaaaatcttggccattgttaaggaagaaaccaagaatgccacaatcaaattagtcgttgaagatgaaaaatacctaccatacattgatgtttccgagtttgcctccgatgagggtgatgaagaggtcaaagtccaattctataaaaaatcgggtgatattgtcatatcgggtcctcgtgaaaaagcaaaagccacgaagacatctattcaagattatttgaaaaaattagcttctaatttggacgaagaaaaggtcaagattccatccaagttccagtttttgattgatgcagaagaactaaaagaaaaatacaatgtcattgtcactttcccatcaactcctggtgatgagcttgtgtcatttgtcggtttgcgcgataaggttggtgaagctatcacctatgccagatcgtcttcaaagagctatgtggttgaatctttagatatttccaaggctcatagtaagaatctgacccatgccaaaaatctaatcatgtatttcaccaagtactccgttttaaagggtcttgaagaatctcatcctaatgttaaaatatctttaccatccatacagtcattgccaacagctgaaactgttaccatccacatcagcgcaaaatctgatgaggcaaacgatatcaaggccgttcgtaaagaattgatttcttttgtgaacaatattccaccttccgaaaccctggttatcacagatttggattacgagttgttcggcgggtctattaaacattgtttattagcttccgaaagcagcgttgcctttgttcaattcggtgattattatccaaatgataacagtattttacttgttgctttaactgaagatgaagatttcaagccatctattgaagagattcaagcatctttgaacaaggccaatgagtcattaaactctctacgtactaaacaaaacaacatggagactaaaacttacgaattttccgaggaggttcaagactcattgtttaaaccatcttccgctacatggaaattgattatggaggacatttctgaacaagaaggccaccttcaaattaaactacatacccctgaagaaaatcagttaactgttagaggtgatgaaaaagctgccaaagctgctaacaaaatttttgaatctattttgaattctccatcgagcaaaagcaaaatgactgttaatattccagccaactcagttgccagattaattggtaacaagggctccaacctacaacaaattcgtgagaagtttgcctgccaaattgatattccaaacgaagagaacaataatgcttcgaaagataagactgtcgaagttactttgactggtttagaatacaacttgactcatgccaagaaatatttggctgccgaagccaaaaaatgggctgatatcatcacaaaggaactaattgttccagttaagtttcatggtagtctgattggtccacacggtacttatcgtaaccgtttgcaggaaaaatacaatgtcttcattaacttcccaagagacaatgaaattgtcaccattagaggcccttctcgtggtgtcaataaagctcatgaagaattgaaagctctgttagattttgaaatggagaacggacataagatggttattaatgttccagctgagcacgtcccaagaattatcggtaagaatggtgacaatatcaacgacatcagagctgaatacggtgttgagatggatttcttacaaaagagcaccgatccaaaggctcaggaaactggtgaggttgaactggagatcactggttctagacaaaacataaaagatgccgccgaacgtgtggaatccattgttgccgaagcctccgattttgtcactgaagtcttgaaaattgatcacaaataccataagtcaattgttggtagcggtggtcatattttaagagaaattatctccaaggctggtggtgaagaaattagaaataagtctgttgatattcctaacgcagactccgaaaataaagacattaccgtacaaggtcctcaaatgtttgtcaaaaaggttgtcgaggaaattaacaagattgtcaaggatgctgaaaatagcgttactaagaccattgatattccagcagaaagaaagggtgctttgattggccctggtgggattgttcgtcgtcaactagaatccgaatttaacattaacttattcgttcctaataaggatgaccctagcggcaaaataactattaccggtgcaccagaaaatgtcaagaaagctgagaagaaaatcttgaatgaaataatcagggaaaattttgaccgagaagtcgatgttcctgcctccatttatgaatatgtttcagaacgtggtgctttcatacaaaagttgagaatggatttatccgtcaatgtaagatttggtaacacctcaaagaaggctaacaaattagctcgtgctccaatcgaaattcctctagagaaagtccgtggatctaccgaaggcgaaaatgcagaaaagactaaatttaccatcgaagaagtcggtgcaccaacttcttccgaggaaggtgatattaccatgaggttgacatatgaaccaattgatttgagtagcattctctctgacggtgaagaaaaggaagtcataaaggacacttcaaacgattccgctaagaaggaagaagctctcgatactgctgttaagttgattaaagaaagaattgccaggcaccatctgctacatatgccggttacgtctggggtgctgataccagaagattcaatatga

SEQ ID NO: 80329 - DNA, 417 bp, Saccharomyces pastorianus
atggacatgtcgtctcctccgtcagttaaatccaagaccacctcaaatccgtctagtatacttcatgaccttccaagaaaagttcgtccttctttgagttcattatctgatcttgtttcaagaggcatcccagatgtaaaggaaaaaacttctaaatcgaatgagaagtcacaaacaaaagccccttcaagcagtgatgatgaatctagctctgattctgactctaactccagttcggactccgtatcggattccagttcagattctaaatctgagtcagattcggatgactcaggggattcatctgatgatggaaaaagttttattagtgcgaaatccgctagtgctgctttaggtaagaagaagaagccaagtggtggatttgcatcattaataaaagatttcaagaaaaaatga

SEQ ID NO: 80330 - DNA, 186 bp, Saccharomyces pastorianus
atgtcacaaatcaatgaagcgtacgaaacattaagtgatgacgataaaaggaaggaatacgatctttccaggtcaaacccccgccgcaacacttttcctcaggggcctaggcaaaataacatgttcaaaaatccaggaagtggcttcccattcggaaatggctttaaaatgaattttgggctttga

SEQ ID NO: 80331 - DNA, 1404 bp, Saccharomyces pastorianus
atggcaggcaaaaatagagccaaaactgcttgtaagttattccaagtgaaaggagttggttgcgagaagggcccagaaggtttcattcattgttggtttagtgtattactaaggccgatcttaacgtctacgaaacgaagtatgatactgatctcgggatactgtcttttagtgtatagcgttattttgccagtactgatatcggcttctaagttatgtgatttggctgggttacaacgattgaacaagaatttaaaagtagacactgaatccttgacaaaataccaatggatcgctgggcagttggaacaaaactgcatgactgcggatccagcaagtgaaaatatgtcagacgtaattcaactagccaatcaaatatactacaaaattgggctgatccaattatccaacgatcaacatctaagagctattaacacatttgaaaaaatcgttttcaatgaaacttacaaaggttcttttgggaagctggcggaaaagaggctacaagagctgtatatcgattttgggatgtgggacaaggtgcatcagaaggatgatcagtatgcaaaatatctgtccttgaatgaaaccatcagaaacaaaatatcatccaaagacgtttctgtggaggaagatatttctgagctgctacgcataacgccgtacgatgttaacgtcctctccacgcacatcgatgttctttttcacaaactagctgaagaaattgacgtttcgttagcagctgctatcattttggattacgaaacaatcctcgacaagcatttggctagcttaagcatagatacaagactttcgattcattatgtcatatctgttttacagacctttgtacttaactcagatgcgtcgttcaatataagaaaatgcctttccattgatatggactatgataaatgtaaaaaactaagcctgactatttccaaattgaacaaggtgaatccatcaaaaagacagatcctggatccagcaacatatgcatttgagaacaaaaagtttagaagttgggatagaattattgaattttatttgaaggataagaagccatttattacaccaatgaaaattcttaacaaagatacaaactttaaaaacaactacttctttttagaggaaattatcaaacaattgatagaagacgttcaactgtcgagacctttggcaaaaaatttatttgaagatcccccaataaccgatggttttgacaaaccaaaatcatactatcataccgattatctagtatacattgattccattctttgtcaggcttctagcatgagtccggacgtcaagagagctaaactggctgcgccgttctgtaaaaagagtttgaggcattcactaacactagaaacatggaaacactatcagactctagagatcccc

SEQ ID NO: 80332 - DNA, 609 bp, Saccharomyces pastorianus
atgattcaatatttattttatctctttcaaatacccattttagctgcgccattatcatctgtttcattactgaattcgcaaaaatcgacctttttgaagaataaaaacgtgcttctagaacatgattatttgaaagaccaggaaacagccaaaatcaatccttctagagatatcactgtgggcgaacaaagatcatatgagacaaatcctttcatgaaaatgtttaagatgggactaaaaatttctttatcatcaaaatcgattctttacaatagttcatacacgctagaacctctcattgaagaatacagtgtagcagcaagtatttacttgctgaacccaacagatttgtgcgagttgtcgcgaacaagtgtgctatctagtggctatgaaggttggtacaaggctcattggattggcgttggagttaaaaaggcgccttactttgaggagaacgtgggtgggatagataattggtacgatacagcgaaagatacctcgataaagcacaacgttccgatgattagaagaagatatagaaaggagacattggatcaagagtggaacttcgttcgggatcactttggagtaattaactccatttggtag

SEQ ID NO: 80333 - DNA, 1872 bp, Saccharomyces pastorianus
atgcaggcggtagagagaaggccctcgttactctttgacgaatatcaaaattctgttactaagcctaatgagacgaagaataaagaagccagggtcttgtcagagaatgacggtgatgtctccccatctgttttgaaacagaaggaaatatcagtcgatgatatggatatgatttctttgcccacggaatttgacaggcaaatggttttaggttcacctatgtttttcgatcttgaagacgaagaaaacaaaattgatccacttccttcagtttcccatcattatggaaatggagaaagtgacagctttgtctcatcgtacacgccctcaaatctgaaaacgggtgaagaaactaaagatcttttcattaatccgtttgaattggtttctcaaatgagaaaaagatacattgctgcttccaaacaagatggcatttcaaacataaaaaatgacactgaaaagtggtttttatacccaaaaccactgccaaagttttggagatttgaagacgataaacgattccaagatccctctgactctgacttaaatgacgatggagacagtactgggaccggagccgctacaccgcaccgccatggctactattacccaagttactttaccgatcactactactactacacaaaatctggtttgaaaggaaaaggaaatataaaagtaccatacaccggtgaatatttcgatttagaggattacaaaaaacaatacatttaccatttaagtaatcaggaaaatacgcaaaacccactttcaccttattctagtaaggaggagtcactagaggaagaatttttaacagatgtgcctacgtttcaagaatttagggatgattttgcatacataatagagttaatccaatctcataaattcaacgaggtttcacgaaagcgattatcttatttattagataaatttgaattgtttcagtacctaaactctaagaaagaaattttagctaataaaaatgttccctacagagatttttataattctcgtaaggtagatcgagacttgtctttaagtggttgtatttctcaacgtcaattgagtgaatatatatgggagaaaataaatttagaacctgaaaggatagtttatcaagacccggaaacgtcaaggaaactcagtttgagagacatttttcagtttggttgttcttctaatgaccaacccattgcgattgggttgaaattgattgatgatgaattcttggattggtatagaaatatttacctaatagattaccatctaactcctaacaaagtagcaaagttggtcggcaaagaaatgaggttttacctattagccaaagtgtttctggagtttgataatttcattgaaggtgagtacctagcagaaattttcataaaatacgttattcatatcctcgaaaaatcaaagtaccaattggcccaagtatcagttaattttcaattctattccagtggtgaagactggtacaagaaattttctcaatggttgctacgatggaagctagtatcgtataatatccgctggaatatacaaattgccaggatttttcccaaactattcaaggaaaatgtcgtgtcaaatttccaggagtttttggatcttatcttcaatcctttattcactctggaaaaggagcagttaccaatagattcatctgtaaatactgatatcattggtttgcagttttttttatcaaatgtgtgttctatggatctggtcattaaagagtcggatgaaaattactggaaagaatttactgatatgaattgtaagccaaaattttggacagcacagggtgacaatccaactgttgcgcattacatgtattatatttactacaagtctagcgaaagttaa

SEQ ID NO: 80334 - DNA, 300 bp, Saccharomyces pastorianus
atgtccgttgccaatttcgcgccggcaatatactggtccatgctaccgtggtcaataaactacgcctctattccagcacaagttaagttgcaaacgttcatcagaagtaagttacctgccttcacctatcattgtatatttggaacttgtttgatgacggcatgcgtcgttttgagatttcatctctttatttggtccgttttcagtccaaaattatgttattttcttgggtggaattttgtgatgggattgctgaatggctggttacctgaattggccctcctttgcgctcttgattaa

SEQ ID NO: 80335 - DNA, 2280 bp, Saccharomyces pastorianus
atgaacttgaagcagttcacgtgcctatcatgcgctcaattactcgctattctgctctttatctttgcttttttccctagaaaaatcgtgctgacaggtatatcaaagcaagatccggatcaagaccgtgatctccagcgcgataggcccttccagaaattggtgtttgtgatcattgatgctctcagatcagactttctttttgattcgcagatttcccacttcaacaacgtgcaccaatggctcaatacgggcgaagcatggggttacacgtcatttgctaatccgcctaccgtgacgctgcctagactcaaaagtattactacgggatctacacctagcttcattgacttgctgctgaatgtagcccaggacatagattccaacgatctttcggagcacgattcctggctgcagcagttcatccaacataagaacacgattcgtttcatgggcgatgacacctggctgaaactgttcccacagcaatggtttgacttcgctgacccgacacactcgttctttgtcagtgatttcactcaagtcgataataatgtgacgaggaacttgcccgggaaattatttcaggaatgggcccagtgggacgtggctatcctgcattacttgggtcttgaccatatcgggcataaagatggcccgcattcaaagtttatggctgctaaacatcaagaaatggacagcattctgaagtcaatatatgatgaagtgttggaacatgaagatgacgatgatacactgatttgtgttcttggcgaccatggaatgaacgaactgggcaaccatggtggctcttcagccggcgaaacatcagcaggattgttgtttttgtcacctaagctggcgcaatttgctaggccagaatcgcaagtaaactacacattgcccatcaacgctagtccggactggaatttccagtatttagagactgttcaacaaattgatatcgtccccaccatagcagcactgtttggtatgccaatccccatgaacagtgttgggataataatacctgactttttacaactgttgcccaataagttggcaagtatgaaagaaaattttatgcatttgtggaaattatcagaccatcacggcgaggttgctcttgacgatttcactgccgaagatatttatacaaagatgtacactattcaagaaacgttaaccaagtctgcaacaaattataattatcctcttttgacactggcttttgttggtttcctcataataacaatcatcgccatttatgtattattacgttattctgggcctgatttttggcagttgcgcgtttcttccctgtctgttctgttagtttccattatactaggcgtttccacatttgcaagtagtttcattgaagaggagcaccaactgtggtggtggatagtaactgcattctcggcggtccctctgttcgtataccgattgaatgtgctcataatcgtgcgctggtttataatgatggcatgcgtacgctcaatcaagttttggaataacagtggccagaaattcatttattctaacgttatgtccaatctacttaatcagaatccttcctggaagtggtgcttaaatatgttgacatttctagtgctgataatggcatctgctggttttcaagtactacattttattgtcactactattttggtggggttgtgtttcacgtacaaaatctcgtgggaaatcgtcaatggtaaccaggcagaaataccgctctttatgcatgatttactggctaagatagactttgcaccaactgaaagtaacttgattgtacttgcgcgcgttttcttccaagcttgggctattgttgtcatttcaaggttggtcctgacgaaattgaaagtacttaacaagaactacctcattaaagatatgaaagtttatataacaattcttttgatgttccaaacttcttctcagaacataggtcaatttctcgttttccaaatattagagtctcaaattttttactttttccaaaatattccaaccgcctcattaacatcaacaagtaagatttatttttcgaatttggtgtccttaattttacaaaattttacatttttccaattcggtggcacaaattccatttctactatagaccttggaaacgcataccactggtgtttcctcagactgcaacatctacgtagtggggatattaatgtccgttgccaatttcgcgccggcaatatactggtccatgctaccgtggtcaataaactacgcctctattccagcacaagttaa

SEQ ID NO: 80336 - DNA, 783 bp, Saccharomyces pastorianus
atgaaaccgcaaagcaccgcagctgaaacaagtatcagtacagaaaaaagtgacacggtaggagatggttttaaaatgagtttcacacagcccataaatgagattcttattttgaacgataattttcagaaagcctgtattagtccatgtgaacgaattatcccatcagcagaccgccagatacctttaaaaaacgaagctagtgaaaatcagttggaaattttcacggatatttccaaagaatttttgcaaagaattgttaaagctcaaactttgggtgtttctatccacaatagaattcatgagcaacagttcgaattgacgcgccaactacaatcgacatgcaaaataatttcaaaggatgatgatttaaggagaaaattcgaagcacaaaataagaaatgggatgcacaactaagcagacagtcagaattaatggagagatttagtaaattgagcaagaagctatctcaaatcgccgaatccaataaatttaaagaaaagaaaataagccatggtgagatgaaatggttcaaagagatacgaaaccaaatattgcaattcaacagctttgttcactctcaaaaatcccttcaacaagatttatcgtacttgaagagtgaactaactcgtatcgaggcagaaactatcaaagtcgataaaaagagccaaaacgaatgggatgagctacgcaaaatgcttgaaatagattcaaagataattaaagaatgcaatgaagaattgttacaagtttctcaggaatttactactaaaactcaatga

SEQ ID NO: 80337 - DNA, 1143 bp, Saccharomyces pastorianus
atgtcccaatctagtaggttaagtgcacttcctattttccaagcatcgctttcggcaagccaatctccacgttacatttttagttctcagaatggcacaaggattgttttcattcaagataacataataaggtggtacaatgtactcactgattcactttaccacagtttgaactttagtcgtcatctcgtcttggatgataccttccatgtaatatctagtacgtctggtgacctactctgttttttcaatgacaacgagatttttgtaatggaagttccttggggctattccaacgttgaagacgtttccattcaagatgcattccaaattttccactattcaattgatgaagaagaagttggtccgaaatcgtccattaagaaagttttgtttcatccaaagagttatcgtgattcttgtatagtggttttgaaagaggatgacactatcacgatgtttgacatccttaattcgcaagaaaagcctatcgttttgaacaaaccgaacaactcctttggtttagatgcacgtgttaacgacatcacagatttagaattcagtaaggacggattgacgttatattgtctaaacaccacagaaggcggtgatatctttgcattttatccatttttaccgtcagtattactgttaaatgagaaagatctcaacttgatcctaaacaaatctttagtaatgtacgagtccctggattctacaacagatgttatagttaaaaggaatgttattaagcagttacagtttgtgtcaaaactgcatgaaaattggaattcaagatttggcaaagtcgacatacaaaaggaatatcgtttagccaaggttcaaggaccattcacgataaacccctttcccggcgagctgtatgactatactgctacaaatattgcaaccatactaattgataatgggcaaaatgaaattgtttgtgtcagttttgatgatgggtctttaatcttactcttcaaagatttggaaatgtcaatgtcgtgggatgttgacaattacgtgtataataattctttggttctaattgaacgagtcaaactacaaagagaaattaagtctctaataacgttacctgaacagttgggaaactttatgtcatttccgataatattatga

SEQ ID NO: 80338 - DNA, 552 bp, Saccharomyces pastorianus
atgattgaaaagcatcaagcgatgaaattgaaaccaatagaccgtagaatatttcacctaatggacgctcttttacaaccaaataatgatgctagacccacagcgaagacagtggaggagacgttagatgaaatgctaataaattccaaacccggcaaaaaattctggaaagaaaatgtggatagcactttgaacttcagtacaatctcggaagtgaacgagaataccaacagttttactgatgattgtattgacggagacaacgttactttatcattaccagcaccagaggaaaatttgagcaccgtatcaacccaaaacctccaaaagtattctgctttaaatagaacaatccaggtttgttacaaactagtttctatgatattaacgataatcatatttaagtgtaccaaaacggggtcgtggctctcttatatgtcactgatattgttgggaatggtttttaaatcaccagctgatgaaagaggtaagcatgcaagagcgttgattttactggccttcatcgccgcatgcaaaaaatacatatactaa

SEQ ID NO: 80339 - DNA, 1356 bp, Saccharomyces pastorianus
atgagtttagtaccatatgaagaaggttcgctgattttagatgatcctaattctaaatcagtggtggttgtcaatccaacctcaggaactttatcatttttccaacaggacaacagtaatgatgactctgaactaaatgaagaccagactgcatctttatcagcactggactttccttcagggattcatcaatacaaaagccctattgcttcctatgtgtgcccgcaatgtggtacggaaattaaccctgatattataaacagaagacaacttcatcgtcgagcctctgctggagtagaatcagaaagcagtaggctcagtattccagagaacactgtgccacttggatttgaatttgccaattcaagcttttcaagaagatattttcagttattggaaagaaatcatcggcactacgccctacaaaacgatagtaacaataagcagggacagttcagcaaaaacaaatactttattccagatgatttgtttatccccggatactttcgtaaatttttcaaaatattgtctttgctgggaaatggtgcaagaggttctgtttacaaagttgtacacacaattggtaatactgaattaggtgtttttgcactaaaaaaaatacctattggaaatgatatggaatggtttaataagtgcatacgggaagtgaaagcgttgagttcgctaactcacaaaagtgccaatttgattacgtataatcatgtgtggctcgaaatggattcttcggttggatttgtcagatccattgatgggagccaatcggattcacaagaaattccttgtattttcattttacaacagtattgcagtggcggcaatttagaagactgtattctaagaaaagtgttcaataggttctcagataccgaatcacctgaagagaggaaaaaaaaatttagaactcgtaagaaaaatcacggtaaatcaggagaagttggcctatctacggaacagctcgtatccattataagggatattgcaagaggtttacacgaactgcacagtatcggcctaatacatagggacttgaaaccatccaactgtttattattgactccatttaaaagtgacaatgagaatgacaacgtatacgacagggaacacaattcagatgagtttttcccatcaattgttattggcgatttgggggaaagtcagttggaaggagagtccagattgggtactggttgcacaggaacattagagtttacagcaccagaacttattatccaggggagaccagtttcttcttctacgttaccttcaagatcgagtcgcacatacaatgaatacacctttgcttccgatatgtattctctaggaatgatttgctat

SEQ ID NO: 80340 - DNA, 567 bp, Saccharomyces pastorianus
atgctaatattgcgtcaatcaaggcagccggaacaggtgatttgccaatgggatggttgcaataagtcattttccagtgctcaggaattaaacgaccatttagaagcagtacatttaacccggggtaagtctgaataccaatgcttgtggcatgactgccatcgtacgttcccccaaagacaaaaattaatccgtcatttaaaagtgcattcgaaatacaaaccttataaatgcaagacatgtaaaaggtgtttttcaagcgaagaaactttagttcagcataccaggacacactctggcgaaaaaccttacaaatgtcacatttgtaataaaaaattcgcgatttcaagttctttgaagattcatataagaacccatactggtgaaaaacctttacaatgcaagatttgtggtaagagattcaacgaatcgtcaaatttaagcaaacatattaagacccatcagaaaaaatacaagtgctctgactgttccaaaagctttgacgatttgggaaaattgaactcacacaaagtgaaatgcgcattggaaagaaaaccatatttataa

SEQ ID NO: 80341 - DNA, 1455 bp, Saccharomyces pastorianus
atggatgcgttgactccagggactccccccaagcgcgatgactcgatggccacgagtgcggccactgctgcttctgccaagcctgatgctctgacgataggtaaagaaggcattgtccacgggcacatctataactacaacaacctgacctatatccatggtcaccttcaccacagcgcgcctgtgaacgacagtagtgcttcggcaacacctgcagccgcagctgttgctgatgccgctacttccgcatttgcatctggagctagccatgatatgggtggtgattgccacgtcaatgagaaatgcaaggagtacaccgactgccaacatttcgagttcttgaattatcacaataatcattcttttgcaaacaatttccattcggtagcttctgatccgacaagtccccaacagaattctaaaagcgacctaccacgtagaaaagattcttggtttaacgacgatctgatactgctgccctcttccaagaaaaataaaccgaacccaccacctggatccgatgattgttattgtacgcccaagattttggaaatatgttgtgacgaaactcatcccaaaagtgaggctaatgtaaaacaaggagaatctgatcaaccgacaaagaaagacatatctgagaacggcaatgatgttgcaatattcacagatgtaaagaacgatcacttgatgccaaattttaaccttcatgatcagtactgtaatagtaccaatcacgactctcacaatcacaataatactgtaccagatagcttttctcagctgatgtctcacttatcggagattgattgcgatttgacctgtgacaccccatgcacggctagcacgagcgcgactagtggtcacaagtttgttcaagatcatcaatcatcaaataatgatgacgttttccataaatactgcaaattttgtgaggagagcactgataatcaaccttgttctaagcatatgcatttagagtcaaagccacctcaactaccacccaaatgttcatctttacgaaaacctacaaacactttgcaaggtacaaatcatgcttatcacgaacatatcttaaataccgatatggatttgaagattttggaagatttatgcaatatttcttctttgtatgaagtaccgtttggaaaacacattaaccaccacgaccacaataatgccggtaacggctgcgatggttcgagcacagaaaatcatgaaaacggtaaccaaacaatgaatcttctattatcaagcattaatagatgcaaccctaaaaataatcttaatggaagcaataacaatacggctggagcaactttaactgatcatcaacaccatcaccatagaatacagtttcattctcacaaaccaaatagaaacaatattgtgaacaattcagggattagcgcggcgaacacaaccgccgatctaactaactacgacttaaatgagtaa

SEQ ID NO: 80342 - DNA, 828 bp, Saccharomyces pastorianus
atggatgcgttgactcccagggactcccccaagcgcgatgactcgatggccacgagtgcggccactgctgcttctgccaagcctgatgctctgacgataggtaaagaaggcattgtccacgggcacatccataactacaacaacctgacctatatccatggtcaccttcaccacagcgcgcctgtgaacgacagtagtgcttcggcaacacctgcagccgcagctgttgctgatgccgctacttccgcatttgcatctggagctagccatgatatgggtggtgattgccacgtcaatgagaaatgcaaggagtacaccgactgccaacatttcgagttcttgaattatcacaataatccgtcattaacaaaatataatgatactgcaacgtataattctaataatcattcttttgcaaacaatttccattcggtagcttctgatccgacaagtccccaacagaattctaaaagcgacctaccacgtagaaaagattcttggtttaacgacgatctgatactgctgccctcttccaagaaaaataaaccgaacccaccacctggatccgatgattgttattgtacgcccaagattttggaaatatgttgtgacgaaactcatcccaaaagtgaggctaatataaaacaaggtgaatctgatcaaccgacaaagaaagacatatctgagaacggcaatgatgttgcaatattcacagatgtaaagaacgatcacttgatgccaaattttaaccttcatgatcagtactgtaatagtaccaatcacgactctcacagacctgcaggcatgcaagctggcactgccgtcgtt

SEQ ID NO: 80343 - DNA, 297 bp, Saccharomyces pastorianus
atgcctgacatacaacaggtgttgtatgagtgtgacaaggacactttatatatctttttcaatctctctatccggccttcttggcaggatagcttttcgtttcaatttgttaatgatgataaccaaagatgcatagttcaactgattgaacatactatcgaaatgaagataaaaatttccatcgaaattagtctttcgctcctatctgaacattacaaaagaaacgaaaactgtattagtaatatgcttgtaattggagaagggccgaggggcgagaccattgtggagcgattttaa

SEQ ID NO: 80344 - DNA, 321 bp, Saccharomyces pastorianus
atgaaaaaagtgaaaaatgggaaactacgtgtggttctaccgagaaccgcgtccctccaaagtagcaacacaggcggtgaaagaaccagttctgcacaccacgaaggaagtaattcccaatggacccaagaattactaaaggcatgcataactagatccgttaagagcgagaggaatgggctagactacgaccatttatttgaaacggtaaagcagcagataaaaggctttagtgttggtgagttcaaagacgccttggccaagttgttacgagacaaattcataactagggacgaatcaacagcaacttacaagtactaa

SEQ ID NO: 80345 - DNA, 81 bp, Saccharomyces pastorianus
atgatttatgattgtgatagaaatgatttaatcggcttggaattcaaaggatttttggagaatattgacagttacacataa

SEQ ID NO: 80346 - DNA, 1233 bp, Saccharomyces pastorianus
atgcgttccgcttcgtcatacttaatcaggaatattgaacatccaaaaatctccgagctcacatatgtagaatttttgatgaatacaaaagaagaaaacactagacttttctttgatgtttacattatgtctatgatgctaagtaattgggcactctcccctcgatatgtgggacagcgaaacctcatacattgcaccactttatttcacacacttacacgatgggcaaaagacgcagacgataaatatcatgatataaactcaatgtatgaaaacatgtttacaccttcaaatgataacgtttcaattttgcaggatgaaggtaaatctgattatgatacgacgaaggccagctctatggaagaagatatcagtgcttttaataaagacttgtacaatttctataatattggatatgccaaacagatcatgtctgcttcacaattggaaaatatagtaaaggcaaagggcagatttgttatacaaagtttatccaccagtccttattataatttggcccttgaaaactatgttttcaagaatacaccaagagccaaaagaggtcccgataattgcagactgttattttacatcaatgataggtgcgccgttataggcaaaaaccaaaatctgtggcaggaagtagatcttgctaagctgaagagtaagaatttcgaactacttagaagattttctggaggtggcactgtactgcatgatttgggcaatgttaattattcatatttaacatcaagggagaaattcgaaacaaagtttttcaacaaaatgataattaagtggttaaattcattgaatcccgaactaagactagatttgaatgagagaggagatattattcaggacgggtttaaaattagtggcagtgcttataaaattgccggtggtaaagcataccatcatgcaacgatgttgcttaatgcggatttaggacagtttagcggcttattagaaccctcactaccgaacaatatggaatgggagtcaagtggagttcatagtgtaaaatcaaaaatcaaaaatgttggtataattactcctaatcagttcattgcagtagtatccgagcgttttcagaaaacattcaaagttgacggcgaaatacctatatattactgtgacgagtttaaatctataaacgatgagattaaagatgctatgaacaccttacagagcgaacaatggaaatatttttcggggcctaaatttcagtga

SEQ ID NO: 80347 - DNA, 1116 bp, Saccharomyces pastorianus
atggtttctcgcgctggatttccactagaggatttagaatttgttcaatttcatccgtcaggaatttatgggtctggctgcctaatcactgaaggtgcccgtggtgagggtggatttttattgaattctgaaggagaaaggtttatggaacgctatgctcctactgccaaggacttggcaagcagggatgttgtttccagagcaatcaccatggaaatcagggctggcagaggtgtcgggaaaaacaaggatcatattcttttacaattaagccatctaccaccggaggtactaaaggaaaggctaccgggaatatctgaaacagctgctgtctttgcgggtgtggatgtcacccaggagccaattcctgtcttgccgactgtccattataatatgggaggcattcccacaaaatggactggtgaagcattgaccattgacgaggaaactggagaggataaggtcatcccaggattgatggcgtgtggtgaagctgcttgcgtatcggttcatggagcgaacagattaggcgctaactcgctactggatttagtcgttttcggtcgcgccgttgcaaataccattgctgacacattacagcctggcttgcctcataagccattggcttcaaacatcgggcacgagtcaattgctaatttggataaagtaagaaatgctcgcggctcactgaaaacctctcaaatcaggttgaacatgcaaaggacaatgcaaaaagatgtttctgttttcaggacgcaagacactctagatgaaggtgttagaaatattactgaagtggacaagacatttgaggatgtgcacgtttctgataagtcaatgatctggaattctgatctcgtagaaactctggaattgcaaaatttacttacttgtgccacacaaacggctgtttctgcttccaaaagaaaggagtctcgtggtgctcatgcgagagaggactatgcaaaaagagatgatgtgaattggagaaagcacacattatcatggcaaaaggggacatcgacgcctgtaaaaatcaagtacaggaatgtaatcgcacatactttagatgagaatgaatgcgccccagtccctccagctgtcagatcctattaa

SEQ ID NO: 80348 - DNA, 420 bp, Saccharomyces pastorianus
atggcggaacatagtcaaaacaaaatagatcaatctctacaatatatcgagaggcaacaggatgaattagaaaacttcttagacaattttgaaaccaagacagaggcacttctgtccgatgttgtgtctacaagttcaggtgctgcggccaacaataatgaccaaaaaagacaacaggcctataagacagcccagactttggacgaaaatttaaactcgttgtcatccaatctttcttctctaatactagaaatcaacaatgttagtaatacattcaacaaaaccactaacatcgatataaacaatgaagacgaaaatattcaactaatcaaaatcttgaattcacatttcgacgctttaaggtcactagacgataactccacctctctggaaaaacaaatcaactcgataaagaaatga

SEQ ID NO: 80349 - DNA, 735 bp, Saccharomyces pastorianus
atggcagccttcgtcccatcgccttcctcctttcctgtaggcttagaaccaaatgaaaaggctgattttgattcatcactttctttcttttcgttagcctttgctccgaatgagaaggcaggcttggaggcttcatcattcttcttttcatcgggtttagcaccaaatgagaaggcaggcttcgaagaatcactgtccttattttcatccgatttagcaccaaatgagaaggcaggtttagaggcatcaccatcctttttctcatcggactttgctccaaaagagaatgccggcttggaggtttcattgttattcttctccgcgggcttggcaccaaaggaaaatgctggcttagccgttccatcttgcttgtcttcatttgatttggcaccaaatgagaaagctggttttgaggaattatcatccttcttttcttctggcttagcaccgaatgagaaggcaggcttagaagtagcaccagctttattttcatccgatttagcaccaaacgaaaaacttggggttgtgttagttgtcttattgtcggatgttgcagtaccaaaagagagggctggttttgctggttcattagttgtaggttcgggttgcgaagctccagctgggttagcaccagctgatcctgaaccaaatgaaagggaaggctttgcagcctcgttaaccgttttgtttccacctagttgtgaaccaaaggaaaatcctgtagtgggagcttga

SEQ ID NO: 80350 - DNA, 363 bp, Saccharomyces pastorianus
atgtttgacgaagtctacgttcagaattccaaattcttaaaggttaacgtcaccttggataatccgctactagttgacaaagatgctaatggtgtttccttgtttgagttaatcgttcctatattccaattgatatcagctgttttagtgagcatggggagctcaaacaaagctgttgttcaaacggtaaagggtttactgaatacgtataagaggctagtgatcggaatattcaaaagagatcttttgagggaaaaagaagataagaaaaattcgtcggatcctaataaccaaagtttaaacgaaatggtgaagctaattgtgatgttatgcacattaacaggatatcaaaataacgattaa

SEQ ID NO: 80351 - DNA, 4524 bp, Saccharomyces pastorianus
atgaaatggtctgcaattcctttcgaaacattgtatcgctctattgagagtagtgagttcgattttgatctgttcaaagaggtacttcctgacttacaaaatttgaacttaaacacagacaaactaaaaaacaatgctagccgatcacaattagaaaaaggtgaaattgaactatccgatggctctacttttaaggtcaatcaggagtttattttcgaagctatttctttgtccgatgaattaaacttggatgaaattgttgcatgtgaacttatactttctggtgataccaccgctaataatggcaaagtacaatactttttgagaaggcaatatatcctgcaaattgtttcttttatagtcaactgtttccacgaagatactgagttataccaagagcttataaagaatggagctttagtttctaatatcctctcagcctttaagttcattcatactcaattatctgagattaaacaacaaatcaataaggctcagatactagaaaactataatgctttattccaacaaaatatcaagtttaggagagacttcttactgagagaatatgatattctgagtcaaattttatatggtttagtggataaaggagccatcatgaaaaataaggattttatactgtccttacttcatcatgtgtcagaattggattccaatgatttttttataatatattatactcctgcatttttccaccttttcgcatctttaagagttttgcccgatgcagatgtcaaattattacattctcagtttatgaaagacttaaaggacgactccatatataccaaaccggtcaaagtagctcttattttcattttttttgcttacttcattgggtggtgtaaagaagaccctaaaagaagggctgacacgatggatttcaaaactgatgttgatgagccaatgacttctgccgtcgaactaggcgctattgaacaaattttaatatttgccgcagatacatctatcgtggaacaagacaagagtatggaacttttctacgatataaggtccctgttagaaaggcatattccaaggttaattcctaaacagttacttgatgatgaaaaaattttcagtcaaacgacgaattctacctacaacccagcatccgcaactgataatatgagcggacgcggcttatggaatccgtcttatcctgggatgatgtcaaccacgggtaccgctcgactaaatagtatgcccaataacgtcaacgaatattcttacactactatagttttatccgatcagacccaagaatttttcctctcatcctttgatgatgtgcttcaaactattattacagattgtgcctttttgcttacaaagattaaggatgctgaggaagactctttgttgtccggtgaagacttaactttggatgacatctcactaaaggctgacttagaaagattttttctgtcaatatattttttctatgcatcaaggcccgaatattcatgtactttctggtctgataaggaatcaaacgcttatggttttattgagtggtgttcgagatgcaacgacaacttgatgaggtcttgtttctatttgatggtttctagcttgtcctttggtcctgaaaatgccctgaatgtctatcactattttggcgaaaacagctcgatttcatggaaaaacattgcacagtgtctcagtgactacactaagaaaataagcaattttaactcgagcctccataagaggcagcagtttagtgagtcaactcataacgatatcgattcgactgcggtagccttagaagaaggcttaaatgaagaagctgtaatatttctgtcttctttattaactttagttggatcagttacataccaggttgacgaggatgtaaaaagctcgctatcgaaagttttctcagatgtcctattcgaattcaccaagataaatacacctctcgtaggcgctgctttcaaggttataagtaacttggttccaaaacttgaatcttctagaacaaaattttggtcttttctagactctctaattttcaaggattcatcgctgaattattcatccgaatcttatagaaatgcttttacaaacgtgttaacaaaatactctgacgttttggggtttttacaactcttccataatctgatttctattcattctcgtgaaaataatagtgaatacatggtttttggcaaattggcatttccaacaagattaggtcagggatataggaaggtaggtatatggccatattttgactacattttcaacgacattttagcgcacgtggatcaaattgttgatatcagaaataaaagagccgtccagcttcctattttgaaaattatctatacgggcttatgctcttttgattacagtgtaattttaaattctattcctgcagctgcgaatttggatgctttggtggattgcgaaaatttcttcaattacgttaaacaaggcccagctatccccatattcaactatattttcacggaaaagatttacaaaagtatatttaatgtagttgatgttggtgttgatcaattgtccatagagttagaaggtggcaaaaatcaggctgaattgttgcagttagctgtgaaaattatcaataaagtattggattatcaggagacatacgtggaagaattatttccaattgttaagaagcatggcaagacggattatttcttgccaaagaattattctcttcacggattacgttcattttacgatgcaatttttttcaatattccacttgttgcacacttgggtttatacgtcggggtcgatgatcaaattttagccacaaattcactgcgtattttggcgaaactttcagaacgctctaatggctccgttgcgtctttgtctaagagaaataagttgttaacaatattcgattccgtagatgaatcagccagaataaaggatgcatttattacacaattggaaagctcaataaccgacgctggtgtccttgctttgaagttagaactattagatttcttaacatcaaatctttctaattatagtcgaacgatgactatttctcatctgttattaggtttccaggtctcaaacgttatatccctgggacctaacctagcaacatttatatcttccggaacctcattacttgattccctcataagcgtgttggaagcttcattgaacagcattactaaggacaatatcgattatgcacctatgagattggctacagcagcactggaaattattctcaaactatgtcgtaatccgttaacatctggtctactatattcatacctaatcaaagaaaacttttttgagagaataatgatcctcgatccacaagtgacaaggttcacgacatggaacggctctccttttgacaattctacagaggaaaaatgtaagaacttcatcgagagcgaatccgttggtgcatttctgtcattcttagcctacaggaattattggacacaatatttgggtctgttcattcataaaatttcattttcgggcacgaaatcagaggttttaacatatgtgaattacttgatatcaaatacaatgtattcggtaaggttgttttctttcttggatccattaaactatggcaatatctgcgaaccaaaagagacgttatcaattttcaccaatgttcctttaaatttggaacaagtcactcttaacaagtattgctccggcaatatctatgactttcacaaaatggaaaaccttatgcgcctgattaaaagagtccgtgctgaaagcttacattctaattccttcagtctcactgtgtcaaaagaacaatttttgaaggatgcagatgtcgagtgtataaaagcaaaaagccatttcacgaatattatatcaagaaacaaagcattggagttgaacctatctgtgctgcactcttgggtacagttggtgcaaatcattgttactgatggaaaattggaaccatcaacaagatcaaactttattctggaggtttttggtacaattattccgaagattagtgattatattgagtttaatataactttttcagaagaattggtttctctcgccgttttcctatttgatatatataaccgcgattgtaagttgattaccgacaaaggcacggtagacggcaggctatatcagttgttcaagacatgtattcagggtataaactccccactctcctctgtggcattaaggtccgatttctatatattagcaaaccattatttgagtagagttctaagcgaccaagtagggtccgaaaaggttctgcaggatttgagactaggaagtaaaaaattggtagagatcatatggaacgatgttgtttatggcgagggaactagtagggttacaggtatattactattggattcacttattcaactggctaatagaagtaaagagaattttatattggattcactgatgaaaactacaagactgctcttaataatacgttcgctgaaaaatacagatgctttgttaatctactacagagcacataaacattga

SEQ ID NO: 80352 - DNA, 465 bp, Saccharomyces pastorianus
atgtatggtaaccactcttttattctaaagggtttaaatggtatattgaataacaaggtgaatatgctaacaagggaaatccaaatggaaactgttggcaataacacatttgaaacagaaacagggaagctaactaagggcctaaaccgagcagtaaatatatctccgttcaagtacataaaaaaattcaagaccgtttcaacaaagaaatttgaaagcctcttgaataagtatgatctggttgccaagaagggcggggaattgacagaggaacaaaagaaaaagaaggaggtgctctcacggatcagtagagtagtcgctgcaacaacgatagaggctggtctggcacaaggtgtggttgatttatgtataacagtgacaactagtctatgcttagtctcggccagcattggaggcgtcggatttcttatttggctcaccattatataccaagctctgacttag

SEQ ID NO: 80353 - DNA, 237 bp, Saccharomyces pastorianus
atgaaagtacaaatgatagaaaggatttttctgatccagttgtgtttgcttaccgttgtattagcaagtagtagagcagtggttgaattcgaaagtaccggaaccaaactggtcaactcattaagggtcttggctgcttactcgcagagttctgtctgtgttgatgaaaaaatatctggaatcgagagacaaatagaggaagttaagatatgtatggtaaccactcttttattctaa

SEQ ID NO: 80354 - DNA, 144 bp, Saccharomyces pastorianus
caggaatgcttgaaggaaatagaccatttcgaaagtgtaaaaacggctgaaatcaagaaatctctgggctcactagcggaccatcatatcgaattctacgaaaggatacttgaagcatgggaaaaagtagacgatagtctatag

SEQ ID NO: 80355 - DNA, 933 bp, Saccharomyces pastorianus
atgacagacaaaggcaagaacgatttaacaagcaaagctaaggataaaaccagaggcaaccccgagaagccaccatattggtttgaaatcattgtttctgatccacaaaaaagaactggtgacccaggctcttcatctggctacgtgagttatcagatatcaacaaagactaacaacacgtcattttatgataatcgtggcgatccagaatctattatagttgtacatagaagatacagtgacctattgctcctgcatgatattttactcaacaggttccccacctgcatcatcccgccattacctgataagaaagtttttcaatacatagcaggcgataggtttagccaaagatttacacaaaagagatgtcatagtttgcaaaatttcctaagaagggtctctttgcatcccgatctttctcaatcaaaagtcttcaaaacttttttggtgagtaaagattgggaatctcatcgcaaagtcctccaggatagcttgcaaccaaataaagatgaagttactgatgcttttatgaatgccttcaaaacagttcacaagcaaaacgaagagttcactgagataagggagaaaagtgataaactagatcggactgtgacaaagatagataaactttttcataaggttgtgaaaaaaaatgattcgatgtctgaagactatacaaagttgggcagtaatttacaggaattacaagaattggtcacaggcgaaaacgaggaacttgctgcgaagttgaagatttttaatgaaggtgtaacacagctgtcatatggcttgcaagatcttacaaagtatctggattacgaatatattgttgatttgaaggatcttgaacactacattgatagtatgcgacagctgatcaaattgaaagaccagaaacagatagactacgaagaactaagtgattattaa

SEQ ID NO: 80356 - DNA, 1851 bp, Saccharomyces pastorianus
atgaaaaatggtaagactgaaattcttgctaatgagcaaggtaacagaatcaccccatcttacgtggcattcaccgatgatgaaagattgattggtgatgctgcaaagaaccaagttgccgccaaccctcaaaacaccatcttcgacattaagagattgatcggtttgaaatataacgacagatctgttcagaaggatatcaagcacttgccatttaatgtggttaataaagatgggaagcccgctgtagaagtaagtgtcaaaggagaaaagaaggtttttactccagaagaaatttctggtatgatcttgggtaagatgaaacaaattgccgaagattatttaggcactaaggttacccatgctgttgttactgttcctgcttatttcaatgacgcgcaaagacaagccaccaaggatgctggtaccatcgctggtttgaacgttttgagaattgttaatgaaccaaccgcagccgccattgcctacggtttggataaatctgataaggaacatcaaattattgtttatgatttgggtggtggtactttcgatgtctctctattgtctattgaaaacggtgttttcgaagtccaagccacttctggtgatactcatttaggtggtgaagattttgactataagatcgttcgtcaattgataaaagctttcaagaagaagcatggtattgatgtgtctgacaacaacaaggccctagctaaattgaagagagaagctgaaaaggctaaacgtgccttgtccagccaaatgtccacccgtattgaaattgactccttcgttgatggtatcgacttaagtgaaaccttgaccagagctaagtttgaggaattaaacctagatctattcaagaagaccttgaagcctgtcgagaaggttttgcaagattctggtttggaaaagaaggatgttgatgatatcgttttggttggtggttctactagaattccaaaggttcaacaattgttagaatcatactttgatggtaagaaggcctccaagggtattaacccagatgaagccgttgcatacggtgcagccgttcaagctggtgtcttatccggtgaagaaggtgtcgaagatattgttttattggatgtcaacgctttgactcttggtattgaaaccactggtggtgtcatgactccattaattaagagaaatactgctattcctacaaagaaatcccaaattttctctactgccgttgacaaccaaccaaccgttatgatcaaggtatacgagggtgaaagagccatgtctaaggacaacaatctattaggtaagtttgaattaaccggcattccaccagcaccaagaggtgtacctcaaattgaggtcacatttgcacttgacgctaatggtattctgaaggtgtctgccacagataagggaactggtaaatccgaatctatcaccatcactaacgataaaggtagattaacccaagaagagattgatagaatggttgaagaggctgaaaaattcgcttctgaagacgcttctatcaaggccaaggttgaagctagaaacaaattagaaaactacgctcactctttgaaaaaccaagttaatggtgacctaggtgaaaaattggaagaagaagacaaggaaaccttattagatgctgctaacgatgttttagaatggttagatgataactttgaaaccgccattgctgaagactttgatgaaaagttcgaatctttgtccaaggtcgcttatccaattacttctaagttgtacggaggtgctgatggttctggtgccgctgattatgacgacgaagatgaagatgacgatggtgattatttcgaacacgacgaattgtag

SEQ ID NO: 80357 - DNA, 1443 bp, Saccharomyces pastorianus
atggaaggtgacgtggaatttaacgacgatgaagatgatctcaacggcctcggtgcaggtgttatcacaagacgtctgaatcttaccaccaatgccactggtagttttcaatctagtcaacttaccaactcgcaactgctgcaacaacagcaaaggcaatctcataaaaaatttaaaaaacttatcggtcatgaggccaaattactatttctcaaatccttccagttcatcttgaaaaggcaaatccgctggctcgtaactgaaatgcggtttccgaaagagttcgaacatgtcgccaagataatttggctcaagatattaaagacgattaacgaccaaccgcaagaagaactaaaacttcaattacatatgacttcgacaatttcgatcctctaccttgcatccactcatttgtccctaccagtttatacctgtgactacatcaaatggatatgcaccgccaaaatgccgtatttccaggcaagtgaaatactaccgaaatcgtggaggatccagctgccaaattattatgtttccatactagagggctcaatttcaccttttaatgggcaactgtacaacaaaatcgcattgacgtgtggtatgatccacttcaaagaatttttcaactctgaaatttcgtgccagggcttattactgaaactagtgatgcaatgcgctcttcctccagaattttatttttataccaaacaagttatcgaatttgaagaaacagacattcggaacctgacactgtgggaaagaacggacgaacgtcacacagggcgagtaagtaatcatgccgaactcagggtcctctcttattttatgctcacaataaattggatgctttcttttgatagagaccgacaatacccactaaaatggatcctttccctcacggaatcattgactcagcgcacaaccacaagtgaatctatcggcagaaatatcgttaaagtggtttacccagacaaaccgacttctagtgattatttccagtggtctgaggaggagaccctagagtttttgaagtggatggaaaagcaatttttgcccacacaaataaaatctttgcataatgagaatggttcgatggagatgacaattgatcaaaaaattgctagaaggaaactgtacaagattttccccttggatcgagaagccaatcatgatggcgaatttaatgactcaacgcatcagttaacttttattgaagatctgcaagaaagatacgctaaacaaacccccttttttgaaagcaacaaaatacgtgattctctcaattatcaagaggctaatccaccggccagaaaggaggctatcggtagacttctaacccatatagcatcacagcttttagtggattttgccatttctaaagagcaactgaaagactgcatttcaaggatcaaaaatgcctgtctgcataggatgaattga

SEQ ID NO: 80358 - DNA, 180 bp, Saccharomyces pastorianus
atgtctactttcataagaggtcccatctgcggtacagacaactgcccctcacggctttggcgtatcattgatgggagaagaacctgcaatatggtcacgttatggaaggtgacgtggaatttaacgacgatgaagatgatctcaacggcctcggtgcaggtgttatcacaagacgtctga

SEQ ID NO: 80359 - DNA, 168 bp, Saccharomyces pastorianus
atggtcattgaaacaaatgtgaacagaatagttgcttctgttgacgaactcaacaaagctgccgagtccacagatagtaaaattggaagactaacgtccactggatttggaagcgcactacaagcgtttgctcaaggcggatttgcacaatgggcaacggggcaataa

SEQ ID NO: 80360 - DNA, 1707 bp, Saccharomyces pastorianus
atggcagctccaccagctccagttctaagtaaggtgtcacatcctgaggacaaggtgccatctcatccagtgccttctgcaccctctgcaccttcagtaccctctgcaccttcagtaccctctgcacctttagtaccctctgcacctccagcacctccagcacctccagcactctctgtacctccagcacctccagcacctccagcactctctgcaccttcagtacccccagtacctctagtatcttcagcacctccagcactctcagcaccttcaatacctctagtacctccaacacctccagcacctccagcactctctgtacctccagcacctccagcacttccagcactctctgcaccttcagtacccccagtacctctagtatcttcagcacctccagcactctcagcaccttcaatacctctagtacctccaacacctccagcacctccagcacctccagcatctccagcacctccagcacctccagcacctccagcacctccagcgcctccagcgcctcttgcgctgcctaaacacaatgaagtagaagaacatgtcaagtcatctgctccccttccacctgtatccgaggaatatcatcctatgccaaatactgctccgccacttccacgtgcaccaccagtaccaccggctacttgtgaatttgactctgaaccaacagccactcattcacatacagctccttctcctccaccacatcaaaatgtcacggcctctacaccttcaatgatgagtacgcaacaacgtgtgccaacctcagtactatctggggcagaaaaagaatcacgaaccctaccgccccatgtgccttcattgacgaatcgtcctgtggattcattccatgagtcagatactacaccgaaggtggcctctataagaaggtcaacgacgcatgatgtaggcgagatttccaacaacgtcaagatagagtttaatgcacaagaaagatggtggattaataaaagcgcacctcctgctataagcaatctgaagttgaactttttgatggagatcgatgatcatttcatttccaaaagattacatcaaaaatgggtggtaagggatttttacttcttgtttgaaaactattcgcaactaagattctccttgacctttaatagtacaagcccagagaaaacggtaacgactcttcaagaacgctttccatcgccagtcgaaacacaatcagcacgtattcttgatgaatacgctcaaaggtttaatgcaaaagttgtagagaaatctcattcattaataaattcacatattggggctaagaatttcgtgtcacaaattgtatccgaattcaaagacgaagttatacaacccataggagcaagaacgtttggcgcaactatattgagttataaacctgaagaaggaatcgaacagttgatgaagagcttacagaagattaaaccaggtgacattcttgtaattagaaaggccaaatttgaagctcataaaaagatcggaaaaaacgaaattatcaacgttggaatggactccgccgctccgtattcgagtgttgttactgattatgattttacaaagaataagtttagagttatcgaaaatcacgagggaaagattattcaaaacagctacaagctaagccacatgaaaagtgggaagttaaaggttttcagaattgttgcgagaggatacgtaggttggtaa

SEQ ID NO: 80361 - DNA, 2265 bp, Saccharomyces pastorianus
atgagtgaacccgaggtgcccttcaaggtggtggctcagttcccatacaagtccgattacgaggacgatttaaattttgaaaaagatcaagagattattgttacgtctgttgaagacgccgaatggtactttggtgaataccaggattcaaatggcgacgttattgagggtatcttcccgaaaagttttgttgctgttcagggatctgaagttggaaaggaagccgaatcatctccgaataccggttccactgagcaacgtacaatccagccggaagtagaacaaaaggacctaccagagcccatttcccctgaaacgaagaaagaaactctgtccgggccagtgccagttccagccgctacagcagtatcagcacaggtccagcatgatagtagtagtggtaatggcgaaagaaaagttcccatggattctccaaaattgaaggctcgcttatctatgtttaatcaagatataacggagcaagttcctttaccaaaatcaactcacttgggtttagaaaacatacctgtgaaaaaaacaattgtggcagatgctcctaaatactatgtcccccctggaattccaacaaatgatacgtccaatcttgaaaggaaaaagtccctaaaggaaaacgaaaaaaagattgttcccgaaccaattaatcgtgcacaggtggaaagtggaagaattgaaactgagaatgaccaattaaagaaggatctgccccagatgagccttaaagaaagaattgctcttttacaggagcagcaaagattacaggctgcaagagaagaagaactcttgagaaaaaaggctaagctcgaacaagaacatgaacgtagtgcggttaacaagaatgagccctatatggaaactgaagaagcagaagaaaatgaaaaaactgaaccgaaacctgaatttacgcctgaaactgagcacaacgaggaaccgcaaatggaattattggcacataaagagattactaaaacctcacgcgaagcagatgaaggcacgaatgacatagagaaagaacaatttttagatgagtacacaaaggaaaatcagaaagttgaggagtcacaagcagacgaggcaagaggagaaaatgttgctgaggaaagcgaaataggttacggccatgaagacagagagggagataatgatgaggaaaaagaagaggaagatagtgaagagaatcgtagggccgcattgagagaaagaatggctaaactatctggcgctagtagattcggtgctcctgttggttttaaccccttcggtatggcttctggagttggaaataaaccatcagaagagccgaaaaagaaacagcataaggagaaggaggaggaggaacctgaacagctccaagaactacctcgtgccatacctgttatgccatttgttgacccaagttctaacccattttttaggaaatcaaatctaagtgagaagaatcaacccactgaaacaaagacgctagatcctcatgcaaccacagagcatgaacagaagcaagaacatggtacacacgcctatcacaatttagctgctgttgatgatgcacatcccgaatactctgaccatgattctgatgaagatactgacgaccacgagtttgaggatgcaaacgatgggttgagaaagcattcgatggtggagcaagcttttcagataggtaataatgagtcagagaatgttaattccggagaaaaaatttaccctcaagaaccaccaatctcccaccgtactgcagaagtatcacatgatattgaaaattcatcacaaaacacaactggaaatgttttgcctgtctcttccccacaaacaagagttgctcgcaacgggtcgataaattctttgactaaatctatttcaggggaaaatcggcggaaatccataaacgagtatcatgatacagtttccactaattcatctgcattaacagaaaccgctcaagatatttcgatggcagctccaccagctccagttctaagtaaggtgtcacatcctgaggacaaggtgccacctcatccagtgccttctgcaccctctgcaccaccagcaccctctgtacctccagcactctctgcacctccagcacctccagcacctccagcacctccagcactctctgcacctccagcacctccagcactctctgtaccttcagtacctccagcacctccagcacttctctgcacctccagcacctccagcacttccagcactctctgcacccttcagtacccccagtacctctag

SEQ ID NO: 80362 - DNA, 72 bp, Saccharomyces pastorianus
atgggcgtttacttgcaattgattcatcatattagtcgtttcagaactaacattgcttttatcactcaatga

SEQ ID NO: 80363 - DNA, 1344 bp, Saccharomyces pastorianus
atgagctcccctgcattaagcgacccaattactttgtatcttgaatacataaagtggctgaacaacgcctatccacaaggcggtaattccaaacaatctggaatgctcacccttttggagcgatgtttatctcacttaaaggatttggagagatatcgcaatgatgttaggtttcttaaaatatggttttggtacatagaactttttaccagaaattcattcatggaaagcagagacattttcatgtatatgttaagaaatggaattggttccgagttagcgtcattttatgaagaatttacgaatctgttaattcagaaagaaaaatttcaatatgccgtgaaaattctacagctaggaatcaaaaataaggctaggcctaataaggttttagaagaccggttaaaccatctcctgagagaactgggggaaaacaatattcagctaggaaatgaaacatcgatggactcgctagagtctacagtacttgggaaaaccagatctgaatttgtcaatagactagagcttgcaaatcaaaatggcacatcaagtgacgtcaatttaacaaaaaacaacgtatttgtagatggagaagagtctgatgtagaactattcgaaactccgaatagaggtgtttatagagatggttgggaaaattttgacttaaaggcagaaaggaacaaagaaaacaaccttagaatatcagtgctagaagcaaataccaatctgggtgagcttaaacaacatgagatgtcatcgcaaaaaaagagaccatatgatgaaaaactaccgatctttagagattctataggtagaagtgaccctgtttatcaaatgattaatacaaaggaccagaaaccagaaaaaattgactgtaattttaaactgatttattgtgaagatgaggaatctaaaggtggtagactagaattttcgctagaagaagtcttggcaatttctagaaacgtttataaaagggttaggacaaataggaaacatccaagagaagcagatttagggcaagaagaaagcgcaaatcaaaaagaagctgaagcacaatcgaaaagaccaaaaataagtagaaaagccttagtctccaagtcgttgacgccctcaaaccagggaagaatgttttctggcgaagagtacataaactgccctatgacgccaaagggacgaagcactgagacgtctgatatcatctcagctgtcaagccgcggcagttaaccccaattttagaaatgagagaatcaaattctttttctcaaagcaaaaattctgagatcatttcagatgatgacaagtcgagttcgtctttcatatcgtacccaccacagcgttga

SEQ ID NO: 80364 - DNA, 297 bp, Saccharomyces pastorianus
atgttgttgagagtgctaatgctgcttattatcaaagaaagatcaggaatgccgaaaatcctatctccaagaaatactatgaaatcgtggcattttttgaccactattttaacggtgatcaaatatctaaaatcccaaaaggtactacttttgatactcaaattcgtgccccaccgggaaagacgatatgtgtgccagttcgtgtggaaccaaaagtttactttgccactgaaagaacctacctgtcttggttgtccatctcgatattgttgggcggtgtctccactactttattaa

SEQ ID NO: 80365 - DNA, 939 bp, Saccharomyces pastorianus
atgcatagagcccacagggagttgactgggagagccgccagagaagctaatgctaaggtgctgatccatccagttgttggactaaccaaaccaggtgatatagaccatcacactcgtgttcgtgtctaccaggaaattattaagcgttatcctaatggtatagctttcttatccctgttgccattagcaatgagaatgagtggtgatagagaagccgtatggcatgctattattagaaagaattatggtgcctcccacttcattgttggtagagaccatgcgggcccaggtaagaactccaagggtgttgatttctacggtccatacgatgctcaagaattggtcgaatcctacaagcatgaactggacattgaagttgttccattcagaatggtcacttatttgccagacgaagaccgttatgctccaattgatcaaattgacaccacaaagacgagaaccttgaacatttcaggtacagagttgagacgccgtttaagagttggtggtgagattcctgaatggttctcatatcctgaagtggttaaaatcctaagagaatccaacccaccaagaccaaaacaaggtttttcaattgttttaggtaattcattaaccgtttctcgtgagcaattatccattgctttgttgtcaacattcttgcaattcggtggtggcaggtattacaagatctttgaacacaataataagacagagttactatctttgattcaagatttcattggttctggtagtggactaattattccaaatcaatgggaagatgacaaggactctgttgttggcaagcaaaacgtttacttattagatacctcaagctcagccgatattcagctagagtcagcggatgaacctatttcacatattgtacaaaaagttgtcctatttttggaagacaatggcttttttgtattttaa

SEQ ID NO: 80366 - DNA, 162 bp, Saccharomyces pastorianus
ggtgattattacgtcggcggttctttagatagcgattcaattacctcaacattagtgactatccaggtttgcgttaagacacctgcccaactaagactcgaattccaatcaagacaatgggaccgtgtcgtagctttccaaactcgtaatctcaatgcatag

SEQ ID NO: 80367 - DNA, 1305 bp, Saccharomyces pastorianus
atggccatgggtagacataacagaccttccatcatggtatatggtggtactatcttgcccggtcatccaacatgtggttcttcgaagatctctaaaaacatcgatatcgtctctgcgttccaatcctacggtgaatatatttccaagcaattcactgaagaagaaagagaagatgttgtggaacatgcatgcccaggtcctggttcttgtggtggtatgtatactgccaacacaatggcttctgccgctgaagtgctaggtttgaccattccaaactcctcttccttcccagccgtttccaaggagaagttagctgagtgtgacaacattggtgaatacatcaagaagacaatggaattgggtattttacctcgtgatatcctcacaaaagaggcttttgaaaacgccattacttatgtcgttgcaaccggtgggtccactaatgctgttttgcatttggtggctgttgctcactctgcgggtgtcaagttgtcaccagatgatttccaaagaatcagtgatactacaccattgatcggtgacttcaaaccttctggtaaatacgtcatggccgatttgattaacgttggtggtacccaatctgtgattaagtatctatatgaaaacaacatgttgcacggtaacacaatgactgttaccggtgacactttggcagaacgtgcaaagaaagcaccaagcctacctgaaggacaagagattattaagccactctctcacccaatcaaggccaacggtcacttgcaaattctgtacggttcattagcaccaggtggagctgtgggtaaaattaccggtaaggaaggtacttacttcaagggtagagcacgtgtgttcgaagaggaaggtgcctttattgaagccttggaaagaggtgaaatcaagaagggtgaaaaaaccgttgttgttatcagatatgaaggtccaagaggtgcaccaggtatgcctgaaatgctaaagccttcctctgctctgatgggttacggtttgggtaaagatgttgcattgttgactgatggtagattctctggtggttctcacgggttcttaatcggccacattgttcccgaagccgctgaaggtggtcctatcgggttggtcagagacggcgatgagattatcattgatgctgataataacaagattgacctattagtctctgataaggaaatggctcaacgtaaacaaagttgggttgcacctccacctcgttacacaagaggtactctatccaagtatgctaagttggtttccaacgcttccaacggttgtgttttagatgcttga

SEQ ID NO: 80368 - DNA, 297 bp, Saccharomyces pastorianus
atgggcttgttaacgaaagttgctacatctagacaattctctacaacgagatgcgttgcaaagaagctcaacaagtactcgtatatcatcactgaacctaagggccaaggtgcgtcccaggccatgctttatgccaccggtttcaagaaggaagatttcaagaagcctcaagtcggggttggttcctgttggtggtccggtaacccatgtaacatgcatctattggacttgaataacagatgttctcaatccattgaaaaagcgggtttgaaagctatgcagttcagggatcctcta

SEQ ID NO: 80369 - DNA, 558 bp, Saccharomyces pastorianus
atgttatcgaaaggcgacgagaagaagacaaagtcggattccagctacaggcaggtattagtcgaagaaataagcaggtataattccaagataacgcgacacgtaactaacaagcagcatgagacggaaaagtcgatgaggtgcacccaggagatgctcttcaacgtcggcagccaactggaggacgtgcataaagtgctcctgtctctatccaaagacatgcacagtctacaaacccgccagactgctctagagatggcgtttcgagaaaaggcagatcacgcctacgatcgcccggatgtgtctctgaatggcaccacactcctgcacgatatggacgaagcccacgataagcagcgtaagaagtccgtgccgccaccaagaatgatggtcacaaggtccatgaaacgcagaagatccagctccccaaccctatccaccagccaaaaccacaatagcgaagacaatgatgacgctagccatcggctgaagcgtgcggccaggaccattattccctgggaggaactaagacccgacactctggaatctgagctgtga

SEQ ID NO: 80370 - DNA, 396 bp, Saccharomyces pastorianus
atggtcgctagaggtagaacagacgagatatctacagatgtttcagaggctaattctgagcactcgttgatgattacagaaacatcatcaccgttcagatctatattctcccacagtgggaaagtaacgaatgcaggcgctttagaggaatcggacaagcagatactggaatgggcaggtaaactggaattggagagtatggagctgagggaaaactctgacaagctaattaaagttttaaatgaaaattctaagacattatgtaaatcgctaaacaagtttaaccagctactggaacaagatgctgctacgaacggttcgtaccaacacagtgcataccctcaagttttttattcattttcttccaaaacacatttactaacaactgtagtatag

SEQ ID NO: 80371 - DNA, 180 bp, Saccharomyces pastorianus
atgaggccaacaagagcaatctcgctgcctcgaagtaactgtgccttgcagatgaattccttgcttatgcggttgaaaacattggttatgaatagattagtatttttgtcgaagccgtttaggcttgctatgaggcattcgccgtcaactttgattataacaactcttttatttaagtag

SEQ ID NO: 80372 - DNA, 3243 bp, Saccharomyces pastorianus
atgccagagaatagaatgaagcacacaacttcggccatgaaattatctctacagttaatcaatgcagccattgaaatatccggtgacaaatttcctctatatccccggttattcagcttaatttctgatccaatatttaaaagtgttttattcattatacaaagttctacccagtattctcttttgcaagcaactttacaattattcacgagtttggttgtgatattgggtgattatttgcctatgcagattgaactgactttaaggagaatattcgaaattctagaggataccacaatcagtggtgacgttagtaagcaaaaaccacctgcaatcagggaattaattattgaacaactttcaatactgtggattcactctcccgctttctttttgcaactttttgtaaatttcgattgtaatttggataggtcggatctttcgattgactttataaaagagctaactaaattttctttaccagcggcggccgttaatacctctaacaacattcctccaatttgcctagaaggtgtactttcgctcattgaaaatatatacaatgacgtgcagagatttgatagggcagaattcgtaaaaaatcagaaagaaattgatattttgaaacagagagacagaaagactgaattcatattatgcgttgaaacatttaatgaaaaggcaaagaaaggcattcaaatgttaattgaaaaaggattcattgattcggattctaatagagacattgcttcatttttgtttctcaataacggacgtttaaataagaaaaccatcggtctattactttgtgatccaaaaagaacttcattgttaaaagaatttatagatctattcgattttaaagggttaagggttgatgaagcgatcagaattttgctgacgaaattcagattaccaggggaatctcaacagattgaaagaatcgttgaagcattttcatcaaaatattctgctgatcaaagcaatgataaagtggagttagaggataaaaaagcaggaaaaaatggctcagagtcaatgacagaggatgacatcattcatgtacagcctgatgcagactctgtgtttgtgttaagttattcgataatcatgttaaataccgattcacataacccgcaggttaaagaccatatgacttttgatgactactctaacaatttacgaggatgctacaatggaaaagattttcctcgttggtatttgcataaaatttacacgtccatcaaagttaaggaaatagtaatgcctgaagaacatcatggaaatgaaaggtggtttgaagatgcctggaataacttaatatcctcaacatctgtgatgacagagatgcaaagagatttcacaaaccctatttctaagttagcgcaaatagacatacttcagtatgagaaagcaattttctcaaatgttagagatattatcctgaagactttattcaaaatattcacagttgcttccagtgatcaaatatcattacgtatcttggacgccattagtaagtgtacatttatcaactattacttttcttttgaccagtcatataatgatactgtacttcatctgggagaaatgacaacgttggcacaaagtagcgcaaaagcggtggagctagatgttgacagtattcctttggtcgagatattcgtcgaagacaccgggtcgaagatatccgtgagtaaccagagtataagactgggacaaaactttaaggctcagttatgtaccgtattgtactttcaaatcattaaagaaataagtgatcctagcattgtttctaccagactatggaaccagattgtgcaactcattttgaaactattcgagaatttattgatggaacctaatttaccattttttacaaactttcattcactcttgaaacttcctgaactaccattgccagatccagatatatcgatccgcaaggcaaagatgagcagaagccttctgtctactttcgcctcttacttgaaaggcgatgaagaaccttcggaagaagacatcgatttttccattaaagcatttgagtgcgttaaggctagccatcctctcagttcagtctttgagaacaatcaactcgtcagtcctaagctgattgaaactcttctctcttcacttgtgattgaaaaaacgagtgaaaattcgccctatttcgaacaagaacttctctttttgttggaaatatccattatattaatatcagaggcttcttatggacaagaatttggagcactaattgctgatcatatgattaatatttcgaatttagatggcctttccaaggaggctattgcaagacttgcctcgtataaaatgtttttggtttcgagatttgataatccacgggacattttaagtgatttaatagaacacgactttttggtaaaaaatgaaatcttcaatactaaatattatgaaagtgaatgggggaagcaagtaataaatgatctgtttacacatctcaatgacgtaaaatacaatgagcgggctctcaaaaatgtaaaattttggaattttttaaggatattgatatcagccaaagaccgccaatttgccgtctacacatttttggaaaaatacattcaaaatggtgatatctttgtagatgatgggaactttatgaacatattaagtctgcttgatgaaatgtcatgtgcaggtgccgttggcacaaaatgggaacaaaattatgaaaattcagtcgaggatgggtgtgaagcacctgaatccaatccataccgttctattattgatctttctagtcgttccattaatataactgcagacctactttcgactgttgggaggagtaattcagcactcaacaagaatgagattatagctgctattcaaggtctcgcccatcaatgcctcaatccctgtgacgaactaggtatgcaagcattgcaagcattagagaacattctgttatctcgagcaagtcaactacgtacggaaaaagttgcggtggataacctactagagacaggattattaccgatttttgagttggatgaaatccaagatgtcaagatgaaacgaattactagcattttatccgttctttctaaaatcttcttgggccaacttgtggaaggcgtaacaagtaacgaaacttttttgagagtgcttaacgtatttaacaagtatgtagatgatcctacggtggaaaggcagttgcaagagttgattatttctaagagggaaatcgagaaggagtag

SEQ ID NO: 80373 - DNA, 285 bp, Saccharomyces pastorianus
atgcacgacgtgccaatggaaactgttttggccgtgaacccagctacgatgattgtcaaagagtgcatcaatctttgttctgccatgaacaagcagtccagagataaatcacaaacaagtgtggccgcgttgctgggcggaggtagtgatatattcttgagtcaaagtgattcgtttgttgacagcttccacaatttgcctacttctagctatcatgatcctctgatatctggtttagtacagctgcggctaaaaattaacgacttgaagggtttagattcataa

SEQ ID NO: 80374 - DNA, 2109 bp, Saccharomyces pastorianus
  modified_base (1057)..(1057): a, c, g, t, unknown, or other
atggcttctgaccaaaaatttaagatggatgaaaacgatctagagaacttgataatgaattcaaagccaagtgatttttcttacgaggattggaagaactcaacaaggacaaagaaggcattggaatcaagctatcatttagataagttgatagataaagtcgttactgatgggcacattttaattaccacgtacgttgggttaagaatacattcagataagctactaaaagttaaatggcagtatgctgttttagatgagggacataagattagaaacccagattcggagatttcattgacttgcaaaaaactgaagacacataataggatcattctttcaggaacaccgatacagaataatttaaccgagctttggtcgctttttgatttcattttccctggtaaattaggaactctacctgtgtttcaacaacagtttgtcatacctataaatattggtggttatgcaaacgcaacaaacatacaagttcagaccggctacaaatgtgctgttgcattgcgtgacttgatttcaccgtacctgttacgtcgtgtgaaagctgatgttgcaaaagatctgccacaaaagaaagaaatggttctcttttgtaagcttacgaaatatcaaagaagcaaatatttggagtttctgcattcttcagatttaaaccaaatacaaaacggtaagagaaatgttctatttggtatcgacattctaaggaaaatatgtaatcaccccgatttacttgacagagatacaaagagacataatccagattacggtgatcctaaaagatccggaaaaatgcaggttgtcaagcaattattattactgtggcataagcagggctataaagccctactcttcactcaatcgagacaaatgctcgatattctagaggagtttatatcaacgaaagatcccgatttatcacatttgaactacctacgaatggatgggacaactaatatcaaagggagacagtcgttagttgaccggtttaacaatgaatctttcgatgtattcttactaaccacaagagttggggggctangtgttaatttaaccggtgctaatagaattatcatttttgatccagactggaacccatctactgacatgcaagctcgagaaagtgcatggaggattgggcagaaaagagaggtatcaatatataggttgatggtaggaggttcaatagaggagaagatttatcatagacaaatattcaaacaattcttaaccaacaggattttgactgatcctaagcagaaacgatttttcaaaattcacgaactccatgatctgttttcactggggggtgaaaacggttattctacagaagaattgaacgaagaagttcaaaaacataccgaaaatttaaaaaattccaaatcagaggaaagtgacgattttgaacaactggtcaacctatctggcgtatctaaactagaaagcttttataacggtaaggaaaaaaaagagaatagtaaaacagaggatgatagattaatcgaagggttgctaggaggagagagcaatttagaaaccgttatgagtcatgattcggttgtcaattcgcacgcgggcagttcttcttcgaatataattacaaaagaggcttccagagtagcgattgaggcggttaatgcgctaaggaaatcgagaaaaaagatcactaagcagtatgaaattgggacacctacttggacaggtaggtttggtaaagcaggtaaaattagaaagagagatccgttgaaaaataaattaactggatcagctgccattttaggcaatattacaaaatcacaaaaagaggcatccaaggaagctcgccaagaaaattacgacgatggtataaccttcgcaagatccaaggaaatcaattccaataccaaaacgctagaaaatattcgggcatatttacagaaacagaataactttttctcatctagtgttagcatacttaacagcattggcgtcagtctttctgataaagaagacgttattaaggttagagcattattaaaaaccatagcacagtttgataaagagcgtaaagggtgggtgcttgatgaagaatttaggaataacaatgcttcatga

SEQ ID NO: 80375 - DNA, 123 bp, Saccharomyces pastorianus
atgagtctcttgtcaagcctacatagtgcttcctttggaggtatacgattgtctcaacttactatgattatggagaggagagcaacgcctacgtgtcaagacccatcgttaaccgaggtctag

SEQ ID NO: 80376 - DNA, 174 bp, Saccharomyces pastorianus
atgaccaccaattctcggctctgtccttcgagtccatcttcttccctaataaaacatttaactacatccgggggaccatcaacctcacttactataatgttgtcaagtcatcgctatacgaatcctccctgctggcatgagaaattggatacgccaagccctgggcagcctcct

SEQ ID NO: 80377 - DNA, 2988 bp, Saccharomyces pastorianus
atgttccaagatccactacgaacagctctggtttttaatttgtcatgcactgaaatttacgagatttctactgaggacattttttgtttggaagaaacagacgttaagctgagttatgtgacatcctcaccgatagtatccatagatgcgtgtatcaatttcaatgatttcttagataaggatgtctttacgttgtcgattctcacacgtgcacacaatgaggttgcatataagttggaagcatgcgtgtgtgtattcgagtctaaaccagccaaaggaacgaagtggcaaagaactaccaatttaacatttgtggaggaagcaacggtctcacaagtacttctcaaatcggtcaccaatattggtcattttgtttttacgccatggaaaacttactttattaaacatgcattgtcatcgaaacagaccattgatggtaaaacggtagacaaaatataccaagggcctggtgcctttgggtctgataacatggaaagaatcgaacttttgcagcctattttagcggataccacattaaatcatttaacatttacatttatgacgagtactgcaattctaataacatgcagaatgaatgcaatccttagcagttttgaagacgatacgtatatctgggaaaaggccttgtttgagaggcttcccatcaatggtggttcctcacatgatcactaccttgcagcgtttttcaatgagaagtgttggatactggtatccccaaagggccatcttacagtatattcagtcagaaatgaagggcatagtaattttgttcatcttggttcttttctttgcaaatcaaccttatattccgatttgatagggaactacaccaagtcacatttatcttgtggatcattacactgtgggcagggatacttgtgcttgaaatttcgatcgtgtggggacattttcgcgtccacttgcatgaagctacttttcaaaagtaaagacagtgttcctcgacaagtttactctacaagaaaaggtatctattgggcagatgtgaataataatgtttacagagatagtgagcgaatagactttgaaataaatggcagtttcattgctactaaagatggaactctattgaaagataacactatcgttactttggtcccaattcaaagagataatgagtgtaattacgcatacgtcacaaaacaaggttatctgaggtggagtttttcaaaggtttattaccggattcaaaacacgggagttgatttgactatagataattgctttttatctgctatatctagcaagggctcttttttgactgtacttgttctgaatgatgaaataacggtatttgatcattgcaaccgtttgaaaagccagaaagtagttttccatagactttctgacttagcgtccattttcctatatgaatacgaaagcacggtctacattttcatgtctggcaccgaaggaaacctttgcgttatgaaattggcaacttttgagatcgtagaagaggttaaaatttgcaagaagaagttacagttctgtgaagtccctaactcagattatttttttatatatacagccgatactataatttttttcaagccaagtaaaataaaaggtagatttaaaatccaagaagtatatgcaccatgtcctataagctgtttgatacctggagaaaaagatggctcagttgttatggttacttctcaaggtcaattttacgacgtacttgttcctggtgatgccggaagggctactctttgttctaagtttgaaaaagttttaaaaacatgtctcaaatttataactttggaatcttcatcaagatatgtgattgtagcggccctgccagtagcaaatccattgcaggacaagtattccgaaatttatgtgtatgatattaaacagttcaaaaacatttccgcattcaatttttctaacctcaacaatgatatcgagagtataaaatatgaaaacgctatgatatcagatattattgccgtacccatgctcaaaagaaccgaaacattaggaaaaagaaagacttctgagctgtataaggaagtgattttcaattcatgtatcttggtgtctctaaatttagactcaatagacgatattgatagtaaaaatatgaataacctattattgttttcatttgatgaggaatcgggttttattgaatttgtttttgggattaacacggggttctcaatcagtgggttacataactattacaatggatgtgttttggtttatggggagtttgtgcaagcttatcaactgaactattcagttcatgataacaagttcagtattgaacaggtttcaaataggttgaatatttctggtattacaataacatcatctatattttttgataaaaggaaggcaaagatggctaggaagcagcaaaatataggtacatgggtttatttggaagaaatgattttacttgatgtacggaaaggtgtgatgaggttcaatgtcatccatacaacagacggtaacatagaaaaggttcaattgcaggtacagcctctgaatttatttgagagggacctcatcaatagcattaccgacaccgggaaaatgtttaccggtgcagccgctataactttcaagaatattaggtatctactaatttcgtacggtgatcaaaagctcacgttatttagtttaaaacttgatggtgaggaagaaatagacgaaagagtgtaccatgttgctgagcaagttacaaccatcaactctgtaagaactactgattccagaatgagcacgtttttaggcgaatctacatttatgcccttattcttagtaagtaccttgtctaacggttgttatgtgatcggaatcctgcatgaagagtcagatatctcattacatatcttatcagaaaagaaagctgtcttcgcaaagcggtcggttcaaaagttcctgggcttcctcgatcctcaaatggatgatcacactgtaatatctgaaatttag

SEQ ID NO: 80378 - DNA, 1008 bp, Saccharomyces pastorianus
atgctttgccactgttatcagggccttgttggtggtggtatcatatggcgccagagttcctgccggaatcttgttccttcaatggcggttggggccacatttggacgggcagtaagtctactggtagagagatttataagtggcccttctgttattactcctggtgcctacgccttcctgggagcagccgctaccttgagcgggataactaacttgactttaactgtggtggtaataatgttcgagctaacaggcgccttcatgtatatcataccccttatgattgtagtggcaataacaaggataattttaagcacgtctggtatttctggcggtattgctgatcaaatgatcatggttaatggattcccatatttggaagacgagcaagacgaggaagaggaggaaaccttagaaaaatacactgcagagcagctcatgtcctccaaattaattactattaatgaaaccatttacctttccgagcttgaatctttgttgtacgactcagcgtctgaatattctgtgcatggttttccaataactaaggatgaggataagtttgagaaggaaaaaagatgtattggctatgttttaaaaaggcacttagccagtaaaatcatgatgcaaagcgtaaatagcaccaaagctcaaacgacactggtatacttcaataagtctaacgaagagttgggacatcgtgaaaactgcatcggatttaaggatattatgaatgaatctccaatcacggtgaagaaggcggtgccagtaacattgttattccgtatgtttaaagagctaggttgtaagactatcatcgtagaggaaagtggaattttaaaggggttggtcactgctaaagatattttgaggttcaaaagaattaagtatcgagaagttcacggtgcgaaatttacatataatgaagcacttgatagaagatgttggtcagttatccatttcataatcaaaaggtttaccactaatcgaaatggtaacgttatatga

SEQ ID NO: 80379 - DNA, 372 bp, Saccharomyces pastorianus
atgccaacaacttatgtgccaataaatcaaccaattggggatggtgaagatgtcattgacaccaatcgattcaccaatattccagaaacgcaaaattttgaccaatttgttacaattgataagattgctgaggaaaatagaccactgtctgtagactcggacagggagttccttaattcaaaatatcgacattaccgagaggttatatgggaccgtgcaaaaacatttatcacattaagctctacggccatagtttttggatgtattgctggtttcctacaagtcttcacggaaactctggttaactggaaaacaggtcattgtcagaggaactggctacttaataaatccttctgttgtaacggcgtggtt

SEQ ID NO: 80380 - DNA, 141 bp, Saccharomyces pastorianus
atgcttttgtcagtcttatgtgctctaattagtacactgttagtccactatgctgctcctacggctattggttcaggaatctcagagattcaggtatgggtatcaggttttgaatacaataaggaattttgggtttcttaa

SEQ ID NO: 80381 - DNA, 339 bp, Saccharomyces pastorianus
atgtacctgtcctcatggccagttcaagaagtgctttttttggcgacgcttactgctttgatttcttacttcaatgagttcttgaaattagacatgacagaaagtatgggtatattgtttcatgaatgtgtcaagaacgataacacctcaacttttagtcataagttatgtcagttggatgaaaatacgcacgcttttgagttcttaaaaatttttacttccctatgctttgccactgttatcagggccttgttggtggtggtatcatatggcgccagagttcctgccggaatcttgttccttcaatggcggttggggccacatttggacgggcagtaa

SEQ ID NO: 80382 - DNA, 564 bp, Saccharomyces pastorianus
atgctgcttcctttctgtttaaaaactctcgcttttatagtaaaccatgagtcaacggatgaaatcaatgaaggctttattaacatcatcgaagtgatagatcatatgctattagttcacaggtttaaattttccaatcgtcaccatttgtttaactccgttctttgccagatactagaaataatagcaattcatgatggtacattgtgtgcaaattcagcagacgccgtagccagactaataacgaactactgcgagccttataatgtatcaaacgctcaaaatgggcagaaaaataacttaagctcaaagataagtttgataaagcagtccatcagaaaaaatgtacttgtggttctaacgaaatatatacagttgtctattacgacgcagttcagtttaaacataaaaaagagtctgcagcccggtattcatgcgatttttgatatattatctcagaacgagttgaatcaattgaacgctttccttgacacacctgggaaacaatatttcaaagcactttacctccaatacaaaaaggttggtaaatggcgcgaagattaa

SEQ ID NO: 80383 - DNA, 2520 bp, Saccharomyces pastorianus
atgataagaacatttttcctttggcctaaagacaaattacttacacgtagcgtttcgtttataaaagcattttttgcgattaatgactacttgattgtcaatttttctgttgaagagtcttttcaacttttagaacatgccataaatggattaagttcgtgcccgacgactgactttgcgctttcatacttgcaagatgcctgcaatctaactcatgttgacaatattactacaacggataacaaaattgctacttgttactgcaagcatatgctactaccaagtttaagatatttcgcacagaccaaaaattctgcatcttcaaaccaatccttcattcgtctatctcattttatgggaaagttccttttacaaccacgcatagattacatgaaattaaataaaaagtttgtccaagagaatgcgtccgaaattaccgacgatatggcttattattattttgccactttcgtcactttcttatcaaaagacaattttgctcaactagaagtcatctttacaattttaggtgccaagaaacctagtttagaatgcagatttctgaatcttttatcggaatcgaagaaaaccgtatctcaagagttccttgaagcattattgcttgaaatgttagcgtcgactgatgaatctggagtgttatcattaataccaattatccttaaattggatatcgaggttgctattaaacatatttttcggttacttgaattgattcagctcgaaaatttgaacgatcctctcttttcctctcatatttgggatttaataatccaatcacacgctaacgcaagggaattatcagatttttttgccaaaataaatgagtactgttccagaaaaggacccgattcctattttttgataaatcatcctgcatatgtcaagtctataacgaagcaattgttcactttatcttctttacaatggaaaaatctattgcaaactttacttgaccaagtcaatcacgattccaccaacagggttcctttatatttaatacgcatatgcttggagggactatcagagggcgcatcgcgcgcaactctcgatgaggtaaagcctattttatctcaagtatttactttggaatcatttaataacagtcttcaatgggacctaaagtatcatataatggaagtctacgatgatattgtccctgcagaggaactagaaaaaatcgattacgtgttatcttctaatatttttgatactacatcggctgatgttgaagaactgttcttttattgcttcaaattgagagaatatatttcgttcgatctttctgatgcaaaagaaaaattcatgaggcactttgaaatacttgacgaagaaagaaaatcaaacttatcatactctgttgtgtccaaatttgcaacattagtaaacaacaactttacaagagaacaaatttcttctttaattgattcattactattgaactcgacaaatttatcttcgttattaaaaaatgatgacatttttgaagagacaaatatcacgtacgctttaataaacaagcttgcttcatcataccatcaaaccttcgctctagaagctttgattcaaattcctatccaatgcatcaacaaaaacgttagagtggctctcattaacaatctaacatgcgaatcattttgccttgattccgctactagagaatgcctccttcatttattgtcaagcccgaccttcaagagcaacattgaaacaaatttctacgaattatgtgagaaaacaataatgagccccgaaatggccatttcagagacaggtgatgaaaaaaaggaaatagaagacaaaatatctattttcgaaaaagtttggactaatcatctgtcacaggcaaaggaacctgtgagtgagaagttcttagaatctggttacgatatcgttaaacagtcaatgtcattgtccaatggtgatagcaaactaattatcgccgggtttactatcgcaaaatttttgaaaccagataacaagcatagagatatacaaggtatggcaattagctatgctgttaaaattttggaaaactactctgaaaattttgaatctgaaacaattccccttttcagaatatcaatgtctacattgtacaagattataacgaccggacaaggcgatatttctaagcataaatcgagaattctggatatattttccaaaattatgcttcgatatcattctaaaaaagtgtaccatgcgccagaagaacaggaaatgtttttggttcattcactccttacagaaaacaagttggagtatatttttgcagagtacttaaatattgagcatacagataagtgcgattctgccttggggttctgcttggaagaaagtcttaaacaaggtcctgatgcgtttaaccgcctgctctggaacagtgctaaatcgttttccaccattagccaaccttgtgctgaaaaatttgtgagagtttttatcataatgtcaaaaggattgcaagagacaataaccttggtcatcacctatttgtga

SEQ ID NO: 80384 - DNA, 189 bp, Saccharomyces pastorianus
atggatgaagattcagtggcgacagtcattgaagttatagaaactaaatgggatgacgctgatgaaaaaagttcaaacttatatgaaaccattattgaagcagataaaagcttacctagtagcatggcaacacttttgaaaaatttaagaaagaaactaaatttcaaattatgtcaagcgttcatgtaa

SEQ ID NO: 80385 - DNA, 2037 bp, Saccharomyces pastorianus
atgacaatcgatgattcaaatcgattacttatggacgtcgatcaatttgattttttggacgacggaacggcgcaacttagtaataacaagaccgatgaagaagaacaactatataaaagggacccagtcagcggggctatcctggtccctatgactggaaatgatcaaccgattgaaaaaaatggcgacaagatgcctttaaagttcaagctggggccactttcttaccaaaatatggcattcataactgcaaaagataaatataagctttatcctgttagaattcctagattagataccagcaaagagttttctgcatacgtatcaggtttatttgaaatttaccgtgatttaggtgatgacagagtgtttaatgtaccaacgattggagttgttaattctaatttcgcgaaggagcataatgcaacagtaaatctggccatggaggcgattctgaatgaattggaagtgtttattggtagagtcaaggatcaggatggaagagtgaaccgattttatgagttggaagaatctttaaccgttttaaactgtctgaggacaatgtacttcatattagatggtcaggatgtagaggagaacagatcagagtttattgagtcattgctaaactggattaatagatcagacggtgaaccagatgaagaatatattgaacaagtgttttcagtgaaggattctacagcaggtaaaaaagtgttcgaaacacaatatttctggaagcttttgaatcagcttgttttaagaggcctgctctcccaagctataggttgcattgaaagatcagatcttttaccatatttgagtgatacatgtgccgtttcatttgatgcagtaagtgactccatcgaactcctgaaacaatatccaaaagattcgtccagtacatttagagaatggaaaaatttggtgctaaaattaagtcaagcctttggtagttctgctactgatatttccggtgaattacgggattacattgaagatttcttgttagtaattggtggaaatcaacgaaaaattctgcagtattcaaggacgtggtatgagtccttttgtgggtttttattatactatatcccctcattagaactatcagcagaatatttacaaatgtcactggaagctaacgtcgtagacataacaaatgattgggaacaaccatgcgtcgacatcattagtggtaagatacactcaattttaccggtaatggaatctttagatagttgcacagcagcatttaccgctatgatttgtgaagcaaaaggtttgatagagaatatttttgagggtgaaaaaaatagcgatgattatagtaatgaagacaacgaaatgcttgaagatctattctcttataggaatggtatggcatcttatatgctaaatagcttcgcttttgagttgtgttcactgggtgataaggaactatggcccgttgccattggattgatagccttatctgcaacagggacgagaagtgcaaagaaaatggtgattgcagaattacttccacactacccatttgttacgaatgatgacattgaatggatgctaagtatatgtgtagaatggagactaccagaaatagcgaaggaaatatacaccacgttgggtaatcaaatgttatcggcacacaacataattgaaagtatcgcaaattttagtagggcgggcaaatatgaactggtaaagtcatattcgtggctattatttgaagcttcgtgcatggagggccagaagttggacgaccctgtgttgaatgccattgtgagcaaaaactctcctgcagaggatgacgttataataccacaagacattttagattgtgtagtgacgaattctatgcgtcaaactttagcgccatatgctgttctgtcacaattctatgagctgagggacagagaagattggggccaagcgctgcgcctattgcttttgctgattgaatttccttatttaccaaaacatttacttggttttgcttgtggcgaaattcctgtacccaattttccttttagatga

SEQ ID NO: 80386 - DNA, 267 bp, Saccharomyces pastorianus
atggatgtacctaaaatacagcaaacaaagccttctgaaacagaacattcaaaggaacctaaatctgaagaagagccctcctcttttattgatgaggatggatatattgtgacaaagagacccgcaacttcaacaccaccacgcaagccatcacccgtggtaaaaagggcattgtcgtcttcaaaaaagcaagaaacgccgtcatcgaataaaaggttaaaaaagcaaggaacattggaaagctttttcaaaagaaaggcaaaataa

SEQ ID NO: 80387 - DNA, 1137 bp, Saccharomyces pastorianus
atggctatccaaagaattagagaagctgctgaaaaggctaagattgagctatcttctaccgtttccactgaaatcaacctgccatttatcactgctgatgcctcaggtccaaagcatatcaacatgaagttctccagggctcaattcgagactttgacagccccactagttaagagaactgtcgacccagtcaagaaggctttgaaagacgccggtttgtctacttcagacatatctgaagtcttattggtcggtggtatgtccagaatgcctaaggttgtcgaaaccgttaaatctttgtttggtaaggacccatctaaggccgttaacccagatgaagctgttgccattggtgctgctgtgcaaggtgctgtcttgtccggtgaggttactgacgtcttattattagatgttaccccattgtctctaggtatcgaaactttaggtggtgttttcacaagattgattccaagaaacactactattccaacaaagaaatctcaaatcttctccactgccgctgctggtcaaacttctgttgaaatcagagttttccaaggtgaaagagaattggttagagacaacaaattgattggtaacttcactttagccggtatcccacctgctccaaagggtgtcccacaaatcgaagtcacttttgacatcgatgccgatggtattattaacgtttctgctagagacaaagctacaaacaaagattcttctattactgttgccggttcttctggtttgtccgaaaacgaaattgaacaaatggttaacgacgctgaaaaattcaagtctcaagatgaagctagaaaacaagccatcgaaactgccaacaaggctgaccaattggccaacgatactgaaaactccttgaaagaatttgaaggtaaggttgacaaggctgaagcccaaaaggttagggatcaaatcacttccttgaaggagttggttgctagagtacaaggtggcgaagaggttaacgctgaggagttaaagaccaagaccgaagaattgcaaacttcctcgatgaaattgtttgaacaattatacaagaacgactctaacaacaacaacaacaacaacaacaacaacggcaacaatgccgaatctggtgaaactaagcaataa

SEQ ID NO: 80388 - DNA, 999 bp, Saccharomyces pastorianus
atgcttgctgctaaaaacatactaaacaggtcaagcttgtctagctctttccgtattgccacacgtttgcagtcaaccaaggttcaaggttccgtcatcggtatcgatttgggtaccaccaactctgcggttgccattatggaaggtaaagttccaaaaattattgaaaacgccgaaggttccagaactactccttctgtagtagctttcactaaagagggagaacgtttggttggtattccagccaagcgtcaagccgtagtgaacccagaaaacaccctatttgctaccaagcgtttgattggtcgtcgtttcgaagatgctgaagtgcaaagagatatcaagcaagttccatacaagatcgtcaagcactccaacggggatgcttgggttgaggccagaggtcaaacttactcaccagcccaaatcggtgggttcgtcttgaacaagatgaaggaaacagctgaggcctacttgggtaagccagttaagaatgctgttgtcactgtcccagcttatttcaacgactctcaaagacaagctactaaagacgcaggccaaattgttggtttgaacgttttacgtgtcgtcaatgaaccaaccgccgctgccttagcatacggtttggaaaaatccgactctaaagttgttgccgttttcgatttgggtggtggtaccttcgatatctccatcttagatattgacaacggtgtttttgaagttaagtccactaacggtgacactcatttaggtggtgaagatttcgacatctatttgttgagagagattgtttcccgtttcaagaccgaaactggtattgatttggaaaatgaccgtatggctatccaaagaattagagaagctgctgaaaaggctaagattgagctatcttctaccgtttccactgaaatcaacctgccatttatcactgctgatgcctcaggtccaaagcatatcaacatgaagttctccaggactctagagatccccggtaccgag

SEQ ID NO: 80389 - DNA, 105 bp, Saccharomyces pastorianus
atgcaagctgctttcgatgaaggtaaggatttgatggtcactatcatttctgccatgggtgaagaagctgccatctccttcaaggaagctccaagatctgattag

SEQ ID NO: 80390 - DNA, 288 bp, Saccharomyces pastorianus
atgtctgacgaagaacacacctttgaaaatgctgacgctggtgcctccgccacctacccaatgcaatgttctgccttgagaaagaatggtttcgttgtcatcaaaggtagaccatgtaagattgtcgacatgtccacttccaagaccggtaagcacggtcacgccaaggtccatttggttacccttgatatcttcactggtaagaagttggaagatttgtctccatccactcacaacttggaagttccattctgtcaagagaagcgaataccaattgttggatattga

SEQ ID NO: 80391 - DNA, 273 bp, Saccharomyces pastorianus
atggtttcgttgtcatcaaaggtagaccatgtaagattgtcgacatgtccacttccaagaccggtaagcacggtcacgccaaggtccatttggttacccttgatatcttcactggtaagaagttggaagatttgtctccatccactcacaacttggaagttccattctgtcaagagaagcgaataccaattgttggatattgatgatggctacttgtccttgatgaccatggacggtgaaaccaaagacgtagtgtcaggcaccagaaggtga

SEQ ID NO: 80392 - DNA, 159 bp, Saccharomyces pastorianus
atgaagctattggataaagagataaggaaaggcgatgagtcaatcacgattgtagacgttactaataaggacattcaggaagttgaagcgcttatttggcaaatcgttgagcctgttttgagtacgcatattgatcatgataaattttcgttcttctag

SEQ ID NO: 80393 - DNA, 309 bp, Saccharomyces pastorianus
atgaaggaattaaagtcgatgctaaactccacccctactacaccaacacataatggccccactccgctccctgcaaaagctggcactcaattagataagcgtatgagcgacctatcactcaaatcggaaacaccggcttctacaaagaactttagcgcaccgaatgtttcgtcatcaggcaattcattgagaagcctcggaagtccaagcgtgtcatcctcgaaaaagaagaaggtaattcaccaccacttggacattaccaacagcgttacaaacatgtcatccgtgagcgcctttatctcaagatag

SEQ ID NO: 80394 - DNA, 507 bp, Saccharomyces pastorianus
atggatgaaccagatatgtcaaacgtaaactactggattctacgattttttccttttttgtactttaaatccagaattaattggtttaaaaattcatctcttatcgaaagcattttgggcaaaactagaatgcccctagatcatgaatattataaagatggaaagcacaaggaggacacaatagacttattggattctgaggaagtgataaaggatacagtactggaaaagacatttttgggaacctcccttggacagccttggaagttccaaggaaagaatgcgattttggtgctagctaacagatgtggtactgaagatggtaccacgatttttgcaggaagttctggcatttataaatttaacggtaaaaaacctaaaggttcacaggatgatgatgagagttcgcttgattctctcaatgaaagcgtagagttgctgggtaatttgggcaagggtctagaaggcgctatattgcgtgaggtccaatttgaagtgtttaggtga

SEQ ID NO: 80395 - DNA, 423 bp, Saccharomyces pastorianus
atgctaatagacgcaattcatggtgctaagatgagcacaaaacttttagtatcactaaaggtactagtaattcaactcaatccgcaaattgggcaagtagatcaaacaattaagagaacatggtcaatattggataaagttacgaaaagtgccacctatgtgaaaccagacataatactattccccgaatttgcattgacaggttacagttttcatgccagaaaagatattttaccttatgttactaagaaagatgaagggccctcttttgaactggctaaatcaatatccgagaaatttcaatgctacactataataggatatcctgaagaagatgatgaacagaagctatacaattctgccctggtagtaaatccgcagggggggcagatctttaattacagaaagactttttctctatga

SEQ ID NO: 80396 - DNA, 1083 bp, Saccharomyces pastorianus
atggctgtggaagccgtcataaatgtcatggaccaagatcgtaaagacgtggatttcgatttaatcaaaatgcaaggacgggttggcggatctataagcgattcaaaattgattaatggtgtcattttggataaagatttttctcatccacaaatgcctaaatgtgttttaccaaaagagggctctgatggtgttaagttggctatattaacgtgtccatttgaaccacctaaaccaaagaccaagcataaattagacatttcttcagtagaagaataccaaaaattacagacttatgaacaagataagttcaaagaaatgatagacgatgtgaagaaagcgggtgcagatgttgttatatgccaatgggggtttgacgatgaggccaatcatctacttctacagaatgatttacctgccgtaagatgggtaggcggccaagaactagaacacattgccatttccacaaacggtcgcattgttccaagatttcaggacttgtctaaagataaattaggtacatgttccagaatttacgagcaggagtttggtactactaaggatcgtatgctgattatcgagcaaagtaaagaaacaaaaactgtaacatgttttgttcgcggttccaataaaatgatcgtggatgaagctgaacgtgcattgcatgactcactatgtgtggtatgtaatttggttaaagattcacgtgtagtttacggtgggggagcagccgaagtgactatgtccctggctgtctctgaggaagctgataagcaacgtggtattgatcagtatgcattccgtggattcgcccaagcgttagacaccattccaatgactttggctgaaaattctggtcttgatccaatcggaactttgtctacattgaaaagtaaacaactgaaagaaaagatttccaacattggtgtcgattgcttaggttacgggtctaatgacatgaaggaactatttgtcgttgatccatttattggcaaaaagcagcaaattcttttagctactcaattatgtagaatgattttaaagattgataacgtcatcattagtggtaaggatgagtattga

SEQ ID NO: 80397 - DNA, 432 bp, Saccharomyces pastorianus
atggctgctcgtccacaacaacctcctatggaaatgccggatctgtcgaacgccattgtggcacaagacgagatgggtagaccctttattatcgtgaaggatcaaggtaacaagaagagacagcacggattagaggccaagaaatcacatatattggctgctagatcagtagcttctattatcaaaacttcgttgggtccccgtgggttagataagatcttgatttcacctgacggtgaaatcactatcactaacgatggtgctacaattttgtcccaaatggagctagataatgagattgcaaagttgttagtacaactttccaaatctcaagatgatgaaattggtgatggtactactggtgttgttgttctggcaagtgcgctacttgaccaagcattggagttaattcaaaagggtatacatccaatc

SEQ ID NO: 80398 - DNA, 1086 bp, Saccharomyces pastorianus
  modified_base (32)..(32): a, c, g, t, unknown, or other
atgcctgcaggtcggatttctatattggaaantgaggctttagtagcatcccaaggaccctcttactctttgagctatccaatcagacacggtcaagtggaaaattgggatcacatggaaagattctgggaaaattccatcttcaagtatttaagaacagagcctgaagatcattttttcctattgaccgaaccaccactgaatcctccagaaaacagggagcaagtggcggagatttttttcgaatcatttaattgtgctggtctatatattgctgtgcaagcagttttggctctggctgcgtcatggacctcttcaaaagtcacggatagatcattaactggtactgttatagattctggtgatggtgtcacccacgtcatcccagtggcggaaggttacgtcattggctcagcaattaaaaacattccaatagccggtagagacatcacattgttcatccaatccttgctaagagaacgtggtgaagcagacacttccttgagaactgccgaaaagattaagcaagaatactgttacgtctgtccagatattgtaaaggagtttaacaaattcgatagagatccttctaaatttgcccaatttgtggtggaaaaccaagaaaagacaaggagaaaagtcgtagatattggttacgaaagattcttggcacctgaaatcttcttcaatccagaaattgcatcctcagacttcttgactcctttacccacggtagtggatcaaactatccaggcttgccctattgacgtccgtaaaggtttatacaacaatattgtactatcaggtgggtctaccatgttcaaagattttggacgtcgtttacaaagagatctaaagtctatcgtaaataacagaatcgcacaaagtgagctgttaagtggaactaaatcgactggtgtagatgtttccgtgatttctcatcggaagcagagaaacgctgtctggtttggtggctcgctgctggcacaaacagccgaattgaaaggctactgtcacactaagaaagattatgaggaatatggtccggaaattgttagaaatttcagccttttcaacatggtttga

SEQ ID NO: 80399 - DNA, 2565 bp, Saccharomyces pastorianus
atgagactagcaaataaggcattgaacatgctactagaaggaggcaacgatcctagtttaccaaatacggtcaaagctcctcccccagttgtttacgcgcaactcaaatatatttgggctacaggagcttataaagaagcattaaaccacttgataggatttacatccaggttagcgcatgatcttggtttggatccgaataatatgatcgcgcaaagtgtcaaactctcaagtgcaagtactgctccgtatgttgaggaatacacaaaattattagctcgatgttttttaaagcaaggtgaatggagaatagcaacacaaccgaactggagaaacacaaatccggatgcaattcttggttcctatctattggctacacatttcgataaaaattggtacaaggcatggcataattgggccttagctaattttgaagtaatatccatggttcaggaagagactaagctcaacggaggtaagaatgatgatgatgatgacacggcagttaacaatgataatgtgcggattgacggtagtatcctaggaagtggttccttgactattaatggcaacagatacccgctagagcttattcaaagacatgttgttccagcgatcaagggcttttttcattcaatatctctattagaaacaagttgtttgcaagacacgttgaggttattgactcttttatttaactttggtggtattaaagaagtctcacaagccatgtatgaaggcttcaatttgatgaaaatagaaaactggcttgaagtcttaccacagttgatctctcgtatacatcagccagatcctacggtgagtaattcccttttgtcgttgctttctgatttagggaaagctcatccacaagctctcgtgtatcctttaactgtcgcgatcaagtctgaatctgtttcaagacaaaaagcggctctttcaataatagagaaaattaggattcatagtccagtcctggtaaaccaggcagaattagtcagtcacgagttgatcagagtagccgttctatggcacgaattatggtatgaaggactggaagatgcgagccgccaatttttcgttgaacataacatagaaaagatgttttccactttagaacctttacataaacacttaggcaatgagcctcaaacgttaagtgaggtatcgtttcagaaatcatttggtagagacttgaacgatgcctacgaatggttgaataactacaaaaagtcaaaagacatcaataatttgaaccaagcttgggatatttattataacgtcttcagaaaaataacacgtcaaataccacagttacaaaccttagacttacagcatgtctctccccagcttctggctactcatgatctcgaattggctgttcctgggacatatttcccaggcaaacctaccattagaatagcgaagtttgagccattattttctgtaatctcttcgaaacaaaggccaagaaaattctccatcaagggtagcgacggtaaagattataaatacgttttaaagggacatgaagatataagacaagatagccttgttatgcaattatttggtctagttaacactttgttgaagaatgattcagagtgtttcaagagacatttggatatccaacaatacccggctattccattgtcgcctaaatctggtttactaggatgggtaccaaatagtgacacattccacgttttgatcagagaacaccgtgatgccaaaaaaattccgttgaacattgaacattgggttatgttacaaatggcccctgattatgagaatttgactcttttacaaaaaattgaagtattcacgtatgctttagataatacaaaaggtcaagacctttataaaatattatggttaaagagtaggtcgtcagagacatggctagaacgtagaacaacttatacgagatctttagcagttatgtccatgactggttatattctgggactaggtgatcgccatccaagcaacctgatgctagatagaatcaccggtaaagttatccacattgatttcggcgattgttttgaagctgccatcttaagagaaaagtatccagaaaaagtgccatttagactaactaggatgttaacatacgcaatggaagttagtggaattgaaggcagtttccgaattacttgtgaaaatgtcatgagagtcttaagagataataaagaatcattaatggcgatcttggaagcttttgcgcttgatcctttgatccattggggattcgatttaccgccacaaaaacttactgagcaaactggaattcctttgccgttgattaatcctagtgaattattaagaaagggcgcaattactgtcgaagaagcggcaaatatggaagcagaacaacaaaatgagaccagaaacgccagagcaatgcttgttttgagacgtattacagataaattaacgggcaatgatatcaagaggttcaatgaattagacgtccctgagcaggttgataaactgatccaacaagccacttctattgaaaggttatgtcaacattatattggatggtgcccattctggtga

SEQ ID NO: 80400 - DNA, 3105 bp, Saccharomyces pastorianus
atgttcaaatgccctctttccgactatatgcaggaaacgtttcaaattctgactgagagaataccatcactaggccccaaaataaatgacgagttgcttaacctagtctgttcaaccttatctggaacaccatttatccagccagggtcaccaatggagataccatcgttttcgagagaaagagcaagagaatggagaaataaaagcatcctacagaaaactggtgaaagtaacgatgataataatgatataaaaatcattatacaagcttttagaatgttaaaaaatatcaaaagcagattttcgttggtagaattcgtgagaattgttgcactttcttacattgagcatacagatcccagagtaaggaaactagctgcgttgacatcttgtgaaatttacgtcaaggataacatctgcaaacaaacatcactacactctctgaacactgtatctgaagtgttatcaaagcttctagccattacgattgcagaccctttacaagatatccgtttagaagttttaaagaatcttaatccatgtttcgatccccagttggcacaaccagataatttgagactcttgtttattgcactgcacgatgagtcgttcaatattcagtcagtagcaatggagcttgtcggtaggttgtcttccgtaaaccctgcatacgtcatcccatcgataagaaaaatgctactggaactgctaacaaaattaaaattctcaacttcttctcgagaaaaggaagaaactgccagtttgttatgtactcttatcaggtcgagtaaagatgttgcgaaaccttatatcgaacctcttttaaatgttcttttgccaaaattccaagatacctcatcaacggttgcatcaactgcactgagaactataggtgagctatctgttgtagggggcgaagatatgaagatatatcttaaggatttgtttcctttaattatcaaaacatttcaggatcaatcaaactctttcaagagagaagctgcacttaaggcccttggtcaacttgcagcctcatctggttgcgtgatagatcctttactcgactatcccgaattattgggtatattggtgaatatattgaagacagaaaactctcaaaatattaggagacaaacagtcactttgataggtatactgggagctatcgacccatatcgccaaaaagaacgtgaggttacctctactaccgatatatctacagaacagaacgccccgcctatcgacattgctcttctcatgcagggcatgtctccttcgaatgatgagtattataccactgttgtcattcactgcctgctaaaaatcctaaaagatccatccctatcatcttaccacactgccgtgatccaagcgattatgcatatttttcaaacccttggtctaaaatgtgtttcattcttggaccagatcatcccaactattttggacgtaatgcgtacatgctctcagtcactattagaattttacttccaacagctttgctctttgattattatcgtaaggcaacacataagacctcatgtcgattctatattccaggctatcaaagatttttcttcggttgctaagctacaaataacgcttgtaagtgttattgaagcaatatcaaaggctctggagggtgaattcaaaagattggtccctcttactctgaccttgttccttgtaattttggagaatgacaagtctagtgacaaggtcctctccagaagggtattgagactgttagaatcgtttggtcctaacttagaaggttactcgcatttgattacacccaagatagttcaaatggcagaattcaccagcgggaacctacaaaggtctgcaataattactattggcaaactggccaaggatgtagaccttttagagatgtcctcaagaattgttcactctttacttagggtactaagttcaacaacgagtgacgaactctcaaaagtcattatgaatacattaagtctactgctaatacaaatgggcacatcctttgctatctttatccctgtcattgatgaagttatactgaagaaacatattcaacacacaatatatgatgacttgacaaacagaatattaaacaatgatgttttacccacaaaaattcttgaagcaaatacaacggattataagcccgcggaacaaatggaggcagcagatgctggggtcgcaaaattacctataaaccaatcagttttgaaaagtgcatggaattctagccaacaaagaactaaagaagattggcaggaatggagcaaacgtctatccattcaattattaaaagagtcaccctcccatgctctaagagcttgtccaaatcttgcaagcatgtattatccactagccaaagaactttttaataccgcattcgcatgtgtttggaccgaactttatagccaatatcaagaagatttaattgggtcattatgtatagccttatcttctcccttaaatccaccagaaatacatcaaacattgttaaacctggtagaatttatggaacacgatgacaaggcattaccaataccaactcaaagcctgggcgagtatgctgaaagatgtcacgcctatgccaaagcgctacattataaagagattaaatttattaaagagcctgagaactcaaccattgaatcactgatcagcattaacaaccaactgaatcaaacggatgctgcaattggtatattaaagcatgcccaacaacatcattcacttcaattaaaggagacatggtttgaaaaattagagcgttgggaagatgcactacatgcttataatgaacgtgaaaaggcaggtgatacttccgtgagcgttacactcggtaagatgagatcccttcatgcccttggcgaatgggaacagttgtcgcaattggcagctagaaagtggaaagtttcgaagctacaaactaagaagctaatagctcccttggcagctggtgctgcgtgggggttgggagagtgggatatgcttgagcaatatatcagcgttatgaaacctaaatctccagataaggaatttttagatgcaattttatacttgcacaagaatgatacgacaatgctagtaagcatatattaa

SEQ ID NO: 80401 - DNA, 108 bp, Saccharomyces pastorianus
gtcacaccacagccatgcagatctgcattcaataacaatgatcgtattttttcattaagtagtgctacgtacgtgaagcagcagcatggccaatcacaaaacgactaa

SEQ ID NO: 80402 - DNA, 1011 bp, Saccharomyces pastorianus
atgacagttgaacttttcaacagaatagtagaaagagaaaccaattggataatttatccgctgtgggtgatggctaaacaattaattcgtctggcaaacgaatctagtgaacttaataaagactcaattgaagaatgcggacgcactatccatagaagctttactatatgcctcaatgataggaacccaagattgaatgaaaataaaaaaatcggatgttatatgtttgctaatctagagttttccatctaccatcggttaagtaataaagatatgattaaaaatttagtgaaagtcctcgagagcagagtgaacgcccgggatataccaccgttgaataaaagcctggcaatggaacataagtctcaagtggtgttgtataattattatctaggtcaatactacggatgtctggaaaacgatcacgaacgcgggttcttccatttaaatgaagcattattgcaatgtccaatgctatatgtggaatctaccggcaagttcgtcttacagggccaaatggaaaagataatgatactgctggttccacttgctcttttaactaaaaggttgtaccctcactgggatcatccagtaatcgccggagtaattactaggagtaagcgcttaagtcaagtttatccgacattagtgcgtagcgtaatctcagggaacctgtcactgtacgaggctaccgcagcaagccatgaaagatttttcctttcgcaaggattgcatgtcgtcatcacattacttcgagaggtggtcttcactcggttggtacaacgatgttggcaatgggggaatgatcggaaaagtatcatgcccttgaaaattcttctggcaacaaaacaacacgatagttctgccaatgaggacgaagaggagcagttggatgccctagaatgccgtctagcaagtgctatagcaagtgggcttttgcgtgcttatctttctcactccaaccgctgcatcgttttcagtaagaaggagccctttccccatagcaaatga

SEQ ID NO: 80403 - DNA, 165 bp, Saccharomyces pastorianus
atggatgttgatataggatgttattttgaagagaaacgctatgacgacaaactgttagacttcatcagatatgacgttaaaacacctaaaaagactaaatatatactacaaaggcctacggcgacagatgaagagagtgtacgattacaaggttttaccaattag

SEQ ID NO: 80404 - DNA, 354 bp, Saccharomyces pastorianus
atgggcccatttgataaagcccgttattgtttggaacaggtcctatgtattacaccattcaattacgcttgttttggtaggctaagtgagactctgtattatgaggctctacgtagcaagaaaccaacccagaccgagctcttggaaaaggcattaaagaatgctttgaggagcgttgaacttagcgaactatacctaaaagggtgggcattggttaacatcatttctcgcgaactgggacgtaataaaccaaatgacttgatcaaactatctgcatcgaagctaaatgaaatttctgcgaagtctaacaataaagataagattaccgctgaattaattttgaataagatatga

SEQ ID NO: 80405 - DNA, 492 bp, Saccharomyces pastorianus
atgaatgaaaggcattggatcgcattggaacggaggaaattatacaaagcagtagataaaacaatgttgaaggatttggttagagaaaagcttttgacaattatgaataccaaagcgtatactcaatttaatccagaacaattactgcaactagaaaatgaaatgaaaatttacatgaaaagtggagactctggactaacagaaggaaactatttcttcttgatggaaatgcttttctatgttttggtgtaccgaaaccaagacgttgatgcgcaagttgtttataatacattaagagatcgtcttggtgaaaattcgtataaaatggtaatcatgaaagccactttattgcagataaacggaaatgataaaggcgctattgaatatctggaaaatttgttgaatgatgatctggagtatgaaacggacttcgttacttatgtctctattgcaaagaaattgatagctatcaagacacttccaagaacttga

SEQ ID NO: 80406 - DNA, 1851 bp, Saccharomyces pastorianus
atggaaaatggaagcactacattagaagagggcaatttaaatcgtgatgtcttagcagataagaaagaagttatttcgacaccaactgcaaaagaaatcaaacgtccaaatgtccagctaacccaatcatcgtcacctataaaaaagaaaagaaagtttaaaagaatatcgcctagaaaaatctttgatgaggaagatagcgaacactcccttaataataattctgccaacggagacaacaaagataaggatttggttatagattttacaagccatatcataaaaaatagagatgtagggagaaagaatgctattttagatgacagcacagatgaattcagtttcagtaaccaaggacataacacatttgacatacctataccaacctcatcacatttgctcaaaggtatagattcagataatgacaatgttatacgagaagatgatactggcataaatacagacacaaaaggagcgtcttctaaacacgaaaaattttctgttaattctgaagaagatttaaatttcagtgaacggaaactcacaggtagagacagtagtactaatattcttataagaacgcaaattgtagatcagaatttgggtgatatcgacagagataaggtccccaatggtggatccccagaaattccaaagacacatgagttaattagagataattctgagaagagggaagcacaaaacggggaatttcgacatcaaaaagattcaactgtacggcaatctccagatatattacattctgataaaagtggtgataattccagtaatattaccgcaatacccaaagaggaacaaaggagaggcaatagcaaaacatccagtattcccgctgatattcatcctaaaccaaggaaaaacttgcaagaaccaagaagcctatcaataagtggaaaagttgttccaacagaaagaaaattagataacatcaatatagatctaaatttttcggcgtccgatttttcaccatcatcacaatctgagcaatcatcaaaaagctcaagcgttatttcaacgccggtagcgagccctaaaatcaatctcacacgcagtttgcatgcagtcaaagagctttctggcctcaaaaaagaaactgacgatgataagtattttactaataagcaggaaactataaaaatactggaagatgcgtctgtgaagaatgagaccccaaataatgaaatgttactttttgagactggaaccccgatcgcatctcaagaaaacaaatcaagaaaattatttgatgaagagttttctgggaaggaattggatatgcctatagattcatcaactgtagaaataaaaaaggttattaaacccgaatttgagccagtcccatcagttgcaaggaatttggtgtctggaacctcttcatatccacggaattcacgtttagaagaacaaagaaaggaaacaagcacaagtttggctgataattctaagaaaggaagttcatttaatgagggcaacaacgaaaaagaaccgaatgcagcagaatggtttaaaattgatgaaaatagacaccttgtaaaaaattacttccatgatttgttaaaatatataaataataatgatgctacgctagctaatgacaaagacggtgatctggcttttttgattaagcaaatgcctgcagaagagttggacatgacattcaacaattgggtgaacctaaaagtgcaatctattaagcgcgaatttatagatgactgtgataagaaattggacatattgagaagggattactatactgccacaaattttattgaaactttggaagatgacaatcaattgatcgatattgctaagaaaatgggcattttatag

SEQ ID NO: 80407 - DNA, 480 bp, Saccharomyces pastorianus
atggatggtcaaatagataaaatggagaagcgatatagcatgaccaaactggagaataggttaaggactttccaagatggtgttgcacttgaaaaaaaaaagttaaagtggagttttaaagttatcccgtatcaggcaatggccaagcttggattttactttgatccagtgatcgatcctaagacatctaaactgaaaaaagactctgtaagatgttgctattgtcatcgtcaaacatacaatgtgagagactgcagatccaaaagaaaagatgttcttgagactctaagcaatataatgaggcaacatctgactgttactgataacaaacaagtttgcctccttatttacttgcgcaataagctattgacggactatagcttccatatgggggtttcagactggaaaaatgacaagtacttcagcaatccagatgatgaaaacgtgataaacctaagaaaatttactttttcaagataa

SEQ ID NO: 80408 - DNA, 135 bp, Saccharomyces pastorianus
atggtgaatgcaggactcatgcgatacgactccagcatagaaggcttaggcgatccaagcatggataaaacacttatgaacgatacctgttattgtatttattgcaaacagttgctacaggttggtcataaatga

SEQ ID NO: 80409 - DNA, 198 bp, Saccharomyces pastorianus
atgctaaactttaataacggaacccgtttatcgttgccacaactgagcctaactaaccataacaacactactatggaattagtaaacaatgttggctcctcacaacctcatacgaacaacaacaacaataataacaacacgaactataacgacgataacaccgtttttgaaactctgactttacactctgcaaactga

SEQ ID NO: 80410 - DNA, 1665 bp, Saccharomyces pastorianus
atgctttctatacctgtatttaaccagcaatcacaacaatcgcagcaccaaaaccatagttcgggttctgctggttttagcaatgttctccatggttataataataacaatagtatgcacggaaacaacaataactcagcaaatgaaaaagaacaatgtcctttccctctaccaccacctaacgttaacgaaaaggaagatttgttaagagagatcatcgaactttttgaagcaaattccgatgaataccaaatcaattcgttgataaaaaaatcgctgaatcacaaaggcacttccgatacgcaaaactttggacctttaccagaaccattgtctggcagggagttcgatccaccaaaattacgcgaattgcgaaaatcaatcgattcaaacgcattttccgacttagagatcgaacagttggctattgcaatgcttgacgaattgccggaattgagttcagattacttgggtaacactatcgttcaaaaattatttgaacattcatctgatattattaaagacatcatgctgaggaaaacaagcaaatacctaacctctatgggtgttcacaaaaacggaacatgggcttgtcagaaaatgatcactatggcgcatactccgagacaaatcatgcaagtgacgcaaggggtcaaggactactgtactccattaatcaatgaccaattcggaaattatgtcatacagtgcgttttgaaatttggattcccctggaaccagtttatttttgaaagtataatagctaatttttgggttattgttcagaatagatatggtgcaagggcagtcagagcttgtttagaggcacatgacattgtaactcctgaacaatcaatagttttgagtgcaatgatcgttacatatgctgaatatctaagcactaatagcaatggggcgttgttggtaacgtggtttttagatactagtgttttacccaacagacattctatcttggcaccaagattgacgaaaagaattgtagagttatgtggccacagattggcttctttgactattttgaaggtcttaaattacagaggggatgataacgctagaaaaatcatcctagattccctatttggaaacgtgaacgcacacgattcttcgccaccaaaggaattaacaaagcttttatgtgaaacaaattatggcccaacctttgtccataaagttttagcaatgccattattagaagatgacttaagagcccacatcattaaacaagtcagaaaagtattgacggattctactcaaatgcaaccaagccgccgtttattggaagaagtcgggttggcatcaccctctagtactcataacaagacaaaacaacaacagcagcagcatcataacagcagcatttcgcacatgttcgccactcctgatacttctggacaacacatgagaggtctttctgtttctagcgttaaaagtggtggatctaaacataccacaatgaacaccacgactacaaatggttcttctgcctctacattatccccgggccaaccattgaatgccaattctaattcttcaatgggctattttagttatcctggcgtcttccctgtcagcggcttttcaggcaacgccagtaatggatatgctatgaacaacgatgacttaagttcccagttcgatatgcta

SEQ ID NO: 80411 - DNA, 1677 bp, Saccharomyces pastorianus
atggataaaagtaagcagatgaacatcaacaacttgtccaacatccccgaggtgattgaccctggcatcactatcccaatatacgaggaagaatacgagaacaatggagagagtaatagccaactgcagcaacagccccaaaagcttggatcatataggtcgcgagcaggaaaattttctaatacattgagtaaccttttgccctccatcagtgccaagttacaccattcgaagaaaaatagtcacggaaagaacggtgctgagttttcctctagcaacaacagttcccaatctacggtggcgtccaagacaccaagggccagcccttccaggagtaagatgatggaaagttctatagacggtgtaactatggatagacctggcagtttaacccctcctcaagacatggaaaaattggtgcattttcctgactcgagtaataacttcttaattcctgccccccgaggatctagcgactcgtttaacttgccacatcagatctcgaggacgagaaacaacacaatgtcttctcagataacttccatttcatcaatcgcccccaagcctcgtacttcgagcggaatatggtcttcaaatgctagtgcgaacgatcccatgcaacagcaccttttgcaacaattgcaacctacgacaagcaataatacaactaattcaaacacgctcaacgattattcgacaaaaagtgcatattttgacaacatggtatctactagtggaagccaaatggcagataataagatgaatacgaataacttggctatcccaaactctgtttggtcaaataccagacagagatctcaatccaacgcgtctagcatatataccgacgctccactgtacgaacagcccgctcgtgccagtatttcatcgcactatactattccaacacaggaatctccattgattgctgatgaaatagatccgcaatccatcaattgggtaacaatggaccccactgtaccatcaataaaccaaatatcgaaccttttacccacaaataccatttctatttccaacgttttccccctacagcaccagcagccacaattaaataacgcgataaacttaacaagtacttccttggcaaccctatgctccaaatatggtgaagtcatatctgctaggactttaaggaatttaaacatggctttagttgaattttcttccgtggaaagtgccgtaaaagccttagatagtttacagggcaaggaggtatctatgattggagcaccaagtaaaatttcatttgccaaaatcttacctatgcatcaacaacccccacaatttcttctcaattctcaaggcttgccattgggtttagaaaacaacaatttgcaaccacagcctttattacaggagcagttattcacatggagctgtgactttccaacaacaagtaaatgttctatggctgtatttaacagcaatccaaacaatccaaaggtaatatgctttctatacctgtatttaaccagcaatcacaacaatcgcagcaccaaaaccatagttcgggttctgctggttttagcaatgttctccatggttataataataacaatagtatgcacggaaacaacaataactcagcaaatgaaaaagaacaatgtcctttccctctaccaccacctaacgttaacgaaaaggaagatttgttaa

SEQ ID NO: 80412 - DNA, 2193 bp, Saccharomyces pastorianus
atgagaagaaatacactcatctctaaaaggattcaagataacataagaactcaaaagggtcacgctccacttattaggccaagcgtcatgaaacttaatggcgaagattctggttttcagaatcatttcttggaggtagaacaaccgcaagaacacgaaaatatcccattaagtacgcacctaagcgaacaagatatcacaacaaatgtaggcctcgatgaacagaaattaccaaccaatacccaggacgaagctgaaatttccattcgggaaatagagagtgcgggtgatatcacttttaataggggcgatttactatctttatcctttgatgaggaattgggtcaggattttgctaattttctagacgctttggatcatgactccacatctttcaatcatgggccggatgattcatccagttttcaaagagacagttcaaagaaaagcttcaattctctttgggaaagcagttacgaactaaaaccgccaccttccataagaaagcaacctattgcccccgacgtcctgcaaaaattattagaatcagatactaaagatgacgcagatttggaaaaaattagagaagagcgtataactgaaccaaggactggtttggggattggaatgctgaaaacaccagttaaggatgtttcaattgcgctagctgcaagcattaaaggatatgaggcaagtttcagcgatattgactctcgtccagagggcatgaataatagtgataccatcactttgaacatgttcgacgatttcgaagaagataaaatgaccccttccactccagttcgtagtataagtccaataaaacggcatgttagcagtcctttcaaggtcgtgaaagctggaaacaaacaagagaataatgaaataaacattaaggctgaagaggaaatagagccaatgacgcagcaagaaaccgatggtttgaaacaagatattcctccactgctagcgcagacaaaagataacgtcgaagcaaaagaagaaacgataactcaacttgaagaaccacaagacgttgaacaagaatttccggatatgggaacactttatttaagtataaaggctatttccacgcttgcattatatggaactaagagtcatagagcaacatatgctattgtttttgacaatggggaaaatgtcgttcagacaccctgggagtcgcttccgtatgacggtaacatcaggatcaataaggaatttgaattgcccatagattttaaaggaaaagccgaaacatcctccgcttcttctgaaagagatagctacaaaaaatgtgttatcacattaaaatgtaaatatgaaaaacctcgacatgaattggtcgaaatagtagacaaggtgccggtgggtaagagtttttttggaaagacaaagtataaatttgaaaagaagtatgtacagaaaaaacctaaacaagatgagtgggattatctatttgcacaagacggttcatttgctcgttgtgaaattgaaattaatgaagagtttttgaaaaacgtggcatttaataccagtcatatgcattacaatatgattaacaagtggagtagaatcgcagacaaaattcacggctcaaaaaggctgtacgagttaccacgcaaggcgcctcacaaagtggcttcgttggatgtggaagcatgtttcttagaaagaacttctgcctttgaacaatttcccaaacaattttcattggtcaataagattgtttccaaatacaagttgcaacaaaatatctataaagaagggtatttattgcaggatggtggtgatctgaaaggaaagatagaaaacaggtttttcaaactgcacggctcgcaactttctggttatcatgaaatctctagaaaggctaagatcgatattaatctgttgaaagtcacgaaagtcctacgtaatgaagacatccaggcggataatggagggcaaaggaattttacagattgggtactctttaatgaatgcttccagctagtatttgacgatggtgaaagaattactttcaacgcggaatgctctaatgaggaaaaaagcgattggtacaataagctccaggaagttgttgagttgaatgttttccatcaaccctgggtgaaaaagtattgtgaaaagttagctgaggaggaaaagactcgaacaaccggtcataatttgaagcaagattttaattag

SEQ ID NO: 80413 - DNA, 1734 bp, Saccharomyces pastorianus
atggcacaagatatagataaactagcccgtgatgaggaaaagcccgtaaaacttagcagctctccccttaaatttactttgaaatcgactcaaccactgctgtcgtatccagaatcgcccatccacagaagttctattgaaattgaaacgaattacgatgacgaagatgaagaggaagaagatgcatacacatgtttaacacagtcacctcaaatattacactctccatcaaggattccaataactaacgcagtgtcgattaataagctcaatcttgatttcacattgaatcccaacgaatcagacaaaagtctagtatctgacacctcagttgatagcacaggacgagaactagatacgaaaacaatcccagaattaccattttgtatgtcatcaacgcccgaaatgacgccagtcgatgagaaatgtaaccttccaagtaaattgttgaacactagtaacaattcacattctgattcaagatcgccaacagcctctgtggaggatttaaacatttcaacgaatctgccgggtgctgattccagccaaaataatccagtcactactgatgcggatgcgcttattgaaaacgatgttgtgcgggaccttcaacagaatatggaacatatcgatgatgcttttgatgagaaaaaagttcttgacgaaggttgcagcaatgagcccgttacctttttgggtgaaaatgacactaggtccatagtatactctaataaagggaccaatgctaatgttcaagaattttcacaggaagattctctagcgcacagtgaacccaaattcaaagatcttaatgctacatcggatgacgtatggaatgaagacaaagaaacagacgcaaatatttcaacatctacaaagtcagaggaaagctacattgctgactataaagtaacgagacaagaagactgggataccaaaaagcttcatcaagaaagtgaacatgcaaatgaacaaccggcaataattcctcaaaaggattcttcagaagaaacattcactgaactaaataatgaaagtgaattccaaaggaactttaaggatggagaggaataccgaatcgttcaacacgaggagagcctgtatggacaaagaacaaagagtccagaagaaaatataataaatggcagtgaaattggtgtcgaccatggagaggccgctgaagtgaatgaaccattggcaaaaacttctgcagaagaacatgatctttcatcatcatgtgaagatcagtcggtgagcgaggctcgtaataaagacagaattgaagagaaggaagttgaaactaaggatgagaacattgaaaccgagaaagatgaaagtgagtaccataaagtcgaagaaaatgaagagccggaacacgttcccctcttaccacccctgccaagatgggaagaaattcaattcaacgagccatttatagatgaaaatgatacctccaatgattccatcgatttaaccagatccatgaaaccatcagattacatttctatatggcatatccaagaagaggaaatcaaatccaattcaccagaatccattgccaactcccaattttcacaacaatcctcgattaccactgcatctacggtcgattctaagaaggataatggatcaacttcgttcaaattcaaacctagaatagtgagcaggagtaggatttacaatccaaaaagcagagtatcctcattgaattactacgataatgaagattacatt

SEQ ID NO: 80414 - DNA, 459 bp, Saccharomyces pastorianus
atgcaagaagcggttgatgaaggattggttaagtctataggggtttccaactatgggaaaaagcacattgatgaacttttgaactggccagaactgaagcacaagccagtggtcaaccaaatcgagatatcaccttggattatgagacaagaattagcagattactgtaaatctaaaggtctcgtcgtcgaagcctttgccccattgtgtcacggctacaaaatgactaatccagatttattaaaagtttgcaaagaggtggaccgtaatccaggtcaagttttaattcgttggtctttacaacacggttatttaccactaccgaagactaaaactgtgaagaggttagaaggtaaccttgcagcctacaactttgaactgtcagacgaacagatgaaatttcttgatcatcctgatgcttatgagcctaccgattgggaatgcacagacgcgccataa

SEQ ID NO: 80415 - DNA, 126 bp, Saccharomyces pastorianus
atggttcctaagttttacaaactttcaaacggcttcaaaatcccaagcattgctttgggaacctacgatattccaagatcgcaaacagccgaaatgtgtatgaaggtgtcaagtgcggctaccgtc

SEQ ID NO: 80416 - DNA, 93 bp, Saccharomyces pastorianus
atgacggatttgaaatcaatggcaaaagcattcatatctatcgttgacagcgaaaaagaaggaagaagatctcgaacacgaacttcttcatga

SEQ ID NO: 80417 - DNA, 1878 bp, Saccharomyces pastorianus
atgatgggaactccggctactgatcttatttccgataatgataaatataataagcaatgtctttctgattcaagtgatagtggtagtgatgtaagctttttttccgtaaatgaaagcgaaggtgaattggatacaatggagaaagtggataccttgattggaggtgcaagagttataagcaataaagtagaaaaagacagcgatagtgaacaaaggggaagaaagaaggaaacaactgggcccaataactatcataatttagaagaggagcaagcgagtgccatttctcttgacgctgatgatgaagatctcgatgaaattatttcttattcgcatgacgggaactatgacagctctcataaaactttctccttttccttaccatttggtaatacaaatttccgatcaagttcaccattagccataattaaaactgtgctacccaagactccagatgagttcatcaaaaagaatctaagaaagaatgagatcaggcaaaaactgaaaatatcaacctccattttttccttggaagagatagaattatttaaatacgaaaggggcattgataattcaaggttgagggctgttaaagaatctttggaaatggatgccttgaagaactccattaagcaaataacagcagacccattcgacaaaactcatgacggatattaccgttcgcgtttagaatctatatggaatgaattggaaggagatgtcgttataatgggtggatatcgaggtagtgtgctaagggatgctactactcataagcgaatttggatcccattaaaggcaggtttgaatatgacgaaagtcgatttattgatcggacctaatgacgaagatgaacttaaaactcagaaggagattgtccctgatggaatgctaacacatatagggcctgttgatatctctaagaggttgataaagaggctagacgcaaatcctaatctaaatgttcagcagtttggctatgattggagattatccttggacatatctgccaagcatttaacgactaaactagaggaaatttacaataagcaaaaaaataagaagggaatatacatcattgcccattcaatgggcggactggtcgcacataaagtgttgcaagactgtactcatttgataagaggtattatttatgtgggttccccaagccaatgtccaaatattttaggtcctattaggtttggagatgatgtgatgtggaataaaactattttcactaaagaaaccaacttttttatgagaagtagtttctattttctaccgttagatggtagatgttttgttgacaaaattaccttagagaggtatgatttcgatttttttgatacagatgtttggaaaacccttggcttgtcacctctcgtcaatgagaaaagagaggaatcagctcacgaaaaatcaaaattattaccaaggaaaacgaaatcagcgctttcgcttaaagctaccctaaacgcaactagcaagtttgtcctaaatgcacctgttgttaggaatgtagccggcaataataaacaggtaccaagggatgtgcctttcgatgaagtcttccatacatcttatgaagatagctgtgaatatttagcgagaactttaaaacgtacaaagaattatttggatagcttagattacgacccgaacaaagaatatcctccattggccatggtttacggtaacaaggttcccactgttaggggtgctaaagtgaacggtatacaagatataaaagatgggaattatgaagatttttactatggtccgggcgacggtgttgttcaccataaatggttattgcctgaacagagagctttccagttgtttgtaaaatcgccagttcttcaggtcatgttagcttaa

SEQ ID NO: 80418 - DNA, 471 bp, Saccharomyces pastorianus
atgttgataatggcagtgactccactcactatcacgacgggtaaagaaggaacgacagtaggagaaaccattcagaactggcatctctggaggcgtcgttacgaattattccagaaagatggagtagaaggatccacttttgaccaatttggtaagatagatgcacctttcttatcatttgattttcctgtaacagatgctgatggtaagataatggcgagtgtagaccgaaattgggttggtttaggaagagaaatgtttaccgatactggtgtttatgttgttagatttgattcgcagagatgctttgataatatttatcctactgagatgctaagttctcaagtactaactttggatcaaagggccgtgttattagcaaacgctgtgtccatcgatttcgattatttttcgagacattccagacaaactggaggtttcctttcttttggcggtggctatgatgagtag

SEQ ID NO: 80419 - DNA, 291 bp, Saccharomyces pastorianus
atgaacgtttttctaggtttcgagcaggctaataggtatgccataatggatgtgaacggaaacaaaatagcatcaatgatggaaagagatttttctataacaaaggccataatgcggcagttttatcgtctacatcgtccttttttggtagatgtctttgataattggggaaatgtaataatgacgattaaaaggcccttttcgttcatcaattctcatataaagactatcatacctccttccgcgtatgttgataatggcagtgactccactcactatcacgacgggtaa

SEQ ID NO: 80420 - DNA, 321 bp, Saccharomyces pastorianus
atgaccaaagaaggcaaatgcttaccgattgaccaaagtggtaggagaagcagcaataccaccactacgagatattttatattatggaagagcttagacagttgggcttctttgatactacagtggttcgaagactctggaaaactgaatcaagtcattacgttatacgaattgagtgaaggtgatgaaacagtcaattgggagttccatagaatgcccgaaagcttgctctattattgtttgaagcccctatgcgatagaaatagggccacaatgctgaaagatgaaaatgataaagtaattgccattaaggttgtttaa

SEQ ID NO: 80421 - DNA, 213 bp, Saccharomyces pastorianus
atgggtaacgtaaagacggacgaaaatggtgtggccaagggctccttcaaggactctttgatcaagcttatcggtcctacctccgttgtaggcagaagcgtcgttatccacgccggccaagatgacttaggtaagggtgacactgaagaatctttgaagactggtaatgccggtccaagaccagcctgtggtgtcattggtctaaccaactaa

SEQ ID NO: 80422 - DNA, 213 bp, Saccharomyces pastorianus
atgtttgctgaagacaccgtgactatccgcaagctacaggccaacaagtacgtgttaggggtgctgatctgttcattatgcgcaagtgtaacgagtgaattcgcccaaagcgtggtttcgcggggacaaagggtgttcgatgtgaaggatattatttgtaatttctggggcagtctgcttggtgtgggcattgccttctaccaggaccgataa

SEQ ID NO: 80423 - DNA, 387 bp, Saccharomyces pastorianus
atgatcatgcgccacggtaagaaggaaaaggcacaaaccattctgtccagggccttatatctggtgtactgccagacccggcaggaccccatccaggctttggaaaagtcactcgacgaactagctccgctgatgatgaccaagacgttcaacacaggcgtggccaaggcttctgtcattcctgtgcctctgaacaagaggcaaagaaataggatcgcgtggaactggatcgtacaaagcgcaaaccaaagagtgtcgagcgacttcgccgtgcgcttgggagaagaactcactgccattgccaaaggcacttcgtctgcctttgaaaagagggaccagattcacaagacagccattgctcacagagcatatattcaattaaagtaa

SEQ ID NO: 80424 - DNA, 381 bp, Saccharomyces pastorianus
acttcagtgcctcccattgtgccaactgctctgcagttggttatcttggagcccgcctgcgaaccctgtaagaggtctactttggactggcccggtggagccagcgaggtctctggcaggtattcttttgcagagaactcttcccttagctcgttgatcgcttcaagccactcgtcgacccctttctctgccgatggttcgctagctggtgttcgtactgacgactggaagcgagcaacacatgtcccactttgccacaggagacgtggcctgactaacatatacctcctcgcacaatgcagcattatattcacctcagatccgtatctatctatttttcttctgaaaacgatagctgctgtcttttctgcacgtgtataa

SEQ ID NO: 80425 - DNA, 387 bp, Saccharomyces pastorianus
atgatgaacggtagaaacaacggtaagaaattaaaggctgttagaatcatcaagcacactttggacatcatcaatgtcttgactgaccaaaacccaatccaagttgttgttgacgctatcaccaacactggtccaagagaagacaccaccagagtcggtggtggtggtgccgctagacgtcaagctgtcgatgtttctccattgagaagagttaaccaagctattgctttgttgaccattggtgccagagaagctgctttcagaaacatcaagaccattgctgaaactttggccgaagaattgatcaatgctgctaagggttcctctacttcttacgctatcaagaagaaggatgaattggaacgtgttgccaagtctaaccgttaa

SEQ ID NO: 80426 - DNA, 1371 bp, Saccharomyces pastorianus
atgtcaccggtagggagagtgccgaggataccatcggtgccgatgagtgctagagatgtccaaccaattttagaaagattgaatggcaggggttttcaaattgggcccggtagtaatataaaagattttggatcattcactggaccttcaagctctatcgataaagtccatttgcataatgagctaacttacaacatcaaggaaatgagtagtgtagaggttagtatccctggtatattcactgagggggagattattatcggagctcatagggattcgctcgcctcgagtagcgccggtgatgcaaatagtggcagcgctattcttttagaaattgcacgaggaatgagtaaattacttaagcatggttggaagccactgcgtcctatcaaactaataagttgggatggtgaacgatccggccttctgggatctacagattatgcagaagctcatgctgcgattctcaggagaagggccttggtatacctaaatctagataatgcagtctctgggacaaattttcactgtaaagccaacccacttttacaagacgtcatatacgaagctgctaagctcacggaatttaatgggcacgaagactggtcattgttcgaccattggaaatacacttctaatgccactatttctctacttgatgggttgtctagttacacttcatttcagtaccatcttggagtgcccgctgcacattttcagtttaatgccaatgatacttcaggcgcagtctatcatagtaactccgtattcgatagcccaacttggttggaaaaatttaccaattctgactacaagttacacaacaccatggccatgtttgtaggtttgacaacgctgatgctgagtgaaaacgaactggcaagattcagtacacatgtttacctgaagaaaatatataactggtatatcgcatggcactctaatctatcttcagcatttccccaggacgatgaagtgaacagcttagcaaaaagggttctggacttattaaaagttgccacacaggaagatagcatccaatttgaccaacaaaatgatattctctataaagagtgtagggaagctttacctgtttgggctttttacaaaaaaatcaagagctatattaaactgcaacgatccaatagcaaatcaaagcaaattgatcaattatttattacacacagaggactgaaagacagggaatggatgaagtactctcttttagcacctagtaagtttgagggatctgtcggggaagttttgcccggccttcacgaaggattggctgatattgatagaaacgaggtcattcagtggttaaccattttgctaagccaattcagcaacgttcgctatttacttcaataa

SEQ ID NO: 80427 - DNA, 1077 bp, Saccharomyces pastorianus
atgagaatgatacagagagagagagagagagagaaagaggaaggtcaattaaaggagagaactgttgttaatatggcagaccctgatgacaatgaggccgaagccactggattacaacaatatagtggtgagaccactcgcgatgacaatgaagaaagcatgaatgattctttcactttaacatccaggaatagaggcagaagtaatacaatatctagtattgttagtggttatgaaataatgaaagaacatatggacaaggaaaagtttatgtacttgattctagcgagtctccttttgtacatgggatttgttgccgcatttgctcccaggacgtctttatcaagagactttcggcggtttcactcttccagattgacgaatgcagaggtttataggatatacttgaactccttgcaacaggaaaatagagcgaaagaacatgtatacaagtatgctgggtacatgagcaacggagcaagtgattcgtcaacgtttaaatataccttggacgagtttctagatatggggtacaaacccaaagttgaaaaatattacccatggataggtgaaccagtagacactaacgtagctcttttagaaaatggtaaagtggtctacgaagcaagcatgatcgaggatagagttaaaggtgatcctgcttctcacgctaggaaaaggcaaaagggtttccatcaatattcaaaaaatggaagtgtaactgctcgatacgtgttttgcaattatggtagcatcagtgactacaagctacttttgaagaaaaacattgatattgaagataaaatccacatcgtacgatcgggtaaaatattacctggattaaaggtaaagaatgcagaactttatggcgcttccagtgtcattatatatacagacccatttgacgatggtaaagttactgaggaaaatgggtttttacactatccttatggaccagcaagaaacccaagttatattaagagagattctgtaactatttcagtgacactccaggagatccgacaactccagggtatccctccaaggattccgacactgaacatatgtcaccggtag

SEQ ID NO: 80428 - DNA, 192 bp, Saccharomyces pastorianus
atggacccgaataccgatataaatgagacaattcaactaattgtagcggcaagtctatcctccaaatgtttatatttgggtgttcaaatattaggtgatgcgccaatttggcctataatattatcgttcgctcatggtttgcaatcaagagctatctatagtgttacgaaaaaaagaaacactagaatataa

SEQ ID NO: 80429 - DNA, 873 bp, Saccharomyces pastorianus
atgtctaatggtaacgaggcatatgaaaattgtttgagatttctttctacaggcgatagttttttttacgggaatgctagggtttcgttaagtacatgtctatcattgttgatatctatccatgagaaaatacttattgaaagaaataacgcaaggatcagtaataacaacaccaatagcaataacattgagttagacgatattgagtggaagatgacttccagacaacggatcgatacaatgttaaaatactgggaaaacctttatttgaaaaatggtggcatcttgacacctaccgagaatagcatgtcaacaataaacgccaatccagcaatgaggttaataattccggtatatttgtttgccaaaatgagacggtgtttggacctggcacatgttattgagaaaatctggttgaaagattggtccaatatgaataaagctttggaggaagtttgctatgacatgggttcattgagggaagctaccgagtatgcactgaatatggtggatgcgtggacttcattttttacgtacattaaacggggcaagcgcagaattttcaatactcctgtatttgcgaccacatgtatgttcactgcagtattagtgatttcggaatacatgaaatgtgtagaggattgggcacgcgggtacaatgccaacaaccctaactcagcattattggatttttcggaccgtgtcttatggctaaaagcagaaaggattttgagaagattacaaatgaacttgataccgaaggagtgtgatgtgttgaaatcgtacactgatttcttaagatggcaggacaaggatgccctaaatttgtcagcactaaatgaagaacaagcacaaagggccatggacccgaat

SEQ ID NO: 80430 - DNA, 1539 bp, Saccharomyces pastorianus
atgagagatcgaattgaaagcatgttcttggaatcgtggagagactattccaagcatggctggggatacgatgtgtatggacctattgagcacacttcccataatatgcctcgtggcaaccagccgttaggctggattatcgtagattcagtggataccttgatgttaatgtataactcctccacacgatacaaaagtgagttcgaggcagaaattcagagatcggagcattggataaacgatgttttggattttgatattgatgccgaagtgaatgtttttgaaactactattagaatgctaggtggtttattatccgcatatcatctatctgatcttttagaagtgggtaataagactgtctacttgaacaaagcaatagatttgggggataggcttgctttggcgttcttatccactcagaccggaattccatactcaagtataaaccttcatagtggccaagcggttaagaaccatgcagatgggggggcatcttctaccgcagaattcactacgctacaaatggaattcaaatatctggcgtatttgacaggaaatcgtacttattgggagttggtggagcgtgtttacgagccattatacaaaaataacgatcttctaaatacctacgatggattggttccaatttatacatttccagatactgggaagtttggtgcttcgactatccggttcggatcaagaggtgattctttttatgagtatttactaaaacaatatttattgacgcacgaaacactttattatgacctgtacagaaaatccatggaaggtatgaaaaagcatttattagcacaatccaaaccctcttctctgtggtacattggggaaagagaacaaggtctacatggacaactttctcctaagatggaccacctcgtgtgctttatggggggattgttagcatcaggctctactgagggcctttctattcatgaagcccgtagacgtccgtttttctctctttcccttgaaagaaaaagtgactgggatttggctaaagggataactgacacatgttatcaaatgtacaagcagtcttcctcggggcttgcgcctgaaatcgttgtcttcaatgatggaaacataaaacaagatggttggtggcggtcgtctgtgggtgacttttttgttaaaccactcgataggcacaacctacaaagaccagaaacggtggaatcgattatgttcatgtatcatttatctcatgatcacaaatatcgtgaatggggggcggaaatcgcaactagcttctttgaaaatacctgtgttgattgtaatgacccaaaattaaggcgattcaccagtttaagtgattgtatcacgttacctacaaagaaatctaacaatatggaaagtttctggttggcagagactttaaagtatttatatatattgtttttagacgagtttgatttgaccaaagttgttttcaacacagaagctcatccttttccagtattagacgaagaaatattaaaatcgcagtctctgaccacaggttggtcgttgtag

SEQ ID NO: 80431 - DNA, 807 bp, Saccharomyces pastorianus
atgggtgtcgaaggcttcaagcaaaaagtggaggaatactggggtaagaaattcgagcctgagagaccatttgagtttaaatctaatattgattactttggatggattaaagatgaaactgggttaaaccactttaccgcatttattgaaaatggtagggttgaagatacaccagatttgcctcaaaagacaggtattagaagggttgctgaatacatgcttaagactaattctggtcatttcagattgactggtaatcaacatttggttatctctaatattacagatgaacatgttgctggaataaaatctattttaaagacctataaattggataacaccgatttcagcggtttgagattatcttcatcttcctgtgttggtttgccaacatgtggtttagcgtttgccgaatctgaacgtttcctacctgacattattactcagttggaagattgtttagaagagtatggtttacgccatgattccattattatgagaatgactggttgccctaacggttgttctcgtccatggctaggtgaattagctcttgttggtaaagctccacatacttataacttgatgcttggtggtggttacctcggccaaaggctaaacaaattgtataaggccaatgtgaaggatgaggaaattgtcgactacatcaaaccattgtttaaaaggtatgctttagaaagagaagaaggggaacactttggtgatttctgtataagagtaggtatcattaaaccaaccaccgagggtaaatacttccatgaagatgtgtctgaagatgcctattaa

SEQ ID NO: 80432 - DNA, 3393 bp, Saccharomyces pastorianus
atgactgcttctgacctcttgacgctcccacaattgttggcgcaatattcctctagtgctccccaaaataaagtgttctacactactagcacaaaaaatagtcattcatccttcaaagggctagaatctgttgccacagatgctactcatctattgaacaatcaagatccattgaataccatcaaagatcaactctctaaggacattttaactaccgtttttacagatgaaactactttggtcaaatccatccaccatctatattctcttcctaataaacttccattggtgattacagtggatttgaatttgcaagattattccgcaattcctgcgttaaaggatctttctttccccatcttaatatcttctgatttgcaaactgcaatttcaaacgcggactcttcttataagattgctacaagttctctgaccccagttttccattttcttaacttggagaaaattggcacgagtacagctattgaacaagacatcgacattcctaccttggagattgctaacgaagagactaaagtagcattgtcagaagctactgattcattgacaaattttgaactggttaaaggtaaagagtcaattaccactgtcattgttaacctgtcaccatatgacgcggaattcagtagcgtattgccttcaaacgtaggattgatcaagattagagtatacagaccatggaatttttccaagttcttggaaatactgccatcttctgttaccaaaatcgccgttttacagggtgtctctaagaaatcgcaatcaaacgaatttcaaccatttcttttggacttctttggcaattttaatgaattagtttctaggaacatcgagcaggtagtgttgactaatattggtaatgtgaatgattatggcaacgttatcaacaccgtcatatcgaatattaacaagaaggaaccagataataacttatttttaggtgaatccaatgaaaaggctgaggaacaagctgaagttactcaacttatttcttctgtcaaaaaagttgtgaacttagaagacgcctatatcaaagtgctaaaacagttattttcatcaaatctacaaattttgaatcaattttccagtgagacaattgaaccaagtaatccagaatttggttttggacactttttaaaacaagaagcccagcgtgaagaattgatcagcttagcaaaaacctctcttgatccaagtctttacttgtccgaggatgcaaataaaattgttcaactattatctaaatggttgtcattcaatggacgcgatcttgacgaagctcaattacaagaggccaatgcgacaggtttggaaatatttcagttattacaatctaatcaagattcctctactgtcttaaaattcttaaagatagctccaacaagcgattcttttattttcaaatcaagctggctaattggctccgatgcctggtcttatgatttgggtcactcaggtattcaacaggttttatcctcccgtaaaaacattaatgttttattgattgattcagagccatatgaccatagaaagcaaaaccaggatagaaagaaagatgttggtttgtacgccatgaattattacagtgcctatgttgcctctgtagcagtatatgcttcttacacccaactattgactgcaataatagaggcatctaaatacaatggtccttctattgtcttggcttatttgccgtataattccgaaaatgatactccattagaagtcttaaaggaaaccaaaaacgccgttgaatctggttactggccattgtataggtttaatcctgtttatgacgatccatcaacagataaggaggcatttagcttggattcttcggttatcagaaaacaattacaggacttcttagaccgtgagaataagcttaccctattaaccagaaaagatccatctttgtcaagaaatctaaagcaatctgctggtgatgcgttgacaaggaaacaagaaaaaagaagcaaggctgccttcgatcagttattggagggtttgtccggcccaccgctacacgtctattatgcttctgacggtggtaatgctgcaaacttggcaaagagactagcagcaagggcatctgcaagaggtttaaaggctactgttctgtccatggatgacattattttggaagaattacctggtgaagagaatgtagttttcattacttccacggctgggcaaggtgaattcccccaagacggtaagtctttctgggaagctctgaaaaatgacaccgacttggatttagctagtttgaatgttgctgtttttggtctcggtgattctgagtattggccacgtaaagaagataaacattattttaacaagccttcacaggatttatttaagcgcttggaattattgagtgccaaagccctaattcccttgggactgggtgatgatcaagatgctgatggtttccaaactgcttattctgagtgggaacctaaattatgggaagctcttggtgtttccggcgctgctgttgatgatgagccaaaacctgttacaaacgaggatattaagagagaatctaatttcttgagaggtactatcagtgagaacttaaaggatacttcttcaggtggtgttactcacgctaatgaacaattaatgaaatttcacggtatttacacccaagacgatcgtgacattagagaaatacgtaagtcacaaggcttagagccatactatatgtttatggcaagagctcgtttaccaggtggtaagaccactccacaacaatggcttgctctggatcacttatctgatacttcaggcaatggtaccctgaaattaacaacaagggcaaccttccagattcatggtgtgctaaagaagaacttgaaacacacattgagaggaatgaatgcagttcttatggatacattagctgctgcaggtgacgtgaacagaaatgtcatggtttctgctctaccaaccaatgccaaggttcaccaacaaatcgctgatatgggaaaattgatttctgatcatttcttaccaaagactacggcctaccacgaagtttggctggagggcccagaagaacaggacgatgatccatcctggccatctatttttgaaaacagaaaagatggtccaagaaaaaagaagactctagttagcggtaacgctttggtcgatattgaaccaatttacggtccaacttatctgccaagaaagtttaaattcaacatcgccgttcctccatataacgatgtggatgtattatctatcgatgtcggtttagttgctatagtaacccagaaactcaaatcgtggagggttataatgtttttgttggtggtggtatgggtaccactcataacaacaagaaaacttacccaagattag

SEQ ID NO: 80433 - DNA, 153 bp, Saccharomyces pastorianus
atgggtaccactcataacaacaagaaaacttacccaagattagggtcatgcttaggttttgttaaaactgaagacattattccaccacttgaaggtatcgttattgtccaaagagatcacggtgaccgtaaagacgtaagcatgctcgtttaa

SEQ ID NO: 80434 - DNA, 831 bp, Saccharomyces pastorianus
atggatgacgaagttaagaagcaatcctctaagatatatgacagttctatcatgtcgcttccagatggaagatggactaaagaagagcttcgctcagattctgatttctcgatagaatgtcttaactgtaagcaaaaaattataagcaaagataactgtcaagttttgaatgatatgccttcagagttttggttcgagttaatggattattggcattgccacaaacccgatgttaaggaagacaagtcttcctacacaagatttgaaacgctaaaaccatctaaaaacgaaattttaattggaagctcttattttcaaggcactcctgcgacttttgaaaatgtagcgactacaaagggaaatgataatgttttatgcataaagtgctcagcagtgttaggccaagtaactgctggttcgctttataaactacacaaatggaaactgcagttaatacgcagtggaaacacatacaaatttcctccagaatgtgacattacaatttctttaataaacgtagttaaggcaaactcttgtcgttacgtactagtaaaatgtaaaacggaatcattgctagtttggatattttccgttgacattggagtcacattgacgggaaagaaaagcttcaagagagcgatgaagttgctttacacaaacagcgttaccacaataaatcgatgtctcaatcgacaagtcgtcgaggaattagatttccaagaaacatcgtttaatgctttttacagctcccttcaacatactaatgcacttttaccctcaagcatgaaaaaaattggtgaatggaccattagctatacatcactaatctaa

SEQ ID NO: 80435 - DNA, 327 bp, Saccharomyces pastorianus
atggttcaatatgtggtagaatggttaccaaggatacagagcatttcagtggtagtagaaggttggaagcaggtggagataaagaacttgaaggagacactcatgagcatatctggtgatgaagaacaagttgaagatattttacttccagtagaagttgaagaaaaagtagacacttcttacaagttcaaaaacagaggtaaagacttagaatggatgacgaagttaagaagcaatcctctaagatatatgacagttctatcatgtcgcttccagatggaagatggactaaagaagagcttcgctcagattctgatttctcgatag

SEQ ID NO: 80436 - DNA, 654 bp, Saccharomyces pastorianus
atggaaactcaaaaatctatgtttgaacataacaataaactatcatcagagcatccatttgcctctgaaccctacagttggcccggtagtttaagtggtgtttcgttctggaccaacggtgacgaaaagaagcaaatatatttcattggtaacatcattgggtggtggttccaagtcatatcattggctgtttttgttggcattatcgtggccgatttaattactagacatcgtggctattatgccctaaacaagatgaccagagaaaagctgtatggcccattgatgtttttcttcgtctcctggtgctgtcattattttccattctttttaatggcgcgtcaaaagtttttgcatcattacttaccagctcatttaatcgcgtgcttattctcaggagcactatgggaagtaattttcagtgattgcaaatcattggatttggagaaagacgaggatatttcaggtgcatcatatgaacggaaccctaaggtctacgttaaaccctataccgtcttcttggtgtgtgtctcctgtgctgttgcgtggttttttgtatacttttcaccactagtgtatggagatgtcagcttgtcaccatcggaagttgtttctagagagtggtttgacatagaattaaatttctccaagtaa

SEQ ID NO: 80437 - DNA, 1017 bp, Saccharomyces pastorianus
atgtattgttacgttcgtttctacaagtgccaattgcgtcaaccttttacatggagttggtatatttggttacacgccactggtttgtctttatccttcgtgatttccacaaaatatgttggtgttatgacatattccgctattggttttgctgttgtggtcaacttatggcaattactggacatcaaggcgggtttgtccttgaggcagttcatgagacattttagtaaaaggctgaatggtttagttttgattccatttgtgatttacttgttttggttctgggttcatttcaccgttttgaatacttcaggtcctggcgacgcatttatgtctgctgaatttcaagaaacacttaaggactctcccttaagtgttgactctaaaaccgtcaattattttgatattatcactatcaaacatcaagatactgacgcattcttacattctcacttggcacgttacccacaacggtatgaagatggtcgtatctcatccgctggtcaacaagttactggttacacgcatcctgacttcaacaatcaatgggaagtgttaccaccccatggcagtgatgtcggtaaaggacaagctgttctattgaaccagcatataagattgagacatgtagccaccgatacctacttgttagcccatgatgtcgcttccccattttaccctaccaatgaagaaatcactacagtaactttagaagaaggtgatggggagttatatcctgaaacactttttgcattccaaccactgaaaaaatcagatgaaggtcacgttttaaagagtaaaacggtttctttccgtcttttccacgttgatacctccgtagctttgtggactcacaacgacgagttgttaccggattgggggtccaacaacaagaagttaatggtaacaaaaaagttattgatccttcaaataactgggttgttgaagaaattgttaacctggacgaggttcggaaggtatatgttccgaaggttgttaagccattaccattcttga

SEQ ID NO: 80438 - DNA, 591 bp, Saccharomyces pastorianus
atgcagcgtcacgttaaagttgacggtaaggttagaaccgacactacctacccagctggtttcatggatgtcatcactctagatgccaccaatgaaaacttcagattggtctacgatgtcaagggtagattcgctgtccaccgtatcaccgatgaagaagcttcttacaagttgggtaaggtcaagaaggttcaattaggtaagaagggtgttccatacgttgttacccacgatggtagaactatcagatacccagacccaaacatcaaggtcaatgacactgttaagatcgacttggcctctggtaagattactgatttcatcaagttcgatgccggtaagttggtttacgttactggtggtcgtaacttgggtcgtatcggtactatcgttcacaaggaaagacacgatggtggtttcgatttagttcacatcaaggactccttggacaacactttcgtcactagattgaacaacgtcttcgtcatcggtgaacaaggtaagccttacatttctttgccaaagggtaagggtatcaagttgtctattgctgaagaacgtgacagaagaagagctcaacaaggtttataa

SEQ ID NO: 80439 - DNA, 363 bp, Saccharomyces pastorianus
atgaccaatacaagaatgacagatactgaggtatttgaaaggagataccccgttctgttgaaagagttctcgatcagaagaggttcaggaggcaaaggtaaatatactggcggaaatggcgtagtaagggatgttcaatttcggaaggctgtaacagcatctatattatcagaacgtcgtgtcattggccctcatggtataaagggaggacaagacggtagtagaggtgagaatttatgggtaagacatagcacaggcgcattaatcaatgtcggcggtaaaaatacgatttacgctcaacccggtgatcgattcatcattaaaacccctggtggtgggggatttggacaatacaaggattaa

SEQ ID NO: 80440 - DNA, 3336 bp, Saccharomyces pastorianus
atgcagaaaggaaacataagaattgccatcgataagggtggaactttcactgattgtgtggggaatattggtacaggtaaacaagaacatgatactgtcatcaagctcttgtcggtggatcccaaaaactatccagatgctccccttgaaggcataagacgtctcttggaggtgcttgaacacaagacaattcctcgcggtattcctctagacatctctaatgtgagaagtttaagaatggggacaaccctagctacaaactgcgctctagaaagaaatggtgaacgttgtgccttcattactacgaaaggctttaaggattcattgctgattggagaccaaaccaggccagatatcttcaacttaaatataaaaaaggtagtgccattatatgacactgtagttgaaatagatgagagagttactttagaagatttctcggaagacccttattttaccaaatcgtctcctaatgaacaagaaggtatcctggaaggtaatagtggcgaaatggtaagggtcataaagaagccagatgaatcaagcgtaagatctattctgaaagtgctttatgctagcggaatcaagtctattgcgatagcatttttacactcatacacttttccagaccatgaacgaattgttggtaatattgccagagaaattgggttctctcatgtttcattatcatctgaagtctccccaatgataaaatttttaccgagggctcacagttctgtcgcagatgcctaccttactccggtaattaaaaagtacttgaatagcatttctgcaggtctgagccacgcagaagatacccacattcaattcatgcagtctgatggtggtttagtggatgggggaaaattttccggtttgaaatctattttatctggtcctgcaggtggcgtaataggttattctagtacatgctatgataaaaataataacatacccttaataggctttgacatgggaggaacatctactgatgtcagtaggtacggtgatgggaggttagaacatgtttttgaaaccgttaccgcagggatcatcatacaatctcctcaacttgacatccatactgttgctgctggaggaagttctattttgtcatggaaaaacgggttattcagagtaggccctgattcagcagctgctgatccaggccctgcagcctacagaaagggcgggcctttgactattacagacgccaacctctttttaggacgtttggttcctgagttcttccccaaaatttttgggcccaatgaggatgaatcacttgacttagaaaccactactttgaaattcagagaattaacagatgtcatcaataaggatctgaattcaaatctaaccatggaagaggttgcctatggatttatcaaagtagctaacgaatgcatggcaagacctgtgagggccattacagaagcaaaaggacatgtagtatctcagcatcggttagtttcctttggcggggctggcgggcaacacgccatagcggttgcagattcattgggcattgacactgttttaattcatagatattcttctatcttgtccgcttatggcattttcttagcagatgttattgaagaaaaccaagagccttgctcttttatcttgggtgagccagagaccatcttgaaagtgaaaaaaagattcttagaactttctaaaaattcaatcaaaaaccttttatctcagtcgttttctcgggaggacatagtcttggaaagatatttaaatctcagatatgaaggtactgaaaccagtttgatgatattacaaaaatatgatgaccaatggaattttagggaatggttctctgaagctcataaaaaagagttcggattctcattcgatgacaaacgaattataattgatgatataaggataagagcaattgggaaatcaggcgttagaaaagaaaaaacggttgatgagcaattgattgaaatttcccatttcaagaaagccgacgtgtcaaaggatgctagttttacccagaaagcatattttgacaacaaatgggtcgacactgcggtcttcaaaattgatgatcttcctgccggaacaattatcgagggcccagccatattggctgacggtacccaaacaaatattattctaccaaacagccaagcaacaattttaaactctcatatatttatcaagatcaaccaaaaggctgtgaagacattatctaaaagcggatatgaacttgatatagatccaatcttattgtctattttcagtcataggtttatggatatcgcccttcaaatgggtactcaattgaggaaaacatctgtttcaactaacgtcaaagagagattagatttttcatgtgcactattcgactctaaaggaaacttagtggctaacgctcctcatgtacctgttcacttagggtcaatgtcaacctgcatatcagcacaggcgaagttatgggaaggcaaattaaagcctggtgatgttttaatcacaaaccatccggatattggtggtactcatttaccagacataacagtaataactccttctttctcttcaactggcgaattgatattttatgtggcttcaagagcccatcatgcagatattggaggtattctacccggttcagtgcctccaaattccaaagagttgtacgaagaaggaaccgcaatttattccgaattggttgtcaaagagggaattttccaggaagaattaatttacaagcttttcgtagaagatccaggcaaatacccaggctgctcaggttcaagaagatttagtgataacataagcgatttaaaagcgcaagtcgcagctaacacaaaagggatacagttaattgggtcattaactaaggaatatgatctggctacaatattgaaatacatggctgcaattcagacaaatgcatctgaatccataaaaaaaatgcttgcaaaaatggttgaacattttggcacaacgaagttttctggcgaagatcgcttagatgatggaagcttaattaaactacaagttatcataagacctgaaaaggaggagtatatttttaatttcgatggcacttctccccaagtttatggtaatttaaatgcaccagaggctattactaattctgcgattctttattgtctacggtgtctagtaggcgaagatattcctttaaatcaaggttgtttaaaacccttaacaataaaaattcctgctggttccctcttgagcccccgatccggtgctgctgttgtcggaggcaatgtattaacttcccaaagagtgacagatgtaatcttaaaaacatttaacgtcatggcagattctcataggtga

SEQ ID NO: 80441 - DNA, 75 bp, Saccharomyces pastorianus
atgattctcgaagtttgcgcagatgacaaggaaggagaggatgttgaagttcctttcattaccattcatctatga

SEQ ID NO: 80442 - DNA, 150 bp, Saccharomyces pastorianus
atggttataacgcatagtgaacaaatgatgaggtcttgtaactcgattgcagttcttaaagatggtaaagtggttgagcgaggtaacttcgacactttatataataatcgcggggaattattccaaattgtttccaaccaaagcagttaa

SEQ ID NO: 80443 - DNA, 3207 bp, Saccharomyces pastorianus
  modified_base (990)..(1015): a, c, g, t, unknown, or other
atgcttcagcgaatatcaactaaactgcacaggcggttcttatctggcctgctgcgtgtcaagcactacccattaaggcggattctccttccactgattctactgcagatcatcattataacgtttatctggtcaaattcaccgcagcgtaacggacttgggcgggacgctgattaccttctaccaaattacaacgaacttgacagtgatgatgattcctggtatagcatcctgacttcgtctttcaaaaacgatcgcaagatccagttcgctaagacactatacgaaaatttaaaattcggcaccaaccctaaatgggtcaatgaatatactctgcaaaatgacctgctctcggtcaaaatgggccctcgaaagggcagtaagctcgaatccgtggatgagttgaagttttacgacttcgaccctcgtctcacgtggtccgttgtgctgaaccatttgcaaaataatgacgcagatcagccagaaaagttacccttttcatggtacgactggacaaccttccacgagctgaataagctgatttccatagataaaactgttctgccctgcaattttcttttccaatccgctttcgacaaagagtctctagaggccattgagacagagctcggcgaacctttgttcctatacgaaagaccaaaatacgcgcagaaactgtggtacaaggccgctagaaaccaggacagaatcaaagactcaaaggaactaaaaaagcattgttccaagctattcactccagacgggcatggctctcctaagggtttaaggtttaatacgcaattccaaataaaggagctgtatgataaagttagacccgaagtttaccaattgcaggcaagaaactacattttgactacacagtcgcatccactatccatttccatcatcgaatcagataactccacgtatcaagtccccttgcaaactgaaaaatcaaaaaacttggtgcaatccggcctgttgcaggannnnnnnnnnnnnnnnnnnnnnnnnnccaacaagagaagaaagaaaaataaacaggacgtagaattcaaccataacaggcttttctatgaattcgtcaataacgaccaagttaactccctatacaaactggaaattgaagaaactgataaattcacttttgataaagatttggtttatttatccccttcggatttcaagttcgatgcctccaaaaaaattgaagagttagaggaacagaagaaactctatccggacaaattttccgctcataatgagaattatctgaacagtttgaagaattccgtaaagacaagccctgcattgcaaagaaagttcttctatgaggctggtgccgtgaagcaatataaaggtatggggttacatcgtgacaagaggttcttcaatggtgatacattaatcaatgataaacaagaataccaggctagattgaattcaatgatcagaacattccaaaagtttactaaagccaacggcatcatatcttggttgtctcacggaacgctgtacggctatctttacaatggaatggctttcccctgggataacgatttcgacttgcaaatgcccattaagcatttacaattgctcagtcaatacttcaaccaatctcttatattggaagacccaagacagggtaatggacgttatttcctagacgtcagcgactccttgacagtaagaattaacggtaacggtaaaaacaatatcgatgcaagattcattgacgtcgacaccggcctttacattgatattaccggtctagctagcacttctgcccctagtagggattacttgaactcttatattgaagagcggttgcaagaggaacatttggatatcaataatatccctgaatcgaacggtgagaccgctactttgcccgacaaagtagatgatgggttagtcaatatggctacactaaacatcactgagctacgtgattacattaccagcgacgaaaataaaaatcataaaagagtccccactgatactgatttgaaagatcttttgaaaaaggaactggaagagttaccaaagtctaagaccattgaaaacaagttgaatcctaaacaaagatattttctcaacgaaaaacttaaactttacaattgtagaaacaaccattttaactcgttcgaggaactatctcccttaatcaatactgttttccatggtgtgccagcgttgattcctcacagacatacctactgcttgcacaatgaatatcatgtacctgatagatatgcatttgatgcttacaaaaatactgcttatttgcccgaatttagattttggttcgactatgacgggttaaagaaatgcagtaatattaattcatggtatccaaacatccccagtattaattcatggaatccgaacctcttgaaagaaatatcgtctacgaaatttgagtcgaaactttttgattccaacaaagtctctgaatactctttcaaaaacctatccatggatgatgttcgcttaatttataaaaatattccaaaagctggctttatcgaggtatttactaacttgtacaattccttcaatgtcactgcatataggcaaaaggaattggaaattcaatactgccaaaacctgacatttattgaaaaaaagaaattattacatcaattgcgcattaatgttgctcctaagttaagctcccctgcaaaggacccatttctttttggttatgaaaaagctatgtggaaggatttatcaaaatctatgaaccagactacattagatcaagttaccaagattgttcatgaagaatatgtcggaaaaattattgatctgtccgaaagtttgaaatacaggaattttacacttttcaacattacttttgatgaaactggaacaactctagatgataacacagaagattatactcctgctaatactgttgaagtaaatcctgtggattttaaatcaaatttaaactttagtagcaactcctttttggatttaaattcatatggtttagacctttttgcgccaactttatccgacgttaacagaaagggtattcaaatgtttgataaggaccctattattgtatacgaggactatgcttatgccaagttacttgaagaaagaaagcggagggagaagaagaagaaggaggaagaggagaagaagaagaaggaagaagaggaaaagaagaagaaggaagaagaagaaaagatatag

SEQ ID NO: 80444 - DNA, 702 bp, Saccharomyces pastorianus
atgaacaatatacaaaagtctctggcacagtttgactgcgttagaccaggccagggcatttctgaagctttacgtatcactagagaagttattttggcaatgagaatctactacatcggtgtatttcgctctggaggagaaaaggctctagagttgagtgaagttaaagacttgtcacaatttggtttctttgaaaggtctagtgttggccagtttatgactttttttgctgaaacggtcgcttctagaactggtgcaggacaaagacaaagtatagaagaaggcaactatattggccacgtttatgccaggagtgagggcatatgtggtgttttgatcaccgacaaagaatatcctgtcagaccagcatacacactattaaacaaaatattggatgaatatttagtcgcacatcctaaggaagagtgggcagatgtgactgagaccaatgatgcattgaaaatgaagcaactggacacttacattagcaaatatcaagatccttcacaggctgacgctatcatgaaagttcaacaagaactggatgagacgaaaatcgttttgcacaaaacgattgagaatgttttacaaagaggtgaaaagttggataatttggtggacaaatcggagtcattaacggcaagttccaaaatgttttataagcaagctaaaaaatccaattcgtgttgcattatcatgtag

SEQ ID NO: 80445 - DNA, 438 bp, Saccharomyces pastorianus
atgaaattagatagagatagctcagggtctattgataaaaatgaatttatgagcattcctggcgtttcgtcaaaccctcttgctggacgtataatggaggttttcgatgctgataatagtggggacgtggattttcaagagttcatcacaggattatccattttcagtgggcgtgggtccaaggacgaaaagttaagattcgccttcaaaatctacgacattgacaaggacggtttcatatccaatggtgagttgttcatcgtgttgaagattatggtaggttctaatctggacgatgaacagctgcaacagatagtagataggacgatagtggaaaacgatagcgacggcgacggacgtttaagtttcgaggagtttaagaatgctatcgaaaccacagaagtggccaagagtctgacattgcaatacgatgtgtga

SEQ ID NO: 80446 - DNA, 1491 bp, Saccharomyces pastorianus
atgatgttgctactgcatttgtcattaaatatacttggggcgcagctggcttggtactatgctcgattccaatatttttcaaacaacaaacctagtgaagacaccttacagcttaaggaacccgggaatgatatgacggctgatttcatcacaaatagaagattattagtcactgcatctagctctatcggaagatttgtggaactgaagagaaatatacaacaattacgcggtatcagattgagattgaacaagttcaatgatttgttggatgctaataaaggtgatgacgacaaagaaccaagagatgaaaggtgtatagtggaatatgatgattcaaggataaagtttgaaaatattcctttaataacacctgccaatcaagttctagtaccggagctaagttttgatctgaagcatggaaatcatctactaattattgggcccaacggttgcggtaaatcttcattatttcgtattctaggcgggctttggccgataagggcgactcccaataaaaatcatcaatccaagttaattatgccgcgtagaactgtggatagagattgcgcaatattttatttaccccaaaggccatatatgggcaataggtcgacattcagggaacagattatttatccagacagtattgaacaattcaaagaaagatatcacaatgattatgatctaggcgatgcagatttaataaaaatcctgcaattattagatttggaggatttagtcactgaaaatatgtcacttctgctggcgcaaaggacttccaaaaatgattcacagcagttgtcgacggaagacaatcagtcaccatgcgccattaaagttcgtgatgcattcagtatagtaagaaattggtccgaagaattaacaattggtgtccaacaaaggttagctatggcaaggatgtactatcataaacccaagtttgctgtgctcgacgaatgtacatctgcagtagccccagaaatggaacaaaggatgtacgaaaatgcgcaaaattttggtatctcgttaatatcagtttgccacaggacaagtttatggcattttcataactatctgttaaaatttgatggtaaaggcggataccaatttggaccgtttaacccgaaggaaaggttatgtaatgaagaaaaacttcttgaactaaatgccatcttggatcaacaggtgccactttgggagcggaagttgaaagatctgacaattgctaaagaatccaacatcattcgtaaatcagaaactaacctgaatctttttgaaaagatcgaagatccaaaaacgtccaaatctaatgcattgtttaatgcaaataaagggcagcgaatcacatcacctacagggcaggagattagtaagagattaccactgttttcccaaccatctagttcagcatcatcaaatttactaagaaacaataaaagcttgaacaaaaaagttaaaacaaaaaaggaagaaggaaaagagaggtaa

SEQ ID NO: 80447 - DNA, 1167 bp, Saccharomyces pastorianus
atgatctcaatagcttctgcattttatcagaagcatagagtaaatttactgcgttcttcatacataatattgttgctagccacgctttacaattcaaattccagttctagtaacaacaaaactgataagaaggattctgagtcaacggttttagaaaataagaaaattgaagagggaaaagaaaccgcagtagatagagaggaagatgaaagtagcaaagaagagttaacgatagtctccaaacatagcacagattcagaagatggtgcaataataattgataaagaaagcaaaactaatcataaggggggagagcgaaaaggaaaggtagattttttgttcaaacttttgcttcatgataagaagtgcctcattttatttattacacaggctattcttctgaacatcagaacattgctgtctcttcgtgtggctactttagatggtcaattagtgtccacactggtaagagctcaatacgcaaacttcacaaagatattgttggggaaatggatgatccttggaattcccgccagttttattaattcactgatcagttacacgacaaaactttgtgctgtcactattaataggaaagtttcagactttctactctcaaagtatctatctaatcaccatactttctattccgtagcttctgctgaatctgtttcagaaattcaggataatttgacaaaagatatttacacattttcaatgaactcgtcattattactgaatcagctattaaagccaatgctggatttgatcctctgttcattcaaattattaacctcaaacactagtgttatgggtgaaggaactttggcactgggcttaattgtctacgcctccaattcattactaaaattgattcaaccgaatttcactaggttaactatggcaagcgcatctttggaaagttggttcagatctttacactcgaatctacattcaagcaatgaagaaattgcactgctaagagggcaaaagagggaactagaaaacgttgattattcattctaccgtttggtgctatttttaaacagagaaataaaggcaagagctatttatgatgttgctactgcatttgtcattaaatatacttggggcgcagctggcttggtactatgctcgattccaatatttttcaaacaacaaacctag

SEQ ID NO: 80448 - DNA, 1485 bp, Saccharomyces pastorianus
atggattacaatccaatttcctcattaacaccaggcaattcaccagaattcaacaaggcaagcttatctcagattagttttacaaatccattgaactatgggtctggcttaggtttttcctctaattcacaacctcgactaccattgttagacaggctatcgtcagtctctttatctaagagaccggagcgcccacaacaaagcttaccatcactaaggcatctgcaattattacccagtcctcttttacaagaaaacgcagcacgcttccctgatacatcaaaacgtacatctaattggaaaactgatcttacccattggtgtaaggatacaaactatcaagactatgttaaaatacgcgaagaagtggctcatttcaagccattaagtatacccaacttaactaataatcaaaataatgatagtttcaattacggcaaggaattggaatcgactaggtcgtccaaattccattccctgtctaaggaatcatttgatcgtaccaaactaattccttcgattctagaagctaaagatcaatttaaagatctttccaacaatgcatggagtattactcctcccgtcacaccgccaatgagtccaccaaccaatagagccatggagcgcacgacgcttagaggagtagaggcctctttttttgaggggaaatccagcaataacggttcaatattcaatccaattattagtgaaaaattggttcaagaagttaaacatcaaagacaattacgtggaaattcatttcccatgccaaatgccagtcacaaaaagacgaacagtttcaaagctttgcaaataaaaaaattgcttgcgaatagagatattctatcgaacaattccaaatctaatgtaaggaaaccatctaagaacaaaatctcaaagcaagcatcaaatgttttcggtaacactgcaagacaattggtgatgaaactcgacaacgctagttacagttctgtctctgcatcttcatctccatctccctccacaccgacgaaaagtggcaagatgagatcaagatcatcctcacctgtgcgtcccaaggcatacactccaagcccaaggtcacccaattatcatagatttgctctcgactctccccctcaaagccctcgaagatcatcaaattcaagcataacgaaaaagggaagtagaaggtccagtggctcatcacccactcgtcacaccacaagagtgtgcgtgtcgtgtcattcgagtgattcgccctgttggaggccatcgtggtcgccaagaaagcaagatcagctatgtaactcttgtggtcttcgatataaaaaaacacatacaagatgtttgaacgatttatgtcgtaagatccccacaaagggtgaaataaacattatgaaatccaatggaatagacaaagaatttgtccccgaacgcaactgcgaaattgaagggtaccgttgcttattttgtaattacataactgagacagtagagaattga

SEQ ID NO: 80449 - DNA, 309 bp, Saccharomyces pastorianus
atgtcaagcttatacatcaaaacaccactgcatgcattatctgctggtccggattctcatgcaaatagctcctattatgacaatcttttattgccttcattttccaatttatccagtaatatcagcaggaacaatatcacaaccgataacaatataattcagcaagtcctaggaagtattcgtttcattcgctcaatgtgtcgccaattctttccccaatatctttggctaacgaaatacttggaaaaaaatcaaatactgcaccagcatcgccacatcatatggattacaatccaatttcctcattaa

SEQ ID NO: 80450 - DNA, 3141 bp, Saccharomyces pastorianus
atgtgtcaaaatccaatgcaaaaaccagtgccttttgttccagttttggatcgtagattcgagatttttttcaaaaaagattcgttatggcaatctgagcacttggaagccgtcgtcaaccaagatgttcaaagaacatgtatcctacatggacctgttgcagcacaattcactaaagtcatcgatgaaccaattaagagcattatggatggtattcacgatggtcacatcaaaaagttactgcatcaatattacggtgacgatgagtcaaagattccagcagttgagtactttggtggtgaaagccctgtagacgtacaaagtcaagttgattcttcctctgtatctgaagactcagctgtttttaaggcaacatcctctactgatgaagaaagctggtttaaggctttggcgggatccgaaattaactggagacatgcaagtttcttatgttcctttatcactcaagataaaatgtttgtttctaacccaattagaaaagttttcaagccaagccaaggaatggttgttgagatttccaacggcaatacttcttcaaagactgttgtcactctttcagaacctgttcaaggtgaattgaaaccaactgttattttgaagttgttgaaagataacataatccaaatggaaatgattgagaacagaactatggatggtaagcccgtcagcttgccattgttgtacaacttcaacccagataatggttttgctccaatctctgaagttatggaggacagaaaccaaagaattaaggaaatgtactggaaattatggattgatgagcctttcaatttggactttgacccaagagatgtcattaagggcaaagatttcgagatcaccgctaaagaagtttatgactttacacacgctgttggaaacaattgtgaagacttcgtttctagacctgatagaacgatgttggccccaatggactttgctattgttgtcggatggagagccatcatcaaggccattttccctaatacggtcgatggtgacttattgaagttggttcatttgtctaacggctacaagatgattcctggcgctaagccactgcaagttggtgatgttgtttcaactactgctgttattgaatctgtcgtcaaccaacctacaggaaagattgtcgatgtggtaggtacattatcgagaaatggcaagcctgtcatggaagtcacctcctcattcttctacagaggcaactatactgactttgaaaacactttccaaaagactgttgaacctgtttatcaaatgcacatcaaaacttctaaagatatagctgtcttgcgctctaaggagtggttccaattggacgatgaagacttcgatctgttaaacaaaactttgactttcgaaactgaaactgaagttactttcaagaatgctaacatattctcttcagtgaaatgttttggcccaattaaagttgaattgccaaccaaagaaaccgtggagatcggtattgtcgattatgaagccggtgcctctcacggtaaccctgttgttgatttcttgaagagaaacggttccacattggaacaaaaggtcaatctagaaaatcccattccaattgcagtacttgattcgtacactccaagtaccaacgaaccatacgctagaatttctggtgatttgaatccaattcacgtttcacgtcattttgcctcttacgcaaacttgccaggtactatcacgcacggtatgttttcttctgcttccgtccgtgctttgattgaaaactgggctgctgacagtgtttcatccagggtacgtggctacacttgtcaatttgttgacatggttttgcctaacactgctttgaaaacatcgattcaacatgttggtatgatcaatggtagaaaattgataaagtttgaaactagaaatgaagatgacgttgtagttttgactggtgaagccgaaattgaacaacctgttactaccttcgttttcactggtcaaggttcacaagaacaaggtatgggtatggacttatacaaaacttctaaagctgctcaagatgtttggaatagagctgacaaccatttcaaggacacttatggtttctctatcttagacattgtcattaacaacccagctaacttaacaattcacttcggtggtgaaaagggtaagaggatcagagaaaactattctgctatgatctttgagactatcgtggatggaaaattgaagactgaaaaaattttcaaggaaattaatgagcacagtacttcttacacatttagatctgaaaagggtttattgtctgctactcaatttacacaaccagctttaactttgatggaaaaagctgctttcgaagacttgaaatctaaaggtttgatcccagccgatgctacttttgctggtcactctttaggtgagtatgctgctttggcctctttggctgatgttatgtctatcgaatctttagttgaagttgtgttctacagaggtatgactatgcaagttgctgttccaagagatgagctgggcagatccaactatggtatgattgccattaacccaggtagagtcgctgcatcattctctcaagaagctttgcaatatgttattgagagagttggtaagagaaccggctggttggttgaaatcgtcaactacaacgttgaaaaccaacaatatgttgcagctggtgatctaagagctttagacaccgttaccaatgttctaaacttcatcaaattacaaaaaattgatattattgaactacaaaagtccttatctttggaagaagttgaaggtcatttgtttgagatcattgacgaagcttccaagaaatctgctgtcaagcctcgcccacttaaattggagagaggttttgcttgtatcccattagttggtatttctgttcctttccattccacctacttgatgaatggtgttaaaccattcaagagtttcttgaagaagaatatcataaaagaaaatgtgaaggttgctagattggccggaaagtatattccaaacttgactgcaaaaccattccaggttactaaggaatatttccaggacgtttatgatttgactggctccgaacctatcaaggaaatcatcgacaactgggaaaagtatgaacaatcctaa

SEQ ID NO: 80451 - DNA, 2820 bp, Saccharomyces pastorianus
atggacgcttactccacaagaccattaaccctatctcacggttctttagagcacgtgcttctggtaccaaccgcttcatttttcattgcttcgcaattacaagaacaatttaataaaattttgcccgaacccactgaagggtttgctgcagatgacgagcctaccacacctgctgaactagtggggaaattccttggctacgtatcttctctagtcgaaccttccaaggtcggtcaattcgatcaggtcttgaacctttgcttaacagaatttgaaaactgttatttagaagacaatgacattcacgccttggctgctaaactattacaggaaaacgacacaactttagtgaagactaaagaactaattaaaaattatattaccgccagaataatggctaagagaccatttgacaaaaaatccaactctgctctttttagggccgtcggcgagggtaacgcacaattggtagccattttcggtggtcaaggtaacaccgacgactactttgaagaattgcgtgatctatatcaaacttatcatgtcttagtgggagatttaatcaagttctccgctgaaactttaagtgaactgattagaactactttagatgctgaaaaagtctttactcaaggtttaaacatattggaatggttggagaacccttcaaataccccagacaaggactatttactttccattccaatttcatgccccttaattggtgtcattcaattggctcactacgtagttactgccaagcttttgggtttcactccaggtgagttaagatcttacttaaaaggtgctacaggtcactctcaaggtttggttactgctgtcgccatagctgagacggattcctgggaatccttcttcgtctccgtaagaaaggcaattactgtattattcttcatcggtgttcgttgttacgaagcatacccaaacacttccctaccaccatccatcttggaagattccttggaaaacaatgaaggtgttccatctccaatgttgtccatttccaatctaactcaagaacaagttcaagactatgtaaataagactaactctcatttgccagctggtaaacaagttgaaatttctctagtcaatggtgcgaagaatctagtcgtatcgggcccaccacaatcattatatggtttaaacttgaccttaagaaaggccaaggccccatctggactggatcaatcaagaatcccattcagcgaaagaaaattgaagttctccaataggttcttacctgttgcatcaccattccattcccatctattggttccagcttcagatttgattaacaaagacttagtcaaaaacaatgtcagctttaacgctaaagatattcaaatccccgtttacgacacttttgatggttcagatctaagagtcctttcaggttccatttccgagagaatcgtcgactgcatcattagattacctgtcaaatgggaaactactacacaattcaaagccacccacatattagactttggtccaggtggagcttccggtttaggtgttttaacccatcgtaataaagatggtactggtgttcgtgttatcgttgccggtactctcgacattaacccagatgatgattacggattcaagcaagaaatctttgatgttactagtaatggtttgaagaaaaatccaaactggttggaagaataccatccaaaattaattaagaacaaatcaggcaaaatttttgtcgaaacaaaattttctaaattaatcggtagaccacctttattggttcctggtatgacaccatgtactgtttctccagatttcgtagctgctaccacaaatgctggttataccattgagttggccggtggtggttacttttccgcagcaggtatgaccgccgctattgattctgtggtttctcagatagaaaagggtagtaccttcggtatcaacttgatctacgtcaatccatttatgttacaatggggtattccattaatcaaggaactaagaagcaaaggttatccaattcaattcttgaccattggtgctggtgtcccatcattggaagttgctagtgaatacatagagacattaggtttgaagtacttgggtttgaaaccaggttccattgatgctatttcgcaagttataaacattgctaaagcacatccaaacttcccaatagctttacaatggaccggtggtagaggtggtggtcatcattctttcgaagatgctcacactccaatgttacaaatgtactccaagattagaagacatccaaacattatgttgatattcggttctggtttcggttctgctgatgacacttacccatacttaaccggtgaatggtccacaaaatttgattatccaccaatgccattcgatggtttcctatttggttcgagggtcatgattgctaaggaagttaaaacttctcctgatgctaagaagtgtattgctgcttgtactggtgttcctgatgataaatgggaacaaacctacaagaagccaactggtggtattgtcactgttcgctctgaaatgggtgaaccaattcacaaaattgccactcgtggtgttatgctatggaaggaattcgacgaaaccatcttcaacttaccaaagaataagttggtaccaactttggaagcaaagagagattacattatctcaagattgaacgccgatttccaaaaaccatggtttgctaccgtcaacggtcaagcccgtgacctagccacaatgacatacgaagaagttgcaaagagattgggtggaattaatgttcatcagatctaccaactcttggtttga

SEQ ID NO: 80452 - DNA, 180 bp, Saccharomyces pastorianus
agaagaagaacttacagagctcacggtagaatcaacaagtacgaatcttctccatcccacattgaattagttgtcactgaaaaggaagaagctgtcgccaaggctgctgaaaagaaggtcgttagattgacttctagacaaagaggtagaatcgccgcccaaaagcgtattgctgcttaa

SEQ ID NO: 80453 - DNA, 99 bp, Saccharomyces pastorianus
atgatgttatatgatgataatggaatagatagtgagcttcgcgattcagaagctttacggattttttcatctcttgttcattattgtaatgcaggttaa

SEQ ID NO: 80454 - DNA, 363 bp, Saccharomyces pastorianus
atgaccctacttgccacagagcatatcttattgtatcccttgtctttcaagtgttctatctacacaaccatcattagccataattcttgtccccagaggttcaccggtatttttattaatcaaaacgcaagcagtatctccgaatgcaacggtggagccatcctttctgcacatgttacgctgtttagaccttacgacaattgcgtgacaaatatcaccttttttgacacggttggtgttggctgttcccgtaatgttttgagtcaagggctttgctttctgtataacacagactattctgtctccaaccattgcaggactcttgggggaccctttccttattactttaatacattctgctaa

SEQ ID NO: 80455 - DNA, 1755 bp, Saccharomyces pastorianus
atgtcatacttgattggtgtgaactatcctaaaaattcagttggtgagttaccaatagcatatatcgatggaaaagaaagtgacaagcttgccgcattgtacaacaacgcaagaagcattttagagcagtacttagtcaagcaagatgaggtaacagactctcaatttttttataaggaatacttcaagtttgttgaaaagtctcattcacattacttagaagagatagaaaccttaattcagcgtatatctgaaggagaaaactatttggaacaagaagcaatcacccttacagaggaattaatgcagataatattggaaggtttacattatttgacaacctataattggagattcattagaactattgttacatttgggtttgttgggtggatctttttttcttttataatatttttgaaatcattcatattagagaatgtaattgatgaccaaaaagcgtcaccattaagccatgcagtatttggttccataggaattttactaaattggattttgttctaccaacattctccgttcaatttttacatgtaccttcttttcccattatacttttggagctatatttttacaaatagatccgtactacgttcaggtatcaaggaattcttcaaaggtacctctccttggaaaagagttttaataacaatctccattatttcagtttatgagggaattgtatatggatttttccatagatggacgtttacgctaattacaaatatattggcgttttacccgtttatttgtggggtgagagagctatccgtgaatatattgtggatcataactagtgttcttttatctacatttaccttatttgacgctgttaaaatcgaggacttgaaccagatacatctagcagggttattaatcattctcagtgccttttatgctctttacaaaatacattccaggataaattcctacacgcgtgctatatttgccattcaaatttccttggtggctgccatgttggcggttactcatcgttcagttatctctttacagctaagacaagggttaccaagagagtcacaggtcgctggatggataattttttttgtatctctttttgtaatgccaattttacattataggaagcccaacaatgattacaaagtgagattattgatcatttatttaaccttcgcaccatcctttatcattttgactatatcattcgaatctcttttctacttcttgttcactagttacatggtacaatggattgaaattgagaacaaaatcaaagaaatgaagacccaaaaagatgaaaattggttacaagtgctaagagtttcagtaatcgggttctttttacttcaagtcgcattctttggaactggtaacgtcgcttcaatctcttcattttcattggagtctgtttgtagattgttgccaatttttgatcctttcctgatgggcgcattattgatgttgagattgataattccctacgggctattgtccacatgcctaggtatactgaatttgaaactcaacttcaaggactacacaatctcatcattaattatttccatgagtgatattctgtcgttgaattttttctaccttttaagaacggaggggtcgtggttggatattggcataaccatttccaactattgtttggcgatcctatcatctttgttcatgcttattttggaagtactcggtcatgtgttgctaaaaaatgtcatcatacaggataaaaccaaaaaaacacaatag

SEQ ID NO: 80456 - DNA, 642 bp, Saccharomyces pastorianus
atgtggaacaaaaccagaacgacgcttctggctgttggtgtcttatttcatttattttacctatggtctatttttgatatctatttcatttcaccgcttgttcatggtatgagcccatatcaaagtactccaacccctcctgcaaagagattgtttttgattgtcggtgatggtttacgtgcagataccacttttgataaagtcactcatccagtatccggaaaaacagaatttctggcaccttttattagatctttggtaatgaataatgccacctacggtatatcacataccagaatgccaactgaatcccgtcctggtcatgttgctatgattgctgggttttacgaagatgttagtgccgtcacaaaaggttggaagtcaaaccctgtcaatttcgatagttttttcaaccaatctactcatacttattcattcggttcacctgacattttacctatgttcaaagatggcgcttctgacccaaataaagttgacacttggatgtatgatcatactttcgaggattttacgcaatcttccatcgagctggatgcttttgtctttagacacttggatcaattattccacaattccacactgaactcaacattggattatgaaattaggcaagacgcgtaa

SEQ ID NO: 80457 - DNA, 210 bp, Saccharomyces pastorianus
atggggttggtcctagcatctgctctgtttgctaaatttgtcacaccaaagggatccaatgtggtgagaccatacactcctgtgagtgatctttcccagaagggtcacttccagctggtcgtcaagcattatgaaggtggtaaaatgacctcacatttatttggtcttaaaccaaatgacaccgtttctttcaagggtcctattatgtaa

SEQ ID NO: 80458 - DNA, 561 bp, Saccharomyces pastorianus
atggctatgatgtattggagatgcctttcgatgccaaataatgaaagtttggttaatgatctatgtcaaagtaaacttccaatgatctccaatacactggagaagttttcactagaagtgctagagaaactattaatggaattgggtactataagttccatttatttcaagcccgactcaaataggagaaaaggcaaaaagtatgttcaaaatatagttaaaggaaaacatatagaggaattagaaagcatggcaaaaaatgaaatttctagcaaggctaacgatgatgtgctattggattttgatgaaagagatgatgtaacaaatacaaatgcaggaatgctgaatacttcaacaactttaggcgatttggatgatttatttgatttcggaccatctgaggatgccacacaaataaatacaaatgataccaaggctgtacaagggttgaaggagctgaaactaggtggcgactcaaacggtatatcttctggtggtaaaaacaatcccgatgtttcgggcggcaatatagtgtcacaggatctcctcgatttattctga

SEQ ID NO: 80459 - DNA, 1593 bp, Saccharomyces pastorianus
atgccaccattggataaaagaatcaagaagtttctaaaagactccattagaattgcgccaaaaatatccggtaagggtgaactgagtgaattaagaactggtttagtatctcaatacccacagactcggaaagatgcaataaagaaaacgatccagcaaatgacgttgggaaaagatgtctcttcgctgttcccagatgtcttgaaaaacattgccacaattgacgttgaacaaaaaaaactggtttatctttatgtgatgaattatgctgagacgcatcccgaattatgtattcttgccgttaacacattcattactgatgcacaagatccaaatcccttaattcgctgcatggcaatcagaacgatgtcaatgataagagttgacaaaatcctggaatacattgaaacaccactctgccgtaccttgcatgatgataatgcatatgttagaaaaaccgcagtgatatgtgtcgcaaaacttttccaattaaacaaggatttatgcgttgagttgggtgtcgtcgaagatttggtcaatgccctagacgactcaaatcctttagtcattgcaaacgcaacagcagcattaattgaaattcacaatatggatatggatgccgttgatctttcaagtttgatccagtcccacgtttcacaattcttattagctttgaacgaatgtacggaatgggctagaattatcatactaggaactctttcggaatattcggcaaaagattctttagaggcacaagatatcattgatcgagtaactgcgcatttacaacacgttaatccagccgttgttttagctacaataaaggtaatcgtaaggaacttgcctcaaattgaatattcctcgaacagtctgataatgaaaagattatcatctgcttttgtatcactgatgtctacgccgcctgaaatgcaatatgttgctttgaaaaatattaggatcatattggagaaatatccagagctgttaaccaaagaattgagaatattttatgtcaagttcaacgatcctctttacgtcaagttagagaagatcgatatccttgtaagactagtcgatccttccaacttgaaacaatgtactttgttgttgacagaattaaaggaatacgcaatggaatatgaacctgagtttgtttcaagagctattcaagctttgtcccagttgggtattaaatatgcacaagaatcattcgtcagtaaagtcttggatattctcctagaactgttagaaagacaagacacaataaaagacgactgctgtatatcattatgtgatttattaagacattgccccggaaacgataagatggccaaacaagtttgtgcagtatttaatacttggtcaaatccagaggtgttattacaatcagatattgcaaagtgcaactatgtctggttgctaggacagcatcccaacaatttctcagatttggagtcaaaaatcaatatttttatagagaactttgttcaagaggaagctttaacacagatgtctttactaatgacaatagtcagactacatgctactttaacgggtagtatgctacaaagcgtcctagaattggccacataa

SEQ ID NO: 80460 - DNA, 207 bp, Saccharomyces pastorianus
atggaaagcgaaatggatcagagaatacttaaggcattatcccttgctcactacggtattggtgtgataaatttgcataagggacgcttgagggcatctaagaaggaacttaaaaaggctattcgtatttcagagatgaatagatttaatgaactcattgaggaagctcaacgtgaacttaaaaaggttgatggtacgcctatataa

SEQ ID NO: 80461 - DNA, 1077 bp, Saccharomyces pastorianus
atgtggaaataccttcatagatcagtcaaaaatgaagggaccgtagaacggctcactaacctcaacttatttaccaatcaccgtttcaagttttattctacattaaaggaacaaagtttttggagaataccattcaaaagaaggagcaaattacagaaatgggtgttatcgacaggcatcgtaagtttcatcgcttttaacatatggtgggtttattggccacatcatacttttcccaaacccgttgctaaaatattaaggaaggggttacattcagaaattaagaaagaaggtgcgaactaccaaaaaagccttgagtactacctcgaagctttagaagaatgtaaagccgaaaacgtggatctactttcggatgaatataccggtattgaaatcaaaatcggagaaatgtatgagaaattacatatgtataatgatgctacagctttatatggagacatgctgaaaaagttctataatgaactaagcaaaactactgataagtcaacgaagagaaaattctttttgttgaaaagagaccttcaaattttggtaaggttcaatgaaataaataaagactctgaaactaatgcaacgttattgataatgcaccttttattagctcaacgagaatttttggagaactcaccggagttcaaaaatgttctttccaaatcagaacttttaaacaaccaacagcttgactggaagaatttcaagggtctaccatttattggtaaatccaaacctgactaccaaatgcatttaaactctaaaagaaaacaggagttgaagataaaggaacctgaaagcgaacaatgcgttttcatgaaagaacttctgactgcaagagatttatatactcgttactgtctcaatcggaataatctttctggggccttgaatagcaaaataacaacactagaatggatgttactagcggatagtcctctggacgacatcttgcttgcccaggcagagctcggatcgattttttatctaaattcagagaagttcgaaggaagtctatacactattgataatgaaccgtacaaaaatcagaaccttagaacttat

SEQ ID NO: 80462 - DNA, 270 bp, Saccharomyces pastorianus
atgattgagtctttgcgtataggcagcaacctgctagatttagaagttgtccaatttgccattaaatgcgcagatgaggacggaacgaatatcggagaaactgataatatcttcttgcaggagattcttcctgtcaactccgaagaagaatttcagaccttgtcagctgcgtggcactccattttagatggtaagctgagcgccttggacgaagaatttgatgttgtcgctactaaatggcatgacaaatttggtaaattgaaaaactga

SEQ ID NO: 80463 - DNA, 456 bp, Saccharomyces pastorianus
atgagcaaagacaaagatatcaaagtcactcctggaacttgtgaattagttgaacaaatactcgccttactctcccggtatctctcatcttatattcacgtgctgaacaagttcatcagtcatttgcgaagggtagctacgctacgattcgagagaactactttgattaaatttgttaagaaattgagattttacaacgattgtgtgttaagctataatgcatcagagtttatcaatgaaggtaaaaacgaattagatccagaggcggattcgtttgacaaggtaattttaccaatagcctcaatgtttgttaaatgtgttgaaacgtttgacttactgaactattatctaacgcagtcattacaaaaggaaattttatctaaaactttgaacgaggacctaacgctaacagcagagtccatattagccatgacgatacctacaatcatttcgtga

SEQ ID NO: 80464 - DNA, 486 bp, Saccharomyces pastorianus
atggaaaggtttaaacatttctatgcagcatttcaagcactttgttacattttctgtttcagacataacatcttcagagatacagatggtaactgggaatgtgaactggacaaattctttcaaagaatggtcatttcaaaatttaacccattaaagttttgtaatgaaaatgtcatgttgatgtttgctcgtattgcccaacaagaaagcgtcgcgtactgtttcagcataattgaaaataacaacaatgaaagattgaggggaatcatcggcaaagctgatagcgacaagaaggaaaattccgcacaagcaaataccacatcgtcttcttggtctttggccactcgacaacaatttattgacttacagagttacttcccatatgatcctttgtttctgaaaaactataaaattttaatgaaggaatactacatagagtggagtgaagcaagcggggaatacgaaagtgatgggtcggatgactaa

SEQ ID NO: 80465 - DNA, 1344 bp, Saccharomyces pastorianus
atgtcagcgtatgaggttgagttgtatataagagcgaaagagtttcaaatgatgagcccgccaatggtgaaggactttggcacgtatttggtcagtgacgaccagcagtttattaaggatcgtggcattcaaagctattttttgctaccaagcattaatgataatatagacgaatatggaaactttctacccagttttattgtccaggataaactagatattcaattttcaaagttcaataagagctcatccactgtaatgaactatcccctacctcacaataggaaggacgcagtgtatttcgaagttaaaattttcagacatattcaaaagtccaatagtatattcagtataggtttgactactgtaccatatccttatttcagggtaccgggcatggccaaatactccattgcatacgaatccacaggtaaactgaggataaataatcccttcactgccagcacattattaccaaaattagaagacggtgacacggtaggattcggttacagatataaaacaggtacaatcttcattacacataatgggaaaaaattaatggatgtaacacaaaatattggcattgatcttttcattggaattggcgcgtttaatgccgcatatacaagaacatatacgagggatggtctattggaagacccggataatgttagcttccgtgaagctctctctgaaggcaaagatattgaagtcgccaaagatcttcaaagagttcacgatccacatgatgaaagtgatgaaatgacgtcagatgaggttgaattacatgttaatttgggccaagttgggttcgtctttatagaagccaatgtgaaaaaatatgcgtttgggagtgtttatggccaaattggaattcctcctgcgtataatggaaccgagatcaagaaggatactattttacagaaaggagaagaattgccaccaagatatgctgacaccgataatttctttggtagtatgaaggtaaaagaagggtcatcctctagaataacggcgcaaactagtaagcccctgtggtctgttgggacgtatgaaagaatctcttctaactttgacagagaaaataatgtttaccacgacagtcttgaaaccgacgataacaacaccgataacaatgttaataacaacgatgagaacgctggttgcaatgaaaattcgccattattggaagatgatggcaataaaagaccggaaaattcaaataccccccgtgaagtatcagatggagctatcaataagaaccctagaaataaatctactaaaaaacgtcaaagaaacagaggcaaatcttctaaaaagaagaacagatcgagaaaataa

SEQ ID NO: 80466 - DNA, 426 bp, Saccharomyces pastorianus
atgtatgtcacttttaatgaggctttggatagttcttttggtaatctagagagtccgaatcatgacttcaaagtaggtgaccctaacatggtaccaactccccctatggattcagattctgcagcaattagtttggctttcttaataagtctttctattacgtttgcaatattaatgctcatcttggtagtaatagcggcatatgttaccttttgtggtgatgatgaatcagaatacgatgaagagaacgccttaggtacacgaacttcaggaactctgcactctttgtttggtaaaaaacatagtggcatcttgttggattcgagttttgcatccctggcgggtttgatgatgagatcgttcttcaggaaagagaacttgaagaattaccaaagatgtcagcgtatgaggttgagttgtatataa

SEQ ID NO: 80467 - DNA, 156 bp, Saccharomyces pastorianus
agaaagtttgtactggtaattttcaacgcgggtctgttcttatctttttttctgtgttacacaattagacaagtatattctgagatagtaatcacatctacgcttcgaattcatccatacccacagcagctgttaggttataccgacaatggatga

SEQ ID NO: 80468 - DNA, 231 bp, Saccharomyces pastorianus
atgctgttgccccatttcatagaaactacttgcttggtttatagatgtttcgcgttgcgttacagaataaggcagccttttttttttttagattttcatttttcacatactgatggattagcagacgaaaagggtaaagttaaatacattccagtaaatgaactaagaaggctgagcacaccatcctcttatggaacgttattcctaagcatagaaagtttttacttgtaa

SEQ ID NO: 80469 - DNA, 714 bp, Saccharomyces pastorianus
atgcctgatcatgtccctctatacattgataaaaataatagtgcactctaccccaaagaaccccccgccaggaagtctagttttgagaaggaaagacctgcgaaggataacctaggatttagaagcatgtctttgagagagccacttatcacaaagaatgctacagccacagcagcagagaacctggatgtggaagaaaagaaggaaaaaggaggtcatgtctcaagaaaatcatggacttttggtttgccctctccgctgaaaaggagaacaagtcattctactcataccacgaacgaaacagagatagttaatcccatgacgaacttcaaaaataagaccaacgaaaacgatatgccaatattagcaaataaaaagagctgcaacaacgatgattcttccccttacactgcatcatccatgaacactaatgacgtaagcgaagctggtacagaaggccaccggttttcattattcggaaataaaagccaattgtcaaataggaacatatctggtggaacagccactttggagtcatcaaatcctgacctgcctacagccttaccattaagcgttccggtgactatcattgataaaaatggagagatacacaagcttcataacgatgatgcagctataaaagataagtcgcatgaccgtcacggtcacagtaaattcggtaggaaactgaaaaaaatttttggcaggaaatga

SEQ ID NO: 80470 - DNA, 2787 bp, Saccharomyces pastorianus
atgatccaagaaagtagtccagatgccttagcagcagcagcagcaattggaaatgcgctcagttataatgggaggaccgttgacaagagtaaaataccgcaatacaatcagagttttacctctcgaactacgtcaatcgcagggattaataggtatacaatgctcttgaattctaggactaactcaaggatgctcttaatgaatggtaacgttcgccaatactctaagcgcacgtcgagtttgccaaaccaaggacataagaatacctctaataattcggcggggagaaggcaacacagggctcacgaggatgcagaaaccacgtttcgagaatttggaggcaagcagtcatcgaaggttttaaacatttcaagttcgaatggtcagaatagtaaatcaaggaccacatcacttgggaactcaggcagcacaataaggacgataaaaaaatacataccaggccctagggggttaatggctgtggaagtacccatggaagtagagcctcctagatacagtctgagcaaccgctcaaaccaacgaggtggtagagcatattctttgcctactcgaaacaacaaaactagtctaatgcataggaataaaactactaagaaagcaggatcacaagagaaaaaaagtgaaagcggcggtaaatcaaaaaacgattatcatggcaaagtattatctaaaatgcatactacatcattaaagcaacggcataacaatgttccattaataccaacaactatgaacgaggaaacggaacaagaactgcaagaggatcttcatgatcctttagaatttaaacccatgattatatccgatgacgaaaactcttttattgaacccagcgttctcgatcgtagcatacccaaaaaagataaaagtggtctcagtggacgtgagaaaaaggaagaaattgaaacattgcttaaagaggttcatagcttggaggaaaaaatatcaaatatcgaaatagcaaaattgaacgaagaagaaagggaaaaaagcttaattttggaattgcgaaaagttaagctagatgaagaacggagaatggagttattgaaaagagagctaaatatagttaaggagaatgccgaccttgaagcccaagaattaaaactaattgaaagcaaaagaaaacaacactttcacaaagaacaggaagtagcatccgaggtcaaatcgatcacgattcgtcaacctacttcatcagaacctaagcctgcctatgtacctccggaagacgtggagaaagagccatcaactctctccaatcaaactcagaatattgaaaatgcagagaatatcgattctgttgatgccgaaggaaatttagtagatcctattcttctcggttctttaaacaattctaacttccacatgaattcagataacgaagtgaggtgcattgcagattcaaacagtctcactggcagcgaattatccgattataattatatagaaggctcggcaactgatcttcgcgctactgcaaagacaagtgtggagtctgaaataggcggaaatcaggttggactaaaaattccgcaagatgatgatagtgaaaaacaggaagaacgtacaaagggaaaaaagtcaggcctcgtcgatacaaattgctttttagtccaaaaagaagatcaagaagaggcgctttccgataatgaaccggaaagttctgaaaaattccctagcacttctgggatcgagaacgttaaactggaggatgagactggtagtgttatggacaaaaataatggacccaacaatgacaaggacgatgatgatgacaaagacaatgataatgacgatgatgatgacaaggacgatgatgttaacgatgatgacaaggatgaaaatgttgacgatgatgaaaatgttgacgatgatgatgacgatgatgatgaatatcatgattcttatgacgtgataatgagagatccggttcaaatagaacaagatatatctgacgtgccttcattaaaacacccttcagaatattctaccgagacagaagataataaaaagaaggaacaaaattctgaaaatgcagaagttagtcagtccggaacaaacatggccaagtatttacgtggtgctaatccttacctcactaacacaagttcagacactttcagcctagattccgaaaacgtgaactccaagtcctccacggataccacaagagttgcacctgaccttttgaaaagctcactacaaccacaacttagatctgatttgaaacaatcagccgttccatcaagtacttcctcgtccatttattcgatagaaacgtctccaaatattgattcctctacagggaaaactgcttccaatacgaaaacgaacagccatggccctccgacgagtatttcaaaacagaaatacgatcaatctagttctcatcaaatacccgtgatgtctcccaagcgtctcgacgataaaagaaaaatcaccaatcgttcgtgcctaagaactctacgtggtagttcaaatgaggctactctttcgcataatatagtatatccagcttctgactcatcttcatcccctccatatcatagcaagaagccatcaaatcctccatcatctggcaacttggcttcacacgaggcgtccaagtgttttccaaaagctcctcaggcgagcacaacatcgagacgatgcctgatcatgtccctctatacattgataaaaataatagtgcactctaccccaaagaaccccccgccaggaagtctagttttgagaaggaaagacctgcgaaggataacctag

SEQ ID NO: 80471 - DNA, 654 bp, Saccharomyces pastorianus
  modified_base (65)..(150): a, c, g, t, unknown, or other
atgcatgccatcttaagctctgctgtgctcttctcgttaaggaaaaaatgcgatggtatatatannnnnnnnnnnnnnnnnnnnnnnnnnnnnnnnnnnnnnnnnnnnnnnnnnnnnnnnnnnnnnnnnnnnnnnnnnnnnnnnnnnnnnggtcctcccttctttttacctgtttttaatctaccctcaaatccggctcttttctttggtacggcactaccgacatactttcttttcatcttttcttgcttatttctctttttacccttgttgtctttcctaatcctcaggttctcttctcttctcttttgtctttcagatatcgtgtcttccacaaccctcttacgttcgctccattcaatcgcagactttctcttttgtgcttcctttctctttatagctttgcgaagtagtttttcgtcatctctaatcttaattccttctgcttgtaacatagccttttgccatttttccttttccttctgcttgatttgttctagttcgtctttcgtctccatcttattcttcttggcttctaataactttaagtgtgattttacatcattcttagccggacccttcgttctaccagcttttcttaacctttgtaaatctgaagtggcccttgcaccatcatcgaatatgatattttga

SEQ ID NO: 80472 - DNA, 927 bp, Saccharomyces pastorianus
atgagcaacattgctcgtccattcctttctttcaaaggtttgattccatacaacaagaaagacgttgatgcttgttttgttaaaatcgacaacctagctgctgtcttcgatgctagattgagagactacacctttgttgctaccgaaaacatttctctaggtgaccttcatgccgctggttcttgggcttttggtttggccactattttgggccctgaatggagagctaagcaccctcatttgatgagatggttcaacactgttgctgcttctccaatcgtgaagactccatttgctgaagtcaaattggctgaaaaggctctaacctacactccaccaaagaagcaaaaggctgagaagccaaaggccgaaaagccaaaggctgaaaagaagaaggacgaagctaagccagcagatgatgctgctccagctaaaaagccaaagcacccattggaagctttaggaaagtccacatttgtcttggatgactggaagagaaagtactccaacgacgacaccagaccagttgctttgccatggttctgggaacactacaaccctgaagaatactccatctggaaggttggttacaagtacaacgacgaacttaccttgactttcatgtccaacaacttggtcggtggttttttcaacagattgtccgcttctactaagtacatgttcggttgtttagttgtctatggtgaaaacaacaataacggtattgttggtgccgttatggtcagaggccaagatttcgctccagcctttgatgtcgctccagactgggaatcttacgaatacaccaagttggacccaaccaaggaagaagacaaagaatttgtcaacaacatgtgggcttgggataagcctgttgttgtcaatggcgaagataaggaaattgttgacggtaaggttttgaaataa

SEQ ID NO: 80473 - DNA, 228 bp, Saccharomyces pastorianus
atgtcccaaggtactttatacattaatagatctccaagaaactacgcttctgaagctttgatttcttactttaaactagatgtcaagatcgctgatctagaacaatctagcgagtttgcttctttgttcccattgaagcaagcccctgcatttttgggtccaaagggcctaaagctaactgaagctttggctattcaattttattgtatgttccatattttattttaa

SEQ ID NO: 80474 - DNA, 450 bp, Saccharomyces pastorianus
atgaacgttaggctactagaacaaattcagcttcaagaaagagagattcaagagcttttaactactaacgccatcttaaagggtgaactagaaactcacactaaacttactgaaacacgcagtgaaagaataaaatctttggaaagttctgtcaaagagctctctcttaataaatctacaatcccatctcctagaagagggtctatgagctcgtcatcaggaaatactatgttgcatatcgaggaaggttctgaaatatcaaatagcccttggtcagccaatacttcctcaaaacctttaggatggggcgcgagaaaggtttcttctagcagtatagcaaccactggatcacaggagtcttttgtggcaagaccgtttaagaagggattaaacctccattcgataaaagtcacttcgagtactccaaaaagcccctcttctggaagctga

SEQ ID NO: 80475 - DNA, 438 bp, Saccharomyces pastorianus
atgccggttgaggtcagagatgaatggctgcaggaccaatttgatcgtaggatcgttgtatcagttcagccaatatacatatcagatgaagatttcgatccactacaatacggtattttactatacatcactaagggttcaaaagtgtttaagcctactaaggagcaactggctttagacgatgcaggtataacaaatgatcagtggtattatgttgcattatctatccctactgtcgtggtggtatttttcgtcttcatgtactttttcttatatgtcaacgggaaaaacagagatttcacagatgttactagaaaagctttaaacaagaaacgccgtgttttgggtaagttctcggagatgaagaaattcaaaaacatgaaaaatcacaagtacaccgaattgccatcttataagaaaaccagtaaacaaaattag

SEQ ID NO: 80476 - DNA, 186 bp, Saccharomyces pastorianus
atggtatctactgatatgggccaatatggcattgatcattttaaagaggagaatatagacatcagcggcgtaaatattatcacaccagaagaaagtgcctctgcgctaattgatgtcttccgaaaaattttaccagaagataatggaaagttcttcaactatgacggcagcgaaggcgtcttttag

SEQ ID NO: 80477 - DNA, 267 bp, Saccharomyces pastorianus
atgacgcctgatgtcaaatgcttttggctcccagtgaaattgccacacttccttcttctttccgaactttatagtatcatcgaaaaatacaagttggcaaaggtctgttacaatcgcggaacgtacgatgttcatacggtttcagcgaagagtcttgtagtatccggaagcatgcctaccggcattattataggtacttcatcggccttggactatgtaggggtacaagtaaataggcaacttgaaatggatgtccctattgaatga

SEQ ID NO: 80478 - DNA, 159 bp, Saccharomyces pastorianus
atgacatgggagggtacatatgagcgccttttttttctcgctttgggcagctcacatcatgttccctcactagctaataatataatgaattttttagaaggagcacgattatataaaaaaataccacttatgttgctacccttatatacgaatttataa

SEQ ID NO: 80479 - DNA, 708 bp, Saccharomyces pastorianus
atgcctccatattacacaaaggatgaacggaacctgattttcgcagcttttgttctcggcagcattggtgaactagcccttttattctgttccatcttctcaaccgccctgtaccatcgcgttcacattgctatggtctctgttttcgtcgtcttcatgttcctatccacttgctgcttgattgcagagtatttcctcatgggaaggcactatgcctcagtccaccccctagccagccctcatttcaatcctcaatcatctgaaaaaagctttaaccaagattataacactgtggatgagctgccttggtataaatggaaaggccatgtatggaataaatttaccatcagtgcaactctaaaagttatatggttaactctcgcagttgtatgggccatttgttttggtgctatcaatgatagatctaagagtgcttgtttcgaatggttgctagcattttggtttggtatcatatttatgattctttccgccgacttttatttaggtggaagatacagacaatcccgctatttcaaccacgtggaatcattttcgggttattacaagtatgacaaggcgctaggcctctaccacagtgaagacgttttgccttcggacgataacgccggcgtgattgccacagaaacagcatcttcaaatatttacaataattcctcttccaacgaatctattcaagtagtcgtatga

SEQ ID NO: 80480 - DNA, 354 bp, Saccharomyces pastorianus
atgattcaatttaaaagtccaggtaactggctgttcatagtaccctggattgccttcattccatggtatggtatgctgatagccatgcttatttgctgggccagtcaaggccatcccatatattggttcatgcactcggagcaattccctgtgtacatttcagatataggtgccactaatttaaggccactgtttatatcgtgcgccggctggcagggtctaggctatgtaatcactgttgcccttgagttttttcaaagatccggctatctgcctttccaactgaaaaaaaagacccttctatctctgattccacatcttatgctgaaaaattgcacagcggtaaatacttaa

SEQ ID NO: 80481 - DNA, 690 bp, Saccharomyces pastorianus
atgagattccccaaggtcaaggatcccatggtagatgacgaccctgtctccgaaaattatgatcagataaatgtaccaaaacacagagcaccggatgctacaggtaatcctcgtacaactaacaaagtctccaatacttcagaccaagatagcagactaaaagccattgaaagaaccctctcggtcctcacaaattatgttatgaggtcagaagacggtaataacgacaggatgtcacccttaccttctcctttaaatacgatatcgccaataaataatcgtctgaattttcaagagcgaaagagatataatccaaccgttaaggtaaatccgtctgatgacgatatcatgatgtatgaaagtgcagagctgaagcgtgtcgaagaagaaatagaggagctaaagagaaaaatacttgttaggaaaaaacatgacttaagaaaattgtctttaaataaccaactccaagagctgcaaagcatgatggacggtgatgacaatataaaacttgacaatgtttcgaagcataatcatgctacgcatcgtcattcttcccaatccagtcgcgattactcaccctcttcggatgcttgcttggagtgttctaatgacttatacgagaaaaatagagtcaagcctgaaaataatatgtcagaaacattcgcaactcccactcccaataatcgatga

SEQ ID NO: 80482 - DNA, 444 bp, Saccharomyces pastorianus
atgtacacttccagagcgcagttggattctgttcgaatgaagatagatgaagcaatcagaatgaacactttgtcaaatcaaatggctgacagtgcgggcttaatgagggaggtaaattcattggttagactacctcaattgagaaatacgatgattgaattagaaaaggaacttatgaaatctgggattataagtgaaatggtggatgataccatggagagtgttggggacgtaggggaagagatggacgaagctgttgatgaagaagttaataagatagttgaacaatacacaaacgagaaattcaagaatgttgaccaagtgccaaccgtagaattagcagccaatgaagaagagcaagaaattccggatgaaaaagttgatgaggaagcagataggatggtaaatgaaatgcgtgaaaggctgagagctttgcaaaactag

SEQ ID NO: 80483 - DNA, 189 bp, Saccharomyces pastorianus
atggattatataaaaaaagccatatgggggccagaccctaaggagcaacagaggagaatcagatcggtcctgaggaaaaatggtcgaaatatagacaaatcgttgcgggaactcacgttttgcaaaataaaacccagcagcttatcaagaaatctgctaagaagtacgatgttaggacagttcgactat

SEQ ID NO: 80484 - DNA, 522 bp, Saccharomyces pastorianus
atgttcaaatcagtggctaaattggggaagtctccgattttttacttaaattctcagagattaattcatattaagactttaacaactccaaatgaaaatgctttaaaatttctctccacagatggcgagatgctacagacgcgtggctccaagagtatagttattaagaacactgatgaaaacctcatcaaccattccaagttagcacagcaaatttttttgcagtgtccaggagtggagtctttaatgataggtgatgattttctcactattaataaagacagaatggtccattggaatagtatcaagcctgaaattatagatttgttaaccaagcaacttgcttacgatgaagatgttatatccaaagaattccatgctgtccaagaagaagaaggagaaggtggctacaaaataaatatgcccaaatttgaacttaccgaagaagatgaagaggtcagcgaattgattgaagagctgatagatacaagaataagaccagccatcttggaggacgcgtga

SEQ ID NO: 80485 - DNA, 1710 bp, Saccharomyces pastorianus
atgacaacaacaaagctgggttcactacagccagggcaagggatgatgctgaaaaaacaagacgtgattcacataatgaagtacaggatactttggaagtgcaaagcgtttttattgccgccctcaatgaatgtttccaaaaaatcgtggatattcatcccaaattcagagaaaacaacgaccaaatttcgccgaagatcaaagtcatatattagatccacttttattcttttaaattacattttggcatttgttggatacgataactcatttgtacttggaatgtcggtgacgatttttaacgaatttaaattatacaaacttctattatttccggagccggatgtaaatgatgtgaaggctccagttgatgaagaggctaacactggtaatgggaatacaaaaacgtccgaatttgaaattggttctgaaagtgctgggcatatgaatccatccaattcaccaaattccatggacgaaaacactagtcactattcagtgttgtttaaaagattatacgttttgctttcagtgtttgattctttacaaagctgtgcattcggtggtcccaagctattaaacatttccatccaaggttctacagaaagatttttttctaatgatttgggctcaaaatggtgcctggaacaaagccaattgagactgaaaagcgtcttgcaaagcttgaaattgggtgaattgatgagtgagcttaccaggaatagaatatcaatgaacggcaataggaagcctgggttcgatattacgaactcgtcttcactcttgtcggaatatgtcgaaactcaacctctatccgtagcacagttattttgcaaactattaattggcaaacacaatttcatcaattgcctattatcattatacgattcagaagcaggagtctactcagatttgacattggatttgagttcgaaaatagcagactctctgtgctcattgatatcaataattttgcaagtattgacgttgatattaagactgaatcctacgaacagtattgattttaattatagaccaccgaacccacccgctaataatccgacagtgcaagagggcccatctgctatgggctcgtctccagtcgctgggaaccttaacgctgcacctccatcggaggggaatccagatttttacaagaaattactaggcctgaaacaagacactggcactatcctttcagacctttgccgggggataatttccccctttgctattgctatcctgcacgaggtctacaacatcactgaactggtcaagcagatgcctacatcactcattagcattatgatgacggcaactacaacgcagaatactcaggacaccaagaagtcgcaggacctggtcatgaagctgtcaaactcgatgaatgaagtagttcaaatcaccagcgtgctgacaatgatcaagccattcaagatcttcgagcacgagcttaataagcccataatgtccctgacaggaggactttcgtccacgaccagaaacgacgtcatgtggccaaagtcgggccaaggcctccgcgagtcatcagtcatgaagacattgcttgatgaacgccgtacttctggcacacaaccgacaacggcgccagtagtcgcagaggaatccaggcttgagaacgttgccctggaaaatttcgttagtatcggctggaagctgttggacgattccgagttaggctggtattga

SEQ ID NO: 80486 - DNA, 963 bp, Saccharomyces pastorianus
atgaacgagctgaacactgtttcgactaactccagtgactccaccaagaacggtggtacatccaatagtcccgacgatatggactccgcagcagcagcaagtcacgcaataaagaaaagaacaaaggcctcccgggcctgcgatcagtgtcgtaaaaagaagattaaatgtgactacaaagatgaaaagggggtctgctcaaactgccaaaggaatggagaccgttgtagttttgatagggttcctttgaaaagaggaccctcgaaaggctatacgaggagcaccagccatccaaggactaacgaaatacaagaccacaataactcaaggtcgtataatacgtttgataatagtaacaataccctgaataataatacgggcaatagcggcgacaacggtataaacagtaacacagttccaagtaccccttcgagatttaattcagttttattgcccccgctgacacagtacattccccaggctggtggcattcctcctagtttccaaaatccagcgatacaatcaactatgcccgcgggtaatattggccaacagcagttttggaaagtgccctaccatgagtttcaacaccaaagaaaaggatctatcgattctttgcaaagtgatatatcggtaagaacattaaatcccaacgagcagttgtcttataacaccgttcaacagtctcccataacgaataaacatactaatgattctggaaatgcaaacggaagtgtcaccggctcaggcagtgcctctagtagtggtggttattggtcctttataagaacttctggtttactagctcctactgatgatcataatggggaacagacaagaagatcaagttccataccttctttgctacgaaatacttcaaactctcttttactaggtggccagactcagcttcccccaactcagaaacaatcgcagccacaagcacaccaaacaaaagttgca

SEQ ID NO: 80487 - DNA, 507 bp, Saccharomyces pastorianus
atgaccacttcttcaactatcgcctatggacagatatccgatgtggatctaatagacacctactatgagttcatacatgtaggatttccgatcatacctttaaacaaaacgaccttgaccagtgacttattgttggttaacacacagccaatttccaatatacacgaagtcaattcatatgttattttgtggtttagaaattcattggaattgttagttcgtgttgctctgaaacaaaagccaggtggcaagtttttcgataatattgttggcgtggctttgtcgccaagcaatgacaacaacaaagctgggttcactacagccagggcaagggatgatgctgaaaaaacaagacgtgattcacataatgaagtacaggatactttggaagtgcaaagcgtttttattgccgccctcaatgaatgtttccaaaaaatcgtggatattcatcccaaattcagagaaaacaacgaccaaatttcgccgaagatcaaagtcatatattag

SEQ ID NO: 80488 - DNA, 1365 bp, Saccharomyces pastorianus
atgaccatgaaagacgtacaggattcttataataatgccaactttaaatgtgagtatttgatttttcttcagttggaaccatggaatcaatacacaagagatcagatcaagttaatagatgatgaattgaattggcccctggggcgtccggcaaatctgtctagtttaccgcccataaatgttgtctctggattactgtattctccagactgtggcgtacgattagggcttcataacgtaaagggtacacggtacgaattaaaaataatgtcgatcagaaaacatctattgttcggtattgcattatttgcagcccagatatacttattgcttactcagatgcatcatacaaataccccctccatggtcaacaaaatctcattctattgtttctcaatgataaacttagtcgatggttccttggccactttgtactttgttgcagctagtgtcgttcccgaattgtacttgcccctagttataagtgctttttcgtgctttatcttggcatctatttttgaaatacgctacttaatttcaatttacgcttcacaggttaacgaacagaatgttgggattatcaacctcctgcgtggtaacactggcacatatgatgagaataggccaagacccgcattcattcccgatgaagggtctatcggtggctcgttatatggtaggtttttctttatgctaatcattttcacatttttgatattgagttcaacttcatggccccgtcagctaaggatggtatttgagtatatcctaatcttcatattaaactcatattggatccctcaaattttccgtaacgctgttaaaggtattccttcaagaagagaaagagcaagatctagcattggaggaaatagaagtcaaaacaaaatgccattactgtggagttttgtaattggtacaacaataattagaagcttgcccgttgtgtatgttttcacttactcctctaatgtgttcaggcaccataaagatgttcatttcgtcgtatttttatcattgtggctactgtttcaaattagtatactgtattctcaagatgtattgggatcgcgctggttcttgcctaagcacacaatacctgatggatattcgtatttcaagcccctttcaaacgagtatatatcggagcatggtggtggaactgctgaacataccgttgattgcgcgatatgtatgtctgatgttccaatttacatagaggaaattccagaaactcataaggtggatcagcactcttacatggtcacgccttgtaatcacgtatttcatacttcgtgtctagaaaactggatgagttataagttacaatgtcctgtgtgtaggtcaccgttacctccgttgtag

SEQ ID NO: 80489 - DNA, 942 bp, Saccharomyces pastorianus
atggaaatcgatggcaacactctggtgttcataatagtgatccttttcctatttttctcctcaccgggtggtgatggtgtgtcttctcaatatgagttcaatcaactccagagactcaagcagcagttccgaagagagcacaatacgttcgtcaatatgacatatacagatagttttcgaaatattaccgggcttaaactcagctaccaagacatgctgaataatcctctccaaaatgccacttacccactaccaggaaaagattatgatcgatggtttcccaatcaaaactacatggttttgcccaacgatgtcatagaggccataaatactgaagtctggaatacttcgaatgatgacgcttccaaccttttccctcccaatattacaagcaccctgttaggtaaaatcgaccttgtatcaaataacaagtacgaaaagataaggatgcctgtacccagattctatgagccggcaactgatttttcagaggatattcctcctgaaggtgagacgtactggtctgagtggccttcgtatggcgaacttcataatgtgagttttcagcatggcgaaatagctattcaaatttctcatatgagcaatcttcaggacaataataattacttaaggagaaatttcataaataagaaaaatgaccgttggaagttgttaaatcttcagattgatttctcagataaggctgaaaaggaaaagcattccatatactcgaaggctgtatatgacattcaacgtggtagaattctttctatttctcagagttctacatttcattcattgttcgcccttcctcattacatgtccttccagaatgattatcctgggaacatattcatgatgtcaagaactcgtgaacaatttgcaattcaccgataccagatttctgacctaaagacgtcagaggttatatatgccaattaa

SEQ ID NO: 80490 - DNA, 156 bp, Saccharomyces pastorianus
atggtgtccaggccgggtagcaacccaggtctcgagtcgccctctcttagtggcgacaattcggctagttggtccactgcagcggagatcatcttgtctgtgatagtggtggcacgcgatagtacggcacctaaaccgatacctgggaaagagtaa

SEQ ID NO: 80491 - DNA, 696 bp, Saccharomyces pastorianus
atggaccttttgttcaatgatgatactgataccgtagtatcttccggcggaagtaccatagagggacaacaacagctagactacaaatatttaggagagctattatttaacctatccattaatattgaaaactctaacaacaacactgcccctaaagaatatcgattggaggaaataacccctcaatcaattgatgaaatgcgacagatcgatgataagttcaaggatgtactcaagtatctcatatcagacaacggcgattccaaaaagaacattcatgatcttactagtcacttttatgataagatgttcatggtcctggaatcgtcacaaacctatacagaatacatggagtctgtcttatcaagagaactagaaaatggcagattatttagactggtcaacaagctaaattgcatttttggtagaatcgaatcaagaatagacataaattggtccgaatctgggactaaattccccattatactattttatgactacgtattccatcaagtggattcgaatgggaaaccaataatggatttaactcatgtcctaagatgtttgaacaaattagacgctggtattcaagaaaagttaatgttggtaacgcccgatgagttaaactgtattattatatcctataaggagttgaaggacttgatagaatccacctttcgatccatcacccaataa

SEQ ID NO: 80492 - DNA, 1005 bp, Saccharomyces pastorianus
atggacaaaatcaatcctgattgggcgaaggatattccgtgcagaaatatcactatttatggctactgcaaaaaggagaaagaaggttgccctttcaaacacagcgataacactaccgctactaccataaatgacgttcctcctccaatagatgtgggtgaggctacaactccaaccatgacatcagttcctaagttcaatgctaaagtatccgcaagtttcactccgatgacagtcggtagtgactccttaaccactgtgacgaataccacctccgctgctacaaatgctactggcaatatcgccatggcagctacctctgctactgcttctacagttaatccgatgattaatccgatagttaatagctcgttagtgaataacaataacaataatagtaatataagcatatcaataccaactaccgcttcgagttccaattacgaccccttcaatgcccccattttcactccgtcttcaacctcctcaattcacactaatgcaaatgcacattcttttccatttccctccattgcaaattctggtggcataaatataaacgccactgatgataatagtaacaatatgagtatggctaataatgtgccacctcctatgcaaccgccacccatagagagtagtaatcttaagtacccacgtatttatccgcctcctcacagtcttctacagtatcacctatatgcacctgaacagccatcatcattgaaatcattattaaagcctaatgaaaggtctgcagatcagcttttcattccaaacaatattagagaagatttaaccaagaaaaacttatcgattttgcaggttttcccctcttcaggtaaagttataccaagtattgtacaagattattttaatttggttccattgaacttcaataataacgattttttaaataaaactacgctcttcaaagttttttccaattatgacggtaaagcctacgttttgaagaggcttcctaacatcgataagtcaatgaat

SEQ ID NO: 80493 - DNA, 531 bp, Saccharomyces pastorianus
atgcatattgaaacacatattttaccattcgataataaggaatacctttctgttggtattagcgatggtaatgttcatttctatccttgtgagaagttattcgaaaaagttgaagaaaatgaaaagcaggaagatgatgacgacaaggagggtatcaaccccgccttttctttattgggtcacacaaaccgtattaaagatttcaagttttatacgaatgaatttggtacctacctagtcaccattggttctgatggtaaaattgtcgtatgggatatgtctacaaaagaacaagtagcagtctacgactgtggcgaaaggctaaattgcttaacgctatgcgatgaaagcattgagaaatacaacacaatgaagaagagggatgctgaaacagctgatataggtgaccaaagtgaggtggaaagtgataccgaagaattaaagaagataatgtttggtgagaagaagaaactcaataaaaagaagcggaagcaattgaagaagagtaaagtatcagtagaacttgaataa

SEQ ID NO: 80494 - DNA, 549 bp, Saccharomyces pastorianus
atggtatctgatgtgatgatgtcctacaataagagacaacaagatgacaataagaaagaaattgatatggaaatatactatggagaattgagttgggttttaacaaccatttgtaagggaattaaaacggatgaagattacaagatgttagagaagaaaggtgtatttgagtggttgttaaacttgatcaatatgccatacttgaaagaaagattacgcgaactaatctattttattttttacaaagtccaaagggtagcagatgatggtggtttgaatttaattagcagaaacggtattgtgtcgtttttcgaggttttgaacaataacatcaaatctagactaccacaggacgatatactgtacaacattggtactttacggaacgaaaacagaggtacattaaatactactttgaggttagcccaagaactaaacggaattgaaaaactactattaggctacaacgagcttgtcaaatcacagaaaaggctaatattatggacagaaggtgatagcgacaacgttgttaagaggctacgtaaatga

SEQ ID NO: 80495 - DNA, 3813 bp, Saccharomyces pastorianus
atggaaaccttaataggtaatatagctgccatactctctgataaaattttacgggaagaattagaattacaaatgcaagcttgtagatgcatgtataatctttttgaggtctgccctgaatctatttcaatagctgttgatgaacacgttataccaattttacaaggaaaattggtagagatcagttacattgacctcgcagaacaagttttagaaacggtggaatatatttctagagtacatgggagagacattttaaaaacgggccaattatcaatttacatccaattcttcgattttttaactatacatgcgcagaggaaggctatcgcaattgtttcgaacgcctgtagcagtatccgaacggatgactttaagaccattgttgaagtacttccaacgctgaaaccaattttctcgaatgcgacagaccaaccaatattaaccaggcttgtaaatgccatgtacggtatttgcggggcgttgcatggggttgaaaaatttgagactttgttttcgttggatttaatcgaaagaatagttcagctagtttctattcaggatacccccttggagaataaactgaaatgtttggatattttaaccgtattagcgatgagtagtgatgtactttcaagagaactgagagagaaaactgacattgtcgacatgacaacacgatcattccagcattatagtaaaagtcctaacgcagggttacatgaaacactgatttatgtcccaaacagtttattgattagcatttctagatttatagttgtattgtttcctcccgaggatgaaagaatactgtcagcggataaatataccggaaatagcgaccgtggcgtaatttctaaccaggaaaagtttgattccctagttcaatgtctaattccaattctcgttgaaatttatacaaatgctgctgactttgacgtaagaagatacgtgcttattgctttactgagggttgtatcatgcataaataattccacagcaaaggcaatcaatgatcaacttattaagttaatcggatctatcctggcccaaaaagaaacagcgtctaacgctaatggtacttactcatcagaagctggtacactgttggttggtggtctctcgttgcttgacttaatttgtaaaaagttttccgaactgttctttccttccatcaaaagagagggcatttttgatttggttaaggatttgtctgtggatttcaataacattgatttaaaggaagacgggaatgaaaatatttcactttctgacgaagaaggggatttgcatagcagtattgaggaatgtgatgagggtgatgaagaatatgattacgaatttactgatatggaaattcctgattcagtaaaaccaaagaaaatttcaatacacattttcagaactctatctctagcttatattaaaaacaagggtgtgaacctagttaatagagtactttctcagatgaacgttgagcaagaagcaataacagaggagctccatcaaatcgaaggcgttgtttctattttagaaaatccttccactccggacaaaactgaagaggattggaagggaatttggtctgttttaaaaaaatgtattttccatgaagatttcgacgtgtcaggtttcgaatttacttctacagggctagcttcctccataactaaaagaattacatcctcaacggtatcccatttcattcttgctaaatcatttttagaggtatttgaggatagtattgacagatttttagaaatcctacaatctgctctcacaaggctggagaatttctctatagttgattgcggtttacacgatggtggtggtgtatcttcactggctaaagagataaaaattaagttggtttatgatggcgatgcaagcaaagataatattggtactgatttatcatctactatcgtttcggtccattgcatagcttcttttacctcacttaatgagtttttgagacacagaatggtaagaatgcgttttttgaattcattaatcccaaaccttacatcttccagtaccgaagctgatagggaagaagaagaaaattgcttggatcatatgagaaaaaagaactttgactttttttatgataatgaaaaagttgacatggagtctacagtatttggtgtgatatttaatacattcgtcaggcgaaatcgtgacttaaaaactttatgggatgatacacatacaatcaaattttgcaaaagtttagaaggtaacaatagagagagtgaggcagccgaggaagctaatgaggggaaaaagttaagagatttttataaaaaaagagaattcgcacaggttgatactggatcttcagcggatattctgacattgctggattttctacatagctgcggtgttaaaagcgacagttttatcaactcaaaactaagcgctaagctcgctagacaactagatgaaccattggtagtagcaagtggagctttgccggattggtcactatttttgaccaggagattcccatttttgtttccgtttgataccaggatgcttttcctacaatgtacttcatttggttacggaagattgattcaactttggaagaataagagtaaaggctcgaaagatttaaggaatgacgaagctttacaacaacttgggagaattactaggcgtaagctgcggatttcaagaaaaacaatattcgctaccggtctcaagattttatccaagtacggaagtagccctgacgtactggaaattgaatatcaagaagaagcaggaacaggtttaggaccgactttggaattttactccgtagtttccaagtattttgcaagaaagtcgttaaatatgtggcgttgtaactcttatagttacagaagcgaaatggatgttgatactactgacgattatattaccactttattgttcccagagcccctcaacccgttttccaataatgaaaaagttattgaactttttggatatttggggacatttgttgccagatcgttgcttgataatagaattcttgactttagatttagcaaagtcttttttgagttattgcacagaatgtctacgcccaatgtgacgacagtgccgagcgacgttgaaacctgtctgttaatgatcgaattggtagatccgttactcgcaaaatcccttaaatacatagtagcgaataaggatgaaaatatgaccctagaatcgttgtccttgacatttaccgttcctggaaatgatgacattgagttgattccggggggttgtaataaatccttgaactcttctaatgttgaagaatatatccatggcgttatcgaccaaatattaggtaagggcattgaaaaacagttaaaagcatttattgaaggtttttcaaaggtgttttcctatgagaggatgctaatactttttccggatgaattagtggatattttcggacgagttgaggaagactggtctatggcaactttatacacaaacttgaacgctgaacatggctatacaatggattcttcaatcattcatgattttatatcaataatatccgcgtttggtaagcatgaaagaagattatttttgcaatttttaacgggatctcccaagcttccaattgggggatttaaaagtttgaacccaaagtttacagttgtgttaaagcatgctgaagatggcctaacagcagacgagtatctaccaagtgtaatgacatgtgctaattatttgaaattgccgaagtatactagcaaagatattatgcggtctcgtctttgtcaagccattgaagagggtgcaggagcttttctactttcctaa

SEQ ID NO: 80496 - DNA, 294 bp, Saccharomyces pastorianus
atgtatcatcccttcatgtacatgtactttaaacagaatgataggaaactagaggggttagccaataaattagctacattcagaaacataaaccaagagattggagaccgagcggtctctgacagttctgtcataaaccaaatgacagattcattgggatcgatgtttaccgatatcaaaaattcgtcctcaaggttaacccgatcattaaaggctggtaatagcatatggagaatggtgggtttggcgttattaatattcttcattctatataccctgtttaagttattttag

SEQ ID NO: 80497 - DNA, 1221 bp, Saccharomyces pastorianus
atgcctgcaggtctatccttgactttatcagataaaaatctactgcgaaatctagacgagaaggacttgagagctttgaatggtaccagagtaacagatgagatattagaactggtaccaaagccgaatgttttcagaatcgctttaagagctattaagctatgggcccaaagaagggctgtttatgctaatatttttggttttcctggtggtgtggcttgggccatgctagtggctagaatttgtcaactataccctaacgcctgtagcgcagttatattgaacagatttttcatcattttgtcggaatggaattggccacaacctgttatcttgaaaccaattgaggatggcccgttacaagttcgtgtatggaatccaaagatatatgcccaagacaggtctcatagaatgcccgtcattacaccagcttatccatcaatgtgtgctacccataacatcacggaatctactaaaaaagtcattttacaggaattcgtaagaggcgttcaaattacgaatgatattttttccaataagaagtcctgggccaatttattcgaaaaaaacgattttttctttcgatacaagttctatttagaaattactgcatatacaaggggcagtgacgagcaacatttaaaatggagtggtcttgttgaaagtaaggtaaggcttctagttatgaaactggaggtgttagctggaataaaaattgcacatcctttcaccaaaccctttgaaagtagttattgttgtccaaccgaggatgactatgaaatgattcaagacaaatacggtagtcataaaactgagacagcactgaacgcccttaaactggtaacagatgaaaataaagaggaagaaagtattaaagatgcaccaaaggcatatttaagcaccatgtacataggccttgactttaatattgaaaacaaaaaggaaaaagttgacattcacattccctgcactgaatttgtgaatttatgtcgaagtttcaatgaggattatggtgaccacaaagtattcaatctagccctccgcttcgtaaagggttacgatttgccagatgaagttttcgatgaaaatgaaaagagaccatcaaagaagagtaaaaggaagaatttagatgctagacatgaaaccgtgaagagatctaaatcagatgctgcttcaggtgacaacatcaatggcacaaccgcagctgttgacgtaaactaa

SEQ ID NO: 80498 - DNA, 228 bp, Saccharomyces pastorianus
atgagctctcaaaaggtttttggtattactggacctgtttccaccgtgggcgccacagcagcagaaaataaattaaatgatagtttaatccaagaactgaaaaaggaaggatcgttcgaaacagagcaagaaactgccaatagggtacaagtgttgaaaatattgcaggaattggcacaaagatttgttatgaagtatcgaagaaaaaaatatgtcagacggatggca

SEQ ID NO: 80499 - DNA, 483 bp, Saccharomyces pastorianus
atgtatttaaaggacttaaagcaacctcgttcttcaccaaaagttttccttgatactcataaagagtcaccattgagaccaaaagttcggccattgagcgagcaaggtgaatatgaatccagaaaactgtggaaaaaggttacagatgcgttggccgttcgcaatcatcctgttgcgacagaagaaaaatttcagattgaagatcaccaaagacagttagccaaaaaacgcattgaagatggcgtagaatttcatccaaagttgtttagaagatcaaagcctggcgaagatcttgactattgtatttataaaaatatccctatcgacgaggaccctgagaagcaaatacgaagcatattgcaaatagtacctattttacctggtcaacaatttaccgacaaatttttcatccccgcatttgagaaaataaaatcacaaaagaagatgattgaaaacgaaaagcagaacccagcaaaacaatag

SEQ ID NO: 80500 - DNA, 810 bp, Saccharomyces pastorianus
atgggctccaaaaaactgaccgtaggatctgattcgcaccggttgagcaaatccagtttttcaagtaataagtcgtcacattcagcaacaaaagatcagccaattgataccgacgatattgatgaagacgatgaatctggtcataatattatcttgaacatcatctcacaattgagaccaggctgcgatttgaccaggatcaccttgcctacttttattttagaaaaaaaatcgatgcttgaacgtgtcacaaatcagttacaattccctgagtttttgttacaggcgcattcagaaaaggaccccttgaaaagatttttgtacgtaatgaaatggtatttggcaggctggcatattgctccaaaggctgtaaaaaaaccattgaacccagtccttggtgaatattttacagcttattgggatctaccatacaagcagcaggcatattatatatctgaacagacaagtcaccaccctccagaatgtgcatatttttacatgattcctgaatcttcgattagagtggatggggtcgttattcctaaatctagatttttaggtaattcaagtgcggccatgatggatggatcaacagtcttgcaatttctggacataaaggatggaaacggaaagccggaaaagtatgttcttacacaaccaaatgtatatgtaagaggaattctttttggaaaaatgagaatcgaacttggagatcatatgataattaaatctcctaacttccaagctgatatagagttcaagacaaagggatatgttttggaacttacgatgcaatcgaagggactgtaa

SEQ ID NO: 80501 - DNA, 1257 bp, Saccharomyces pastorianus
atgagttatgacaagttgcagatcgttgttgaacaatttcaattgacaaatggagttttagatgacggagagattttgaaacctagaggcaacaaattttctagtagaaaattgtcttatttcgttggtcaaaacaatactctttttaggaaccctttgcagttcgaaaaaaaccaattaatttctgcactattaacctctttaaccaataatcaaaagactatatcatcagttgacatgttcgaagtggttgacgctaataatgaagttcaatatttgcgcaaaagaacgataagtggtaaaactctgtctccagctactggttatgaagaagaaaacgacggtgactgtagtgtgaaagataagaagtgggaaggtaaaatcgaataccatgagaacaagaaagttagttctgaaaactgtagtaaggataccgatgataaaagtggcagtaaaaaagaacgaaatacgaaggccccattatttcacactgccaccgaaattcatatgacaaggtggagttcttggaggccaaagaaaatttttactcgttacttagtgaatgaataccaaagtcctaaaataataaccacagtgaacaggttttacaggaccaagactgatactgaaacagggacgactttaatcacgtcgacaaaagccaaaagaagatggtttccaagaactaaaatcgtaacaagtaccgcaacttcgacgtttttgagtatcacgactactacgacaacaaatgctatcgcaacgaagtcgttagtagcagtacttaatccggatggattgaataaaaaagcgggaataaattttggtctctttagcgctaatggtgagctcgcttcaccagatgaaggaggtacaccaacagtagtaagaagagataagatttctgatccaggcgctgctaatgagcaggccacactgttctctacaaccttttcgcaagtgccgcacttaccagaactagattctggtgaattcatatcggcggcatctcaattagacaaaaggattttcatattcactgccatcacagtatcaattactacattgatgatgttggggttttcttaccggtcgcgggtatcttttagagatcatagtatcgatgactcagatgatgataacgattggtcagatgacgaagttgaatttgacgaagagtatttctattctcttcctgtaagcataccagaaaaggggatcagcttagataaaatggcgcaacaacttggtgtagaatag

SEQ ID NO: 80502 - DNA, 198 bp, Saccharomyces pastorianus
  modified_base (67)..(67): a, c, g, t, unknown, or other
acgagtcgctatagggatccgcacaggcaactactcaccaaactgcaccaaggactaatacgtttanctctgcttacatcaccggattcagcgaaaatatcaaaggaacagttaaagaagttgcactctaatatactaaatgaaattttcagccagtcccaggtaaacaaaccaggccccttgacggttcccttttaa

SEQ ID NO: 80503 - DNA, 393 bp, Saccharomyces pastorianus
atgggagccgtactcagctgttgtagaaaccattccggcgaagagaatgaagctttgctgagggaacagcaggcaggctatggaagtcaaggaaacacaaatgacgaatacgatgccgaacaaatgcggttgaaggaacacgaacagaaactgctggccagggaacaagagttaagagacattgttgcaaacaccaacgataaactaatagacatatcgatgataaacaatagtggcattgtaattcaagggacagacctgcaagaagctcttgataaaagacaacaggaagaaggtggagattcccgggaagacgaaaggagcgcaggtgatgacaacctcagtgggcactcagtgccttcaagcggatccgcacaggcaactactcaccaa

SEQ ID NO: 80504 - DNA, 342 bp, Saccharomyces pastorianus
atgaattcaactcctggaaaaagaaaaaatggccaagcgataccgtccagtttagaaagaacaccgcagctcaagaaagtcaaggttaccaggtcgcattcttcaccttcttcttcttcttccatgtcacttgaatcttcattggatagctcttcctcagatgattcggatgatgattctgattcgaggaacgtgcaagttaaaaaaattaatttcaagacaagtcatggaccagctggaaattctaatggaaaaccaatgctggatgtggatgacaatgaaataaatacaaagaagtaccaaacacctaaatatgttgaaagtgatgaagacgaccagtaa

SEQ ID NO: 80505 - DNA, 954 bp, Saccharomyces pastorianus
atgagaccttacaaggaacacgaggaaaggaaaaaacggagagaagaagaagccaaggtgaggatgcaaggtgaggaacaggagaacattatgatagagagaaaaaaaatagatagtattgaagttgatgcgtcatcgggattgaaaaatatcataaaaacacctctcgccaatagggttgtcaatacttttaataactgcgctgctgtggtaataggctatgtaacagaagtggataaagtaaaggacgacaatgaagagaagaataacgacagacctaaaattgcaaacgacggaatagctcaaaagtctagaagcgaaagtgaagataatgcaggaacaccgatggacaacgcgtactttcaacccgaaccccaagataatgaccaaaacaacatatcttggaatacgactatgaaagatattgatccaatttacatgagtgaaagatgtgctagagtttggagaaaggagcaacaaatgctaggattggagaaggctcagacatttgagaaaaaatattgtaaagatcagatggttatggacgaaaatcaggtcgaagaacctggtaagcactcggagagacgtacaaaaaatcaggtagtcagacctaggaccaaaatagcatcttccgccagtaaaaatgataatagtaataataaaaatagtaagtcatgtaaaaattgccataaagaggaagcgcacggtctagtgagagaataccttaagattaaactcaacatatcacctcacggagaaaggaatcagcgaacaaaggacaagagaagatgtataatgaaatacaatgcgagcagtaacaagatcaacaaaatgcctggggagagtgaagtacttgggtcaactattttaacagatatccactttaaggatgtcgtaactgtgaaatttagggattttaaagccaaatttagaaaagtcaaaataaacgcttga

SEQ ID NO: 80506 - DNA, 414 bp, Saccharomyces pastorianus
atgcttaaggatctggggagggaatttatgatattcgagaacttgaatgtggaagatttcagagaatctaaaaatatgattcacagattttatactatggttatttctttaagacagattatggaaattgggcccttagtcaggcgtagccctgctgttttagttgtggaattcgattgtccggtagaggattgcctagatgaactggatccgttgcatccattgaacagggcctatatatttattcataaacaatggacctattatcatcaatattatatagttgaaaaggtaaaaaaggtgattcttgatatggccccggtaaaggaagatgattggagcatccttcacaaggttgtttattcagaaggttttgtcgaaagacgatataaaaagaagaaatacctcgggtga

SEQ ID NO: 80507 - DNA, 216 bp, Saccharomyces pastorianus
atgattggagcatccttcacaaggttgtttattcagaaggttttgtcgaaagacgatataaaaagaagaaatacctcgggtgatatttacattccacaaccattaatgaaaagcaataaaatcactactatctcaaatttttcccaacttaccaaatttccaacgtcagagtttacagattcaacgctacagcagcgtgtgatccgcagaacttga

SEQ ID NO: 80508 - DNA, 759 bp, Saccharomyces pastorianus
atgctgttactaaaacgaagcaaagaaaccagacaagagagttggtttataaagcaagtacgtcttctgttgatggaattagtcgctagaatcggctggaacgccttacttcagctaagatctgacgttttcgttatggagagtaaattcaaaatgatagaatcttcggacaagctgtccacagaattacgccagaagaggctctgtcagagatggtttgatgctatgtttctgaacgtttacgaagatttaagtattagcacttcatctcaagaaaataaggctacggcgaaatacagcgggttggaatgggaactacttggcttagctctgcttcgagtgagtgacttacccgatgcagtagcgtgtctacgaactagtattttggcaaggtttgaccctattagttgtcaccatctgttgaacctttatttaaccatggatttcaatgatgagtttatgagaaggtttgacgtcgatatcattttagatctattagtgaaattgatctcctttcggatacgattctatgatagatttcagatattttcccttcaagtactaaggaaactagagggacagctgggctccgaaattattaagaataaaataattaattctccttacgggcaagctggcatcacttcggtgatagattatatgcttgaatgcctctctaaaaatcggaatgacgccagcctagcctatgaacgccctcttccagatcttccttccactatcaaacctctggcagactaa

SEQ ID NO: 80509 - DNA, 1515 bp, Saccharomyces pastorianus
atgagttttttatgggggtctacaaagtccaagaaaggcaagaataaaaaggctgcaggttctcttccgtcaggtgttgttccacagcaacgtgtgaaaccaacacgtaaaaacgttcctatagattatccaagaactttggaaaaagtacatggtgaaagtttaatctttaggacgtcccttttaagtgaattggtgagcactggtaaatctggtattggtcctccagacttgattcattgtacagagttagataaatttcacgatgagaaaataggtgaattcttttacatcacggggatcgacgcctcgagcgtctctatgccaattgcatttttgaagctgataaaatggaatgatggtaagaaactaaaatcagcatctttgaagaacgacgacatcacaacctactgcactttcaatatctttcaaaaattggacattagattaagatatgaatctgaagatgtttatcaagttaatatcgttgactgtttaaatggcaacaatgaaataccgttgagtgatcttatttgggaagaaactttcgttagctgttgcataagaagcgtaattattaattcagattttgaaagaaaaatacctgggctagtggaattaccatttgtttttgagaacagatgcgcgagtgattataaaagggtgatagattcgttatgcaaatttttgccaagatttttagaatgtggttgggattctacaaagagcgtctatgcaacgatactgaataactacctaactgaatcattattagtatttctgtctataactccagaattcataacagactatgcgatccaggttttagacaacttgatgacgaatgacccgtcaaattctagatattacgctattgtaattatttctatcatggagcgaagtaatgaccgcgatgtagaaatgatcaaacggatacacgagatattagacctattactacccgtactgtatggattgccatccgatgaaccttacatttctgatttgatcaattgcatcaccgatgtattaagcatccaagcaaggtttctattgaacaataacgactatgaactttctttatccatttccacattggccacgaatttatcttctgataattttgaatcttggtatctgttatctaaaggctatattttttcacaacagtatgataaggcactgctctcaatcaattcgatgccctgtttagcggaatatgatatcgttaaacaagcccagattaacgcttttaagttttatatgaactactacaaggcaccactatgtcatagcagagaacactgtaccatgacatcacacgagttaaatcacctcatgaatattatgcattatgaaaatgagttggagttgaagacaataatatttggacgcactgtaatgcccaatgaatctaagtatggatgtattgaagagatatggaataaatcctgtcttgaattaggacctatttgtggaccacagagtgacaatctcataaactttgtatcttag

SEQ ID NO: 80510 - DNA, 4305 bp, Saccharomyces pastorianus
atgtctcccttgaaaaatgacgacgacattttggatattaccaatagcaaccataaccatcgtggtaacgacgacgacaatactggcgagaattctgataggagaccctctattccaaggagctccagcattataagcatttcttcgaatgtggcggaatttatgtatagcaggaacgaaaactctttatttagaatacacttggaatatgggattgatgaagacaggctcaaatggtctattataagaagttataaagatatcaaatcactacatcacaaattgaaaatcgtcgcgttccaacaactcactataagcaagctttatagtgataacaacagatatcattcgttacaacttccgcatttcccccattataaagaaatggttaaagaaagaaatgtaatggagaaaaaagcagaaaataaaccatcctctgcagcctcagctcctcatacatcggaaaataacgataacgataatggcagcaacattacatcgttagaaactttatcatcttctgaaatatctgagtttaatatagataacgtcaaaatgaaacatttacaagacttaattgacgaacctgacgatttctcccaaccgatacatttgaggctagaaaggtatttgagactactgaacattgcattatgtttgagacctcatgcaaatagattgtttgaattttacgaattatctcccttaggcaatttattaagtcgtgaaagtgggttccagggcaaacaggggtatttagtaattagatctactgccaaggcccaaggttggagagtttctcattttggtaaacatgcgtttaaagacatgatcgacagacatactaccaaatggttcctggtaagaaattcttacctaacttacgtgtcggatctttcttcgacaactcctttagacgtattcttaatagattggaaatttaaggttcgattttctgggaacaagaataacatacttgataacgaaaacgagatcaactggatcattcatgatccaaatttagaaataaatgacgaactagaagagttcggtattgaaaatgatgccaataatgtcctagacaagaatggaaaatcgaaaacacaccaaaagaagtccaatatatcttcaaaactattattattgaccctagaaaacagtgaaaggaaactgaaaattatttgcaaatcagagagtttgttaaagcaatggatgagttcaattatcaaaatgtctacctcaacaccttggtcgaaaccaaatagatttggtagtttcgcacctgtgagaacaaattcgttttgcaaatttttggtagatgggcgtgattatttttggtcgttaagcgaggccctcttaatggcaaaggatgtcatatatatccatgattggtggctatcccctgaattatacttgcgacgtccggtgaaaggcaaccagggatttagaattgatcgtatgctgaaaagctgtgcagaaaaaggtatcaaaatttttattgtgatttataggaatgtggggaatattgttgggacagatagtctttggaccaagcattctatgctaaatttacatccaaatatacatatcataaggtctcccaatcaatggctacaaaatacatatttttgggcacaccacgagaagtttgtcgttattgatgaaacatttgcatttattggtggtacagatttatgttatggtagatatgatacttttgaacacgttctacgagatgatgcagaatctttattagatcaaaattttcctggtaaggattattcaaatgccagaattgctgattttcatgatttagataaaccattcgaatcaatgtatgatagaaaagtcattccgaggatgccatggcatgatgtgcaaatgatgactttgggtgagccagcaagagacttagcccgacattttgttcaaagatggaattacttattgagagctaagagacctagtaggttaactccattactaaccccgccttcagatttaactgctgaagaattgaagagtttgccgatgttcgaaattctacgcgaaaaatcgacttgtgaaactcaaatacttagaagtgctgggaactggtctcttgggctaaaggaaacggaatgctcaattcaaaatgcttacctgaagttaattgaacaaagtgaacactttatttatattgagaatcaattcttcattacatcaactgtctggaacgggacttgcgttttgaataaaattggtgatgctctcgttgataggatagtcaaagctaatcaggagaaaaaaccttggaaagcctttattcttatcccactaatgccaggattcgattctccagtagatactgcagaagcctcaagtcttcgtttaattatgcaattccaatatcaatcaatttcaagaggtgaacattctatatttagtaaactgaagaaactaaatattgacccagctcaatatattcagttcttttcactaagaaaatggtcgacttttgcgccaaatgaaagattaatcaccgagcagctctacgttcatgctaaaattctgattgctgatgacagaagatgtattatagggtctgctaatattaacgaaagatcacaactgggtaatagagatagtgaggtggcaattcttattagagacaccgacttgataaagaccaaaatgaatggtgacgattactacgcgggaaaatttccttgggaattaaggcagcgattaatgagggaacatttaggttgtgatgtagatcttgttgagtttgttgaaaagaaatttgaaaggtttgaaaagtttgctgcaaagaattatgaaaaacttcataccctaagtaaggagggagatagtggtaacaattggagcgatcgagaaatgatcgattccgctatgattgagctaggttatcgtgaaatatttggttgtaaattcagccctcaatggaagagtagtcatggaaacagtgttgatgatggaagcactcagtgtggcataaatgaaaaagaagtgggaagagaagatgaaaacgtttatgaaaaactcttcaattctgtggactacggtaaatcatcacgtaagagaacgcctctgcccaaacataattttgcatctttagggctaacattcaaccacagggcaggaattgaaaatgtcggtatacgagaccacaaagtcttaagtactgatccaagattaagaaagaatgatgaacataaaaaagaggttgatggctacggtcccgattgttggaaaaaggaatccaacaaaaaattcaaggccgatgcaactgaacagctaaaggagtgggcattgaactcattggcctcgaaagttcttgacgataaagaaatgataaaatcagaaattccagaaggattttcaaattatttgcccaatgagaaagatctagaaatgtatctcacggataaaactgttaccaatagaaacaagtggagtatgctcaaaaggatatgctacttgcaatatttatctcataaactcgacgaaagaaaaacacagaggttgaagaaaatcaaagatatgagaagacatttaagttcaagcacagaaagtaccagaaatgggtctaatagtctgccattgaacgaaaagagcaatgaaggagaaagcactaacgtcgaccaagatatcgaaggcgatgaatatcatagactgcacgaagatattttgaaaaatcaagaactagatgatggttcactggacgatctactttctcagataattcctaagatcactaactttaacagtggtgaaattgatgacgcaaaaaaagaagagttattgaaactcaacttcattgacccgtattccttcgaggatcctcttatttcttcgttttctgaagggctatggttcactatagccttgagaaatacattactctataaattagtgtttcattgtcaacccgataatgctgtacaaaattggaaagaatatggagaatttactgaattagaacaagaatttcaaataaaccaggaaaagttgattgacttagaggctgaaaatattaattctactactacaaatgttgtagataaggatagggaaaaggaaaaaatgagaaaagccgctgaattgagaatgaagttatccggcagtttgctttatggattcaatcaaaaggtttttgacaaacatacggcgcagagaatcttggaaaggatccacggtcatttggtcattttcccaaccgaatggttagctaaagaagttgagagtagaaactggatttttaactcggatagactttctccaatggaaatctacaattaa

SEQ ID NO: 80511 - DNA, 687 bp, Saccharomyces pastorianus
atgtctaacgtgtcaacagcgtctggaactcacttcgctccacctcaggcagatagatcggtgactgaagaaatagatagagtaaattcgagaccagatgagttagaaaaccaagaagtattgcggcaattacctgagaatggcaatctgactagcagtttacaaagagaaaaacgaagaactcccaacggcaaggaggcggagaggaagcatgcattgcccaaatcctttgtagatagaaacctgagtgatgtgtcaccgaaccactcattagaccatataatgcactctaatgaacatgatcctcgtcgaggttctgatgaggaaaatatgcaccggctctacaacaatctccatagcagtaacaataatgttcattctaagcggaattctaaaagagaggaagaaagagcccctcaaaggcgttcttcttctgtagcttacacccaacagcagttcaatggctggaagaaagagtttggccacgcttttaagaaaatctctgctattggtagactgaaatccagcgtaaattctcctacaccggctggaagcggccatcgtcataaccagcaccagcatcaacaagtaaacgaagaagatttgtacacacaaagactagcctctgatttattagattcgttattggcaggatgcccggcctcattgttcgcaagcacacaattt

SEQ ID NO: 80512 - DNA, 420 bp, Saccharomyces pastorianus
atggtgagcgggtccattaagccactgttaaaaccaaaggaaaccgttcccaacacaaaggagtgctccacgcagcggggaaaattttctttggacccctgcgaacctagtgggaaaaactacctctatcagatcaacggttcagatatatacacgtcaaatatagagctgacaaggctgcctaatttgtcaacattattagaaccctcacctttttcagattccgctgtaccagaaatagaactaacttggaagctacataatgaggaggaggtaatcaaattgaagaccaagataagcgaattggagttggtgacagacctatacaaaaagcacatattccaactgaacgaaaaatgcaagcaactggaagtggaactacactccagagcttcagtacaatctcacccacaacattaa

SEQ ID NO: 80513 - DNA, 213 bp, Saccharomyces pastorianus
atggtgcttagtgattcgttgaagctgccctcgcctacactttcagctgctgctggagtggatgattgtgacggagaggaccaccccacgtgccagaattgtttcactgtcaaaacgcccctatggagaagagatgaacacggtactgttctctgtaatgcatgtggcctcttcctgaagttgcacggggaacccaaggcctatccagcttga

SEQ ID NO: 80514 - DNA, 612 bp, Saccharomyces pastorianus
atgaaaagaaatagaaggctgggcagaccaggggaaaaaccgatcatccatgtgcccaaggaagtatatttgaacaaagatcgtcttgatttgaacaataaaaggagaagaaccgccactacaagtggcggtggtttgaacggttttatttttgataccgatcttataggatcctctgtcatttcaaattcaagctcaggtacattcaaagcattatcggccgtgttcaaggatgatccgcaaattcaaaggctcctatatgccttggaaaatggaagcgtgctcatggaagaagaatccaataaccaaagaagaaaaaccatctttgtcgaggacttccctactgatttaattcttaaagttatggccgaagtaacagatttatggccactaacagagttcaagcaggattacgaccaattgtaccataattacgaacaactttcctccaaattgcgcttcatcaagaaagaagttttgcttcaagatgatcgcttaaagactatgtcacagtaccatccttcttcttctcacgacgttgctaagattattcgaaaagaaaaagatgaaattaggcggctagaaatggagatagccaacttgcaagagtag

SEQ ID NO: 80515 - DNA, 126 bp, Saccharomyces pastorianus
atgtatattaatagggcggtggactctatgtccacactctatttcaagccaccaggaatttttcataatgccatcctgcagggagcaagcacaaggcaagcattagaaaagacattactagactaa

SEQ ID NO: 80516 - DNA, 699 bp, Saccharomyces pastorianus
atgttgaggaccggtgagagtgttttccgcaataatcagtttttgaatccagacaacatcacttatatcttcacctctccacgtttgcgtgccaggcaaactgtggatttggttttgaaaccattaagcgacgagcaaagagctaagatccgtgtggtggtagacgacgacttgcgagagtgggagtacggtgactacgagggaatgctgactcgagaaatcattgaattgaggaagtcacgcggtttggacaaggagaggccatggaatatctggagagatgggtgtgagaacggtgagactactcagcaaattgggttgagactttcccgcgttattgccagaatccagaacttgcaccgcaagcaccagagtgagggcagagcatcagacatcatggtctttgcgcacggacatgcattgcgttattttgctgctatttggtttggactgggtgtgcaaaagaaatgtgagacgattgaagaaattcaaaatgtcaaatcttatgatgacgacacagttccatatgtgaagttggaatcttacagacatttggtagacaatccatgtttcttactggacgccggtgggattggtgttttgtcatacgctcaccacaacattgacgaacctgcattggaattagcaggtccatttgtctcaccaccagaggaggaatcccagcatggcgatgtgtaa

SEQ ID NO: 80517 - DNA, 240 bp, Saccharomyces pastorianus
atgtatacatatgtatataaatatatgaatacggttatgaccactcttgcgaagtgcgttgggattatgactgcttgcattcaggagcctgttccggcctgccagcaaaatcgtcttgctcttcggcagattccccgtcgtcatcctccaagccgtgatcatcatcatcttcttcgtcttcgtcctcgtccgcttcttcttcgtcctcctcgaactcgaattccaaggctgcgccggtaa

SEQ ID NO: 80518 - DNA, 90 bp, Saccharomyces pastorianus
atgcgctttaacatatatttcagcttacacacttacatgtatatgcatatatatatatatctatatatgtatgtatacatatgtatataa

SEQ ID NO: 80519 - DNA, 2997 bp, Saccharomyces pastorianus
atgaaaagtattcaagatatcgaacctaccattttagaggcacaacggggtgtaaagaacataaaaaagcaacagttgacagaaatcagatcaatggtcaaccccccctctggtgtgaaaattgttatggaggctgtttgcgccatcttgggctaccaattttccaactggagagatatccaacaatttattagaaaagatgactttattcataatatagtacattatgataccaccttacatatgaagccccaaattcgaaaatatatggaggaagaatttttgtcagatcctaattttacttatgagacaattaacagggccagcaaagcgtgtgggccgctatatcagtgggtcaatgcccaaataaacttcagtaaagttttagaaaacgtagatccgctgagacaagaaatgaaaagaatagagttcgaatcattgaagacgaaggccaatttacttgccgctgaagaaatgacacaggatttagaagcaagtattgaagtttcaaagcgaaaatatagtttgttgattagggatgttgaggccatcaagacagaaatgagtaacgtgcaggctaatcttgataggtctatatctttagttaagagtttaaccttcgaaaaagaaaggtggctgaacactacaaagcaatttagtaagacgagccaagagctgattggaaattgcataatttcatccatatatgaaacatactttggtcatttgaatgaaagggaaagagctgacatgttagtcattttaaagcgcctactaggcatatttgctgttatatatgatgtaaattatcgtttcatcgattatttggtaacactagatgaaaaaatgaagtggcttgaatgtggcttggataagaacgattactttttggaaaatatgagcatagtcatgaattcacaagacgctgttccttttcttttggatccaagctcccacatgataacagttatttcgaattattatggtaataaaactgtacttctcagttttcttgaagaaggttttgttaaaagattagaaaatgcaattagattcggaagtgtagttataattcaggatggagaattctttgatccaattatatcaagactaatctccagagagttcaatcatgccggaaacagagtcacggtggagattggtgatcatgaagtagatgtttcaggcgattttaaattattcattcactcttgcgatcccagtggagatattccaatattcctcagatctagggtaaggttagttcattttgtcacgaataaggaaagtattgagacacgaatttttgacatcactttgacagaagagaatgcagaaatgcaaaggaaaagggaagatttgataaaattgaataccgaatacaagttgaaactgaagaatctagaaaagcgacttttggaggaactaaataactcacaggggaatatgttggaaaatgatgaactgatggtgactttgaacaacctgaagaaagaggccatgaacattgaaaaaaagctaagtgaatctgaagagtttttcccacagtttgataatctggtagaagagtattctattatcggtaagcatagtgtcaaaatattctctatgttggagaagtttggtcagtttcattggttttacggcatttctataggacaatttctatcatgtttcaaacgtgtcttcattaagaaacctagggaaacaagagcagctaggacacgggtagatgaaattctttggctattatatcaagaagtatattgtcaattctccaccgctcttgacaaaaaatttaaaatgattatggctatgacgatgttttgtttgtataaattcgacattgaaagtgaacaatataaagaggcagttctaactatgattggagttctctctgaaagtagcgatggcgtaccaaaactaaccgtagatacaaataatgatttgcggtacttatgggactatgttacaaccaaatcgtatatatctgcgttgaactggttcaaaaatgagttttttgttgatgagtggaatatcgcggatgtggtagccaattccgagaacaactattttacaatggcaagcgagcgagatgttgatggcacattcaaattaatcgaattggcgaaagcctcgaaggaatcgttaaaaatcatcccgctagggtctatagaaaatctaaactatgctcaagaggaaatatcaaaatctaagatagaaggtggttggatattattacaaaacatacaaatgtcgctatcatgggtgaaaacgtatctgcacaagcatgttgaggagacaaaggcggcagaagaacatgagaaattcaaaatgttcatgacatgccatttgactggtgataaactacctgccccattgctacaaagaactgatagatttgtgtatgaggatatcccaggtatactagataccgtcaaagatctatggggttctcaatttttcactggtaaaatttcaggagtatggagcgtgtattgtaccttcctattgtcatggtttcatgccttgatcactgccaggacccgattggttcctcatgggttttccaagaagtattactttaatgattgcgactttcaatttgcctcagtgtatttagagaatgtattagccaccaattctaccaacaacattccttgggcacaagtgcgagatcacatagctacgatcgtatacggaggaaagatcgatgaagagaaagaccttgaagtggtcgctaaactttgtgcgcacgtattctgcggctcggacaatttgcagatcgttcctggggtacgaatcccacagcctcttcttcaacaaagtgaagaagaggaacgggcaaggcttactgccatactgtctaatacgattgagcctgcagattcactcagttcatggcttcaattgccaagggaatctattttggattacgaacgtcttcaggctaaagaggtggctagctcaactgaacaacttcttcaagaaatgtag

SEQ ID NO: 80520 - DNA, 2040 bp, Saccharomyces pastorianus
atgtgcaagaatgaggcaagacttgctaatgagctgatagaatttgttgcagctactgtaacgggtataaagaattctcccaaagagaatgagcaagcattcattgattatctacattgtcaataccttgaacggtttcaattttttttgggattattggatgggagagagttcgacacgttgtttgtcttcctttttgaagagctggatagaacaatagttacaatagacattggtgaagaggctatatatgatgccaacttggcgaataaaaagtattctactctattaattattaaatctagaagtgttattgtggatgcagaaccgattgcaacacaaataagtgccttatacttacctggtccagtaaatgcggggaacctggcctcaattatcacacatggcgtatcgtctgtgtttggccaattgataaaatcagatacaaagacatattctgtcgaaactatagataaaacgaggaggaaacttgacgacatttctaaacaatttcaacagttacatacctcaattgaaacgccagatcttttagcgatggtccctagcattatcaaattggctgtatcaaaaggggctacttcacatgattatgcaaactaccttcctagtaatgatttggaaagtatgagatttttgaacattttacaaagcattgcaaacaaatggtttttggttcttaaacaaacattagccattgacagagatataaaaaatggttcttttttagacgaagttgagttttggtcgaatttctacgaagtactgaagtcgctaattgaacaaacacaaagccaagaatttcaggtgtgtctatccgttctaacaaacgcaaagagatttcataatttaacaaatttattgaatgaaggttcactttcagataaatttaagctagcggataaatataaccaatttctatcgtcaatccctatcgatgaggttcgccaggcaagcaatcttgaggacttgcaggaactatttcctgttttagcatcttctttgaagaagttcagatattcaggttatccagttcaaagatttgttgtgctgatggacaaaatttcacaagaagtcatggatgcaattctaagtaatctttcagatttatttcagctagagtatggttcttttttgggtttatatgaaaaatcagcaggcatgatagaagaatgggatgatattgtccaggatgtcaatcttttaataagagaggatcttaggaaaagagcaccacaggagctacttatacaaaagctaacatttacaagtgcatccgtaaaggctactttggatgaaattttaagcacacgcaagcgatttttttcattggcagaaaccattaagaatatatccccttctacttatcacgaagaaatacagagattgtatcatccatttgagcaaatccatgatatttccgtgaattttcgattgaaattggagcaagctgaaagtgaatttagtaaaaacatgctcgatttggaaaagaagttacaaaatatgttggcaagttttattgactctgatcactgtccaaccgaaaaattaagttatctagtaaaattcaagccattaatggaactttgtcctaggataaaagtaaaagtactagagaatcaacagatactgctacttgaaataaaaaaagatatacggcaactggagactggtttagagctcttgcctaaaattctgcacgtggaagctttaaataacattcctcccatatctgcaagaatttcctactttctgaatgtacaatcccgtattgacaatatagtgcagtatctcgaagcactttttggttctaattggaatgacacacttgaagggcgttcgatatcaacttcgatagtacaactacgtaaggaaacaaatcctcacgatgtgttccttcactggttggggaattttcctgaacaagcaacagcaaatcttttggcgacacctattttaaagcttataagaaataatgaggatgattatgaactaaaaaggtcaacttcgattttgccttag

SEQ ID NO: 80521 - DNA, 1935 bp, Saccharomyces pastorianus
atgatttatgaactaaaagtcaacttcgattttgccttagctgctgcttactcagaattaaggagtttaacctatatggcttttcaagtgcctagccacatagtacgtattgcgagaacttacatgtatttgtatccgagggcaataaacttggttgaactaattcaaacttttttttcacttagtaaatcactttcctatacattttacacgaacatctttctgaagagaaacgtgcaaactgtatggctactattacaacaaattctgataacgccgtgggaatctttacaagaggaaagttccgaaatgtcctgttcggtacacagcctagcaagattggaaaagtcaattgatggaattctttctgattatcaaatattgaaaaactccgagcctcagtttgccaaggaattttctggcctgaaatcttttgacggtactgctgatgatctgcacgaagtggaggaaataataagcaatattcaagctatttttgaaaacctttttatcaagggtcttgctaatgttagtgaccatatttccacgtttaataacttaattatcagcataatcttggagaaagtacgcttaaatttgaaaaaaatgcatttcccaaagcatgtattgaaactcagtttcaatgaaggtagaataacatcatctccatcgttagctgctatgaaacgttctttactgaaggatattgaggctcttttaaacaaagttgttttaattaattttttgcatgaccctgatcatcctctttccactaacctgacttttaattcgctagtcatcaaactaaaagatgatatacaaaattgtatagaacaggttcaaaatttacattgtaagataaattcttacgtcaaagaatggcaaaagatggaatttctctggcaaattacagaggaagcgtttttagaagtagtcgataacagtacacaaagatgctttggaattttaaaaggccttcttgattctcagtcaaaattcgatctaattataagccgaaataacttttcaaagaacttagtgcttcatacagaagatgcgcaacgtcatatccgttcgaaaatggattcttggatcttatatgtcagcaagcatctcttaacaatatatgaacgcgatgctagaaaattgcatgaagatatgaacagggacagagaagctgtcgaggatatggatataaattttacctctttaaagaatataacagtgatcattgaggctgtcaatgtaaataaaaggcatctcactgaacgagatatccaaatcaagctgcttgggtctgttatgagggcgcttacaaagctgaaggtgaggtttccatcgcattttgtctatatagaccagctcgataatgattttagttcgttgaggcaaagtttgagctatgttgaacaagagttgcaaaaacatcgcgttgttatagcaaaaagtctagaagaaggcgttgaaaatatcaataatctctcacaatctttgaacgaaagttggtcagtcagaaaaccaatatctccaacattaactccacctgaagcacttaaaatcctagagtttttcaatgaatcaattactaaattgaagaaaaagatgcactctgtcgcagccgctgcaaaaatgttactgatccccgttgttttgaatgaccagctaacacacgtggttgaagaggtcaaaacgtatgacctagtttggaggagcattaaaaacctttgggaagatgttcaaagaactttcgaaacgccgtggtgtagagtagatgtattgctacttcaatcggatttggcaaactttcttcggagggcggatgaactgccgagagctgtcaaacaatttgagatgtataaatcgctattttcacaggttaacatgcttacctctgtaaataaaatcttggtggagttaaaggatggtgctttaaag

SEQ ID NO: 80522 - DNA, 5130 bp, Saccharomyces pastorianus
atggtcctcaatttaactttaaatgaaatactacttacaaagattatagaaagagcccaaaaggaatttgttatagaaaagtctctgaacagaatcaaaaaattttggaaggaagctcaatatgaagtcatagagcactccagtggactcaagcttgtgagggaatgggatgtactggagcaagcctgtaaagaggatctagaggagctagtttctatgaaagcttcgaattattacaagatttttgaacaagactgtttggatttggaatctaaactgacaaaattatcagaaattcaggtaaattgggttgaagtacagttttactggttggacttgtatggaatccttggtgaaaacttggacattcaaaacttcttaccgctcgaaacttcgaaatttaaaagcttaaccagtgagtataaaatgataaccacaagagcgtttcaactcgacacaacaatcgaagtaatacatattccaaatttcgacacaactctgaaattaacgatagattctttaaagatgataaaatcgtcactatcgacatttttagagagacaaagaagacaattcccaaggttttactttttaggcaacgatgatcttttaaaaatcataggatctggaaaacaccacgaccaagtttcaaagtttatgaagaaaatgttcggaagcattgagtctataatattcttcgaagattccataaccggtgtgcggtcagtggaaggtgaagtcctaaatttgaatgaaaaaatcgagctgaaggactcgattcaagctcaagagtggttaaacattttagacacagaaattaagctaagcgtcttcactcaatttagagactgtttgggccaactgaaagatggaacggacattgaagtagttgtatctaaatatatctttcaagccattcttctctcagctcaagttatgtggacagagctcgttgaaaaatgccttcaaactaatgaattttcaaagtactggaaagaagttgatatgaagattaagggactgctggataagttgaataaatcttccgataacgtgaagaaaaaaatagaggccctactggttgagtatttgcattttaataacgttattggacagcttaaaaattgttccactaaggaagaagctcgactactatgggcgaaagttcaaaagtttgatcaaaagaatgacactttagatgatctcaattccgtttttatttctcagagtggctacctcttggaatataaatttgagtatattggcatcccagaaagattaatatatacaccgttgcttcttgttgggtttgcgacactcacagattctctgcatcaaaaatatggtgggtgcttcttcggtcctgcgggcacaggtaaaacagaaactgtgaaagcatttggtcaaaatctcggtcgcgtggttgtagtttttaattgtgatgattccttcgattatcaggttctttccaggcttctagtaggtatcacacagattggcgcatggggatgcttcgatgaattcaataggctcgatgagaaagttttaagtgcggtgtctgccaatatccaacaaatacaaaatggcctccaggttggtaagtcccatattacacttttagaagaagaaactccattgagccctcacactgcagtgtttattactttgaatcctgggtataatggaaggtcagagttaccggaaaatttgaagaagagttttcgagaattctctatgaaatctccgcaaagtggtactattgcagagatgatattacaaattatggggttcgaagattctaagtctttagcttcgaaaattgttcattttttagaactgttgtcttcaaaatgcagttcaatgaaccattatcattttggtttgagaacgctaaaaggtgtattaagaaattgcagccctttggttagtgaatttggtgaaggggaaaaaacggtagtggaaagtttgaaaagagtgattttaccatcgctcggtgacaccgatgaattggtattcaaagacgaattatcgaaaatatttgattctgctggaacgccgctaaattcgaaggctattgttcaatgtttaaaggacgctggtcaaaggagtggcttttcaatgtctgaggaatttctcaagaaatgtgtgcagttttattacatgcaaaaaacacaacaggctttgatactggtaggtaaggcaggctgtggtaaaacggcaacgtggaaaactgttattgatgccatggccatttttgatggtcacgctaacgtcgtctatgttattgatacaaaagttcttacaaaagaatccttgtatggaagtatggttaaagcaacgctagagtggagagatgggctttttacttcgattctaagaagggttaacgatgatatcacaggaacttttaagaattcgagaatttgggtagtatttgatagtgatttagacccagaatatgtggaagccatgaattctgttcttgatgataataaaattttaacgcttccaaacggtgaaagacttcctattccgccgaactttcacattttatttgaaacggataaccttgaccatactacacctgctactataacaagatgtggtttgctgtggttttctacggatgtgtgttcaatatcctccaagattgaccacctactgaataaaagttatgaagcgcttgataataaactatccatgtttgaattagataagttgaaggaccttatatctgattcttttgatatggcctctttaaccaatatttttacgtgttcaaatgatttagttcacattctcggggttcgaacctttaataagttagaaaccgcggtgcagttggctgttcatttaatatcgagttataggcagtggtttcaaaacttggacgataaaagtttgaaagatgttattactttattgattaagagatccctactatatgcactagctggtgattcaactggtgaatcacaaagagcttttatacaaactataaacacttattttggacatgatagcgaagaactatcagattattctaccatagttattgcgaacgataagttgagttttagttccttttgttccgaaattccctctgtttctttagaagcacatgaggtcatgaggcctgacattgttattcctacaattgatacgattaagcatgaaaaaattttttatgacttgctcaattcaaaaaggggtattatcctttgtgggccacctggatctggtaaaacaatgattatgaataatgcactccggaactcttcgctctatgatgttgttggaataaatttttcgaaagacacgaccacagaacatattttgtcagccttgcataggcatacaaactacgtaactacatcaaaaggccttactttgttaccaaaatcggatttaaaaaatttggtattattttgtgacgagattaatttaccaaaactcgacaagtatggttctcaaaatgtcgtcttattcttaaggcagttgatggaaaagcaaggattttggaaaacgccagaaaataagtgggtgacaatagagaggatacatattgttggtgcctgcaatcctccaaccgacccaggtagaattcctatgtcagaaagatttacacgacatgctgctattctttacctaggttatcccagcggaaaatctctttctcaaatttatgaaatttattacaaagccattttcaagctagtccctgagttcagatcatacacagagcccttcgcccgcgcttccgttcatttatataacgaatgtaaagcaagatacagtactgggcttcaatcacactatcttttttcgccaagagaattaacacgtttggttaggggtgtctacactgcaattaacactggtccaaggcaaacactaagatcactaatacggttatgggcttacgaagcttggagaatatttgcagataggctggttggtgtaaaagaaaaaaacagttttgaacaacttctttatgagacagtcgataaatatttacctaaccaggatttgggtaatataagctcaacttcacttctcttttcgggcttgttgagccttgatttcaaagaggtcaacaaaacagatcttgtaaactttatagaggaaagatttaaaacattctgtgatgaggagctggaagtgccaatggttatacacgagtctatggttgaccatattttgcgtattgatcgtgcgttaaaacaagttcaaggtcatatgatgctaattggtgcaagcagaacaggtaaaactattttaactagatttgtcgcgtggttgaacggtttgaagattgttcaacccaagatccaccgtcattccaatcttagcgactttgatatgattttgaaaaaagctatttcagactgttcacttaaagaatctcatacttgtttaatcattgatgaatccaacattttagagacggcttttttggagagaatgaatacattacttgccaacgctgatataccagatttgtttcaaggagaggagtatgataagctcttgaataacttgcgaaataaaaccaggtctttaggtcttttattggatacagaacaagaactgtatgactggtttgttggagaaattgccaaaaaccttcatgttgtcttcacgatctgcgatcctacaaacaataagtcctcagcaatgataagttctccagcccttttcaatcgttgcataattaattggatgggtgattgggatacgaaaacaatgtcccaagtggccaacaatatggtggacgtggtccctatggaatttaccgattttatagttccagaggtcaataaagagttggtatttacggagccaatccaaactataagagatgctgtggttaatattctgatacattttgatagaaatttttaccaaaaaatgaaggttggggtaaatccaaggtcacctgggtattttattgatggtttacgtgccttagtgaagcttgttacggcgaaatatcaagatttacaggaaaatcaaagatttgttaatgtaggtctcgaaaaactaaacgagtctgtcttgaaggttaacgaactaaacaaaactttgtcaaagaagagtacggaacttactgagaaagaaaaggaagcc

SEQ ID NO: 80523 - DNA, 81 bp, Saccharomyces pastorianus
atgtccattcccaggcacgtgatgtcgagtacttcctcaaagaaacagaaaacggttccgcctaccagattgaaagcataa

SEQ ID NO: 80524 - DNA, 1218 bp, Saccharomyces pastorianus
atgagaagagatgatttaattagggataaatatttcgggaaatcttcaggaagtcaattagagttcttaacttacgacgaccaactagaattgaaaagaaaaacaattatgaatgcctacaagttctttgcaccaaggttagttgctgaaaaacttttacccccatttgacaccaccgtggcttcccctttacaatttggctacaggactaaaattacgcctcatttcgatatgccaaaaagaaaacaaaaggaactaacagtaaggcctcctttaggatttggtcaaaagggtagacctcaatggagaaaagatactttggatatcggcggacatggttcgatattagatatcgatgaatgtgtgcttgcaactgaagttctcaacaaaggattgactaatgaaagaagaaagtttgagcaagagtttaaaaactacaaaaaaggcgcgactattttactgagagagaataccactattttagacccttccaaaccaactttagaacagttaaccgaagaagcctctagggatgaaaatggtgatataagttatgtcgaagtcgaagacaaaaagaacaatgtcaggctggctaaaacttgcgttaccaatcctagacaaattgtcactgaatatgttgatggatatacttttaattttagtgcgggtgagttttttcaaaataataactctatcctgccaatagtgaccaagtatgtccgtgataacttgcaagctcccgctaaaggtgatgataataaaacaaagtttctagtagatgcttattgtggatcaggtcttttcagtatatgcagctccaagggcgtagataaagtgattggtgtagaaatttctgctgacagtgtctcttttgcagaaaaaaatgcaaaggcaaatggtgttgaaaactgtagattcatcgttggaaaggctgagaaactctttgagtctattgatactccaagtgaaaacacttccgttatcttggatccaccacgcaagggctgtgacgaattattcctaaagcaattagccgcatataatccagccaagattatttacatatcgtgtaatgtccattcccaggcacgtgatgtcgagtacttcctcaaagaaacagaaaacggttccgcctaccagattgaaagcataagaggatttgatttctttccacaaacgcaccacgttgagagtgtgtgtataatgaagagaatctaa

SEQ ID NO: 80525 - DNA, 462 bp, Saccharomyces pastorianus
atgcgttgcttttggatcgtacagaagtctatatttaaagctaggtttttcgcttgcagaaactttgtcaagaagcataattataaactaatcagcaccatgactggaagtactgaaatggtaccaccaacaatgaaacataccgttgacaacaaaaggctttcgtctcctttgacagattctggtaaccgccggactaagaagccaaagttgagaaagtacaaggccaaaaaggttgaaacaacttctccgatgggtgtcctagaatttgaagtgaacgatttgttaaaatctcaaaatttgtccagggagcaggttctgaacgatgttacttcaattctaaatgatagtctcaaagatggcctatcgcttacatatcaccagagtaaaatgtcaagtctagaatactcatgcacggtgcgtgacgtatctgtgaagaagagcatgaccacgtggcgcgga

SEQ ID NO: 80526 - DNA, 138 bp, Saccharomyces pastorianus
atgaaacttacagcagaggaaaccaaccaaccgcaacaagaaatgcccaacttcaaatttgactgggaggattctgattatctatccaaagtagagaggtgtttccctgatgatatttttgagtatgcagtagagtaa

SEQ ID NO: 80527 - DNA, 312 bp, Saccharomyces pastorianus
atgagtgtacaatctagaagccgctcttcttctatacattctattggctcgctagcttctaacgccctatcaagagtgaattcaagaggctcgttgaccgatattccaattttttctgatgcaaagcaaggtcaatggaaaagtgaaggtgaaactagtgaggatgaggatgaatttgatgagaaaaatcctgccatagtacaaaccgcacaaagttctgatctaaataaggaaaacagtcgcaacacaaatatatcttcgaagattgcttcgctggtaagacagaaaagagaacacgaaaagaaagaatga

SEQ ID NO: 80528 - DNA, 1764 bp, Saccharomyces pastorianus
atgtctgctcccgctgccgatcataacgctgccaaacctattcctcatgtacctcaagcgtcccgacggtacaaaaattcatacaatggattcgtatacaatatacatacgtggctgtacgatgtgtctgtatttctgtttaatattttgttcactattttcttcagagaaattaaggtacgcggtgcatataacgttcccgaagttggggtgccaaccatccttgtgtgtgcccctcatgcaaatcagttcatcgacccggctttggtaatgtcgcaaacccgtttgctgaagacatcagcgggaaagtcccgatccagaatgccttgttttgttactgctgagtcgagttttaagaaaagattcatctctttctttggtcacgcaatgggcggtatccccgtgcctagaattcaggacaacttgaagccagtggatgagaatcttgagatttacgctccggacttgaagaaccacccggaaatcatcaagggccgctccaagaacccacagactacaccagtgaactttacgaaaaggttttctgccaagtctttgcttggattgcccgactacttaagtaacgctcaaatcaaggaaatcccggatgatgaaacgataatcttgtcctctccattcagaacatcgaaatcaaaagtggtggagctcttgactaatggtactaattttaaatatgcagagaaaatcgacaatacggaaactttccagagtgtttttgatcacttgcatacgaagggctgtgtaggtattttccccgagggtggttctcatgaccgtccttcgttactacccatcaaggcaggtgttgccattatggctctgggcgcagtagccgctgatcctaccatgaaagttgctgttgtaccctgtggtttgcattatttccacagaaataaattcagatctagagctgttttagaatacggcgaacctatagtggtggatgggaaatatggcgaaatgtataagaactccccacgtgagaccgtttccaaactactaaaaaagatcaccaattctttgttttctgttaccgaaaatgctccagattacgatactttgatggtcattcaggctgccagaagactatatcaaccggtaaaagtcaggctacctttgcctgccattgtagaaatcaacagaaggctacttttcggttattccaagtttaaagatgatccaagaattattcacttaaaaaaactggtatatgactacaacaggaaattagattcagtgggtttaaaagaccatcaggtgatgcaattaaaaactaccaaattagaagcattgaggtgctttgtaactttgatcgttcgattgattaaattttctgtctttgctatactatcgttaccgggttctattctcttcactccaattttcattatttgtcgcgtatactcagaaaagaaggccaaagagggtttaaagaaatcattggttaaaattaagggtaccgatttgttggccacatggaaacttatcgtggcgttaatattggcaccaattttatacgttacttactcaatcttgttgattattttggcaagaaaacaacactattgtcgcatctgggttccttccaataacgcattcatacaatttgtctatttttatgcgttattggttttcaccacgtattcctctttaaagaccggtgaaattggtgttgaccttttcaaatctttaagaccactttttgtgacctgcaggcatgcaagctggcactgccgtcgttta

SEQ ID NO: 80529 - DNA, 408 bp, Saccharomyces pastorianus
atgggatataatattgggtgtagacttattgaggatttcttggctaggacggcattgccacgctgtgagaatttagtgaagacaagcgaagtactaagtaagtgtgcattcaaaatatttttaaacatcacacccaacataacgaactggtcgcataacaaggatactttttcattgattttggatgaaaacccattggctgactttgtggagttacccatggacgctatgaaatcgctctggtattccaatatattgtgtggtgttttgaaagggtcacttgaaatggtgcagctggattgtgatgtctggtttgtgtcggatatcttgagaggagactctcagacggagatcaaggttaagttaaatagaattttaaaagacgaaataccgatcggcgaagattag

SEQ ID NO: 80530 - DNA, 312 bp, Saccharomyces pastorianus
atgattactatgattacatgcggtaaatccaaaactaagaagaagaaggcttgtaaagattgcacctgtggtatgaaaggacaggaagaaaaagaaataaacgatataagatcccaacaagataaagttgtcaaatttacagaagacgagttgaccgagattgatttcactatcgatgggaagaaagttggcggctgtggttcttgttctctaggggatgcctttagatgtagtggttgtccctacttgggtcttcctgctttcaagcctggtcaacctatcaatttggacagcatttcagatgacttgtaa

SEQ ID NO: 80531 - DNA, 1302 bp, Saccharomyces pastorianus
atgactgccgtcgcctctactagcgggaagcaagatgctgaccataaccagtctatagagtgtccaaggttttcgcgtggacagaaagagattttgttggaccatgaggatgcgaaggggaaggattcaataatcaactcccccgtgtcagggaggcaatcaataagccctactttgtcgaatgctactaccacgactacgaaatctattatgaatgctaccggcacctccggcgcagtagtaagtaatactccggagcctggtttgaagagagtccccgccgtcactttcagtgatctaaagcaacagcaaaagcaggatagtctgactcagctgaagaacgaatcagaaagggccaagtctccaaatagtaatcctgctcctgtctcaaattccattcctggcaatcatgcagttataccgaaccacaccaacacttcaagaacaacgcaattatctgggtctccactcgtcaacgaaatgaaagattatgatcctaagaaaaaagacagtgctcttaaaatagttgataccatgaagcctgacaaaatcatggccacttcaacgccaataagtagagaaaataataaggtaaccgccaaagcccccaccagtattacacttcgaaaggaagatgcacaagatcaagctaacaatgtttcaggccaaattaatgtgcgttccaccccggaagaaacgccagtgaagcagtccgtcattccttccatcatccccaaaagagagaactccaagaatttggatcccagactgcctcaagatgatggaaaattgcacgtattgtttggcgctacaggttcgttatcggtatttaagatcaagccaatgattaaaaaactagaagaaatatatggacgtgatagaataagcattcaagttatcctcactcaatcagcaacacagtttttcgaacaaagatacaccaagaaaattatcaaatcttcagaaaaactaaataaaatgtcgcagtacgaatccactccggcaactccagtgacaccaacaccaggacaatgcaacatggctcaagtagtcgagttacccccacatattcaactatggaccgaccaagatgaatgggacgcatggaaacaacgaactgatcctgtacttcatatagaactacgtcgctgggcggatatactggtagtagctccactaactgcaaacacattatcaaaaattgctttgggcctgtgcgacaatcttctgacaagtgtcattagagcttggatccgagttatcccattcttttggacctgcaggcatgcagcttgcactgcc

SEQ ID NO: 80532 - DNA, 96 bp, Saccharomyces pastorianus
atgttagtcaaatctggaccgtacaacactgttacatcggtttctttgttccagttgatggacagtggattggatttggagttctgtaaaccatag

SEQ ID NO: 80533 - DNA, 81 bp, Saccharomyces pastorianus
atgaaatcttctatgatttcgttacctatagaaaaagatgatgccacaatggcactacgaaaacttgtctccagagagtag

SEQ ID NO: 80534 - DNA, 819 bp, Saccharomyces pastorianus
atggtatacacaacaccgcaacaacagcagagattcagctccacaccgcaatctagccacactcttatcttctcgccaatcagagccccttcaatgcaaacgccctcctcattggattaccaatcaccttcaattgttgtgtcatcgtcttcaatgaaggttcacggccggtcttccagtttcggtaaattttcactgtctattgggcaaaatggtaaggctacaatactggggcctataaacgtccttcccactgatacatcgaaaatggagaaacctgtaccaaagaaaaagcctgttacttctgaccgtgtcgaaaagactcgtatattatctttgttgaaaaaaatgagaaacaagagcagtactgtcaacaaaaaatatagtaaagtaccattaaagtctacgacaagtttgcaaccagcagctactgcaccttcaccactagtgtccaacatcataaagccgtctcccaaaaagttagcttccccaagaactccgaatgcaaactccaatttaaatctaaactttacttcatttcagattaaaacaggtttcactcccaatctcgatggaattttacttgaaaacttcacgtctcctaacacaaccgctgattcacagggtaattccgccagtaacatcataaataataatcacggtagcgcaaataataccaaccaatttctttttaatctaccacttcaatcatcaccaaggcaattcaggtctcctgcaagattaatagatccccttcccatatcggactggaacaccagtctcttgatgtcacccccagagaacagacgtaattgttga

SEQ ID NO: 80535 - DNA, 1599 bp, Saccharomyces pastorianus
atggccacaccgtccacaagatcgaaatttcaaacagatctggccattgataataggctattggaaaaagatccaaagtacaaaaaacttttcactgaaaaaagaagacgtcgaagaccagaaagctgtattaacctcatgactaaaggtaagggcactggacaaaaagataacattaatgatcaaattttcagcctaagaatattaccaggctccgatttaaactctttaaaggattctttatggataataaagatctctacccagccagatgttgaaaaaacaatcgcaagagctttttctgatttctattggttatatcatcaattacaaaataaccactggggaaaaacgattcctccgcctacaaggtccaacattcttgtagagaaggacgaatttgccataaatcatctttttatgatacgtaataatgagaagtatgatccaatttttaatttcaaaccggaatatatcatatcattgcaattgatggcaatgattaagcacatattcaatgacaaggttttacgtttggattcaaatttcatagattttattagttgggatgacgatcttcctgaaagtttgcaaatagtagtcgatgacagtaccttcacaggggataaaatactaatgacatcttctcaatttcgagaattaaaagagtttcataaacaatcaaaaaaagtggaatcaataacaaattcacatgcttcgttaatacccgtaacagaacttaccgaaatatatataagcccgaccaaattattctctagaaaagactaccaaaggctttttcaacctcaaagcacagacaacacctttaataacaatgacccgttgattcaagagtggataccaaaaagcaaaacattattcactagtttatcctttggttcaagtgcacctacttatcaagaagcgtcaactgagatacaggcatgccatgactgggtaagcatatccaaggagcaatggaaacagttactctaccatgtattacagtacattgtagacgaggcagtgaaggtgaattctgtgataaacgaatttactgagtgtcttaagcaaatttctttggacgaagtcattagagcaaactctgaactatttttaaaattttccaaactgaatgaatccttcctgaaaaaattcaaaggtgcatcgaggcaagacattttgaaactaatcatattatttgatgaaaatgtaagattttgcgaatcatttgaatccatcttaaatcaaagatcgaagcttggtaaaattctaagcatcatagaagtggatctagacaagaagaaaaactttcttgacaaactatctccgggaaacaacaacagtaacaatgaagaccttaagatacgcacggcagaggatgaataccgcattgtattaaaaagatataaccgtgttaagcagagctgggagaaaattatggaagatatcttaaatgaacggaaagaatttgaggagagagaagccgccgaggttaatagttgtttaaaatcaataagagatttgaacatggatgaaaagaaacactatttacaattatggcaagactttgtaccagatgagcacataagccaatga

SEQ ID NO: 80536 - DNA, 558 bp, Saccharomyces pastorianus
atgtatgaggatttatcgatagaatattttcaaacttgcagagctatacattgtgactgggcatattcgaactcaattaccttccgaatggacgaaaacaatgagcataatacattcaaggtttcatattcaggcgatacaagacctaacatcgagaaattttccctcgaaataggctataattcagatctattaattcacgaagctacactggaaaatcagctactggaggatgccgtgaagaaaaaacactgcactattaatgaagcaattggtgtttcgaacaaaatgaatgctaggaagttgatcttaacacacttttcccagagatatcccaaattgccccaattagacaataatattgatgtgatggcgagagaattttgttttgctttcgacagtatgatcgttgattatgagaaaattggtgaacagcagcgtatttttccactgctgaataaggcatttgttgaagaaaaggaagaagaagaagatgttgatgacgttgaaagcgtacaagatttggaagtcaaacttaagaaacacaagaaaaattag

SEQ ID NO: 80537 - DNA, 1869 bp, Saccharomyces pastorianus
atgttcacatttatacccatcacccatcctacatcggatacaaagcacccattgctgctagtccagtctgcacatggggaaaagtatttcttcggtaaaattggtgaaggatcccaaaggagtctgactgaaaataagatcaggatatccaaattgaaggatattttccttactggtgaattaaactggtcagatataggtggattacctggaatgattttgactatcgctgatcaagggaaaagtaatcttgttttgcattacggcaatgacattttgaattacatagtttccacttggagatacttcgtctttagattcggaatagacttgaacgatcacattatgaaagacaaggaagtatataaagataaggtaatagctgttaaatcctttaatgttctgaaaaatgggggggaagacaggttaggcgtcttcgatagttttcaaaaaggtgtattacgttccatagtagcaaaaatgttccccaaacatgcacccaccgataggtacgatccttctagtgatccgcacttgaatgtagagttgcctgacttagacgccaaagtggaagtttctacgaattacgagatttcattcagtccagtgaggggtaaatttaaagtggaggaagctattaaactaggtgttccgaagggtcccttatttgcaaagttaaccaagggccaaacaattactttggataacggtattgttgtaactccggaacaggtattggagaatgaacgtcattttgccaaagtattgatcctggatatcccagatgacctatatttgaacgctttcgtagaaaaattcaaggattatgattgtgctgagcttggcatggtgtattattttcttggtgatgaggttaccattaatgataatctattcgcgttcattgacatatttgagaaaaacaattatggtaaagtaaatcatatgatatcccacaataaaatttctccaaacacgatatcatttttcggttctgcattgaccacattgaaattaaaggcactacaagtaaataattacaatttaccaaaaacagatcgtgtgttttccaaggacttctacgacagattcgataaaccactcagcagaggtacatctatgtgtaaatcccaggaagagcctttgaatacaataatagagaaggataacattcatattttttcacaaaacaagacagtaactttcgaaccatttcggatgaacgaagaaccgatgaaatgcaacatcaacggtgaagtggcggatttctcgtggcaagaaattttcgaagaacatgtaaaaccattagaatttcccttagctgatgtcgatacagttatcaataatcaactacacgtggataactttaacaattcagcagaaaagaagaaacacgttgaaattatcaccttaggaaccggtagtgcattgccttctaaatatagaaatgttgtctccacacttgttaaagttccttttactgacgccgatggaaataccataaatagaaacattatgctagatgctggtgaaaatactttaggtaccatacacaggatgttttctcagctagcagtcaagtcaatatttcaggatttgaaaatgatatatctgagtcacttgcatgcagaccaccatttgggaataatcagcgtgctaaatgaatggtacaaatataacaaggatgatgaaacgagttatatatatgtggttactccatggcaatatcacaaatttgttaatgaatggttagttctagaaaataaagagattttgaagagaatcaaatacataagttgtgagcatttcatcaatgattcgtttgtaagaatgcagacacaatctgttcctttggcacgagttcaatga

SEQ ID NO: 80538 - DNA, 1518 bp, Saccharomyces pastorianus
atgtgtgttggtttgttcccatcacaaaatcaaaatgtcaaactaaatgttaccgatttaatcaacttatgcttttatgatggaattctggaagaaggtgaaaaaactataaggtatgaacttttggagttagacccgatggaggttgatacatccaagctatcatggttcatagattttgattacttaaactgtatcaatcaatgcttttttgattttacatttgcgtgtgaggaggaaggaagtctggattcttataaagagggcttgttaaagattgtgaaaattttatattatcagttcaaccaatttaaaatatggatcaacacgcaacccgttaaatctgtgaacgccaatgataattttataaatatcaacaatctttatgatgataaccacctggattggaaccacgtcctttgtaaggtaaatctaaaagaacagtgtattcaaatagcagaattttacaaagatttatcgggattggtgcaaacattacaaactttagatcaaaatgactcaacaaccgtatcgctatacgaaacattcttcaacgaattccctaaagagtttagctttacattatttgaatatttaatcaagcataaaaaattgaacgacctcatcttcaggttcccacaacaacacgatgttttaatacagtttttccaagagtccgctccaaagtacggtcatgtagcatggatccaacagattctggatgggtcatacgcaggtgccatgaatactttaaaaaacattactgttgatgattcaaagaagggcgaaagcttgagcgaatgtgaattgcacttgaatgttgcaaaattaagctcgttgctagttgaaaaggataatttggacattaatactttgagaaagatccaatataatttagatacaattgatgctgagaaaaatatttcaaacaaattgaaaaagggcgaagttcagatatgtaaacgcttcaagaatggctctatcagggaagttttcaacatattagtggaagagcttaaatcaacaacagtagtcaatctatcggatctcgttgagttgtattctatgctcgacgatgaagagagcttattcataccgttaaggcttctttctgttgatggaaacttactgaattttgaagttaaaaagttcttgaatgctttggtatggagaagaatcgttctactaaatgatagtaatgaaggagataaactgcttcggcatatagtcaaacgtgtttttgatgaagaactacccaaaaataatgatttccccttgcccagtgtggatcttttatgtgacaaatcgttactgacgccagaatacataagcgaaacatatggcaggtttcctattgatcagaatgccatacgtgaagagatatatgaagaaatatctcaagtggaaacgttgaactcagacaactcactcgagataaagttgcactcgactattggttctgtagcgaaagaaaaaaactataccatcaactatgaaaccaacactgtagaatactaa

SEQ ID NO: 80539 - DNA, 1212 bp, Saccharomyces pastorianus
atgggtaagtcatccttcaaatttgcatggattatggatcagacaaatgaagagcgcgaacgtggtgtaacagtgtcaatttgtacatcgcatttctctacccatagggcaaattttactattgtggatgcgccaggccatagagattttgttccaaacgctataatggggatatcacaagcagatatggctatactttgtgtagactgtagcaccaatgctttcgaatcaggatttgacttggatgggcaaacaaaggagcatatgctactggcatctagtcttggaattcacaatctgattattgctatgaataagatggataatgttgactggtcccaacaaaggtttgaagagattaaatcgaaattgttgccatatctggttgatattgggttttttgaggataatattaattgggtacctatcagtggcttttccggagaaggtgtttataaaattgaatatacagatgaagtgagacaatggtacaatggtcctaacttaatgtctactttggaaaatgcggcgttcaagatttcaaaggagaatgaaggaattaacaaagatgatccgtttttgttttctgtgttggagatcatcccatcgaaaaaaacaagtaacgatttagcactagtttcaggaaaattggaatcaggttctattcaacctggtgaatctttgacaatatatccgtcggaacagagttgtattgtggataaaattcaggttggttctcaacagggccaatcaacgaatcacgaagagacagatgttgccattaagggtgattttgtcactttgaaattgcgcaaagcctatccagaagatattcaaaatggtgatttggcagcatcagttgattattcgtccattcattcagcacagtgttttgttctggaattgaccacctttgacatgaaccgacctttgctgccaggaacaccgtttattcttttcatcggagtcaaggagcaacctgctcgaatcaaaagattgatttcatttatagacaagggcaatactgcaagcaagaaaaagattagacatctaggctctaaacaacgagcatttgtagaaatagaactaattgaagtaaagaggtggattcctttattaactgcccatgaaaatgaccgtttgggaagagttgtttttagaaaggacggtagaaccattgcggcaggtaaaatatccgaaataactcagtag

SEQ ID NO: 80540 - DNA, 621 bp, Saccharomyces pastorianus
atggcttacagtgactacagcgatggagcagacgacatgccggactttcacgacgaaggtgaatttgatgattatttgaatgacgatgaatatgatctaatgaacgaggtatttcctactctaaaggcgcagttacaggattaccaagggtgggataatctttcacttaagctagctttgtttgacaacaatttcgatttggaaagcacgctggcggaattgaagaaaactttgaagaagaagaagacaccaaagaagccaattgctgttgctaatgggagtgcgaatgttactcaaaaactggcaaacatctcaatttcgcaacaaaggccaaatgatcggcttccagactggcttgacgaggaagaaagtgagggtgaacgcaatggtgaggaagccaatgatgaaaagacagttcaaagatactataagactacggtgccaacgaaaccaaagaaacctcatgatatttctgcatttgttaaatctgccttacctcacttaagttttgttgttcttggtcatgttgatgcgggaaaatcaactctaatgggcagactactttatgatctgaacattgtcacaccaatcccaactgagaaagctacaaagagagagtga

SEQ ID NO: 80541 - DNA, 741 bp, Saccharomyces pastorianus
atgtttcttaagacacctaattgggaaacggtaaatgagactcccaaatcgagagtattaacgataaacgaattgatctctcccaacctggatactgaatctaagagccttctggcgacgccggcaaggaaatatttcaaaacttcaataagtgaagcgcaagattctcctacatctgccccttcgcccgatggcaatgaggatcccacatatcaatacaacgtacaatttcactttccaggaccaataacacctacaacacccaggtctaagaatgcagaaatgtttccatcccccacgcccccattggtttctcccacagcggttatcgaggaagagaatgacgattccgtacgggagttttcacgcacgctaaaatcaagactcaactgcgcaatggttaaactatcaaaggaacatgagcaagtagctttgattcctccacctccgacggaaaagatacgaaagggctcttatagtaataaatttgccgctaagcataggcgctgtcactcgttagatgaatccaaaaagtttctgagttctctggaagattcatccgctcatgcagcgttcttgaaggcaatttcgtccaaacatgctaaaaggaataaggtagacaacgttaacgtttcgccgttacgttggtcatctcatagaagaacgcaaagtacacaggagaattctttacaagaagttgttgctatcgatacattattgaagatgtcctcatcggactga

SEQ ID NO: 80542 - DNA, 207 bp, Saccharomyces pastorianus
atgcctgcaggtcttaatttcgaagcttgggagttgacagacaacacctacaaaggcgcggctggaacatggggtgaaaaggcaaatgaaaaattaggtagagtaagaggtaaagatttcacgaagaacaaaaataaaatgaagagaggttcttacagaggtggatccattacattagaaagtggttcatacaaattccaagattaa

SEQ ID NO: 80543 - DNA, 99 bp, Saccharomyces pastorianus
atgtttaatttgaataatgagctagatttgcagaaaaaagggatggaaaaagaaaaagctgactctaagaaaagggatatcaattttacagaacaataa

SEQ ID NO: 80544 - DNA, 1833 bp, Saccharomyces pastorianus
atgttgagacaaaaaatttctttgatggatgttgaattacaagatgctcgtactaagctagataattcaagagttgaaaaggaaaatcattcttccattattcaacagcatgacgacattatggagaaattaaatcaattaaatctattaagagaaagtaacataacattgcggaatgagctggaaaacaacaataacaagaagaaggaactgcaatctgaattagataaattgaagcaaaatgttgcgcctatcgagtccgaattgactgccttgaaatattctatgcaagaaaaagagcaagagctcaaattagctaaagaagaggttcatcgttggaaaaagcgctcacaagacatattggagaaacatgaacaattgagctcaagcgattatgagaagctagaaagcgagatagaaaatttgaaggaggaactagaaaataaggagcgtcaaggagcggaagccgaggaaaaatttaacaggctgagaagacaagcgcaggagagattaaaaacatcaaaactctcacaggactcattgactgaacaagtaaatagtctaagggatgcaaagaacgtgttggaaaattccttgagtgaggcaaacgcgagaatcgaagagttacaaaatgcaaaagtagcacaaggtaacaaccagttagaagcaataagaaaattacaagaagacgcagaaaaggcttcaagagagcttcaagccaagttagaagaaagtacgacttcttacgaatctacgataaacggcttaaatgaagaaattacaacattaaaagaagaaattgaaaaacaaaggcaaatccagcaacagttacaagctacatctgcaaatgaacaaaatgacttatctaacatagttgaatctatgaaaaagtcttttgaagaagataaaatcaaattcatcaaagaaaaaacccaagaagttaatgaaaaaatacttgaggcccaagaaaggctaaatcaaccttccaatatcaatatggaggagattaaaaaaaaatgggaatctgagcacgaacaggaagtatctcaaaagattcgcgaagctgaggaagccctcaaaaagcgaatcagattacccactgaggagaaaatcaataagataatcgaacgaaagaaggaggaattggaaaaagagtttgaagaaaaggttgaggagagaataaaatcaatggaacaatctggagaaatagacgtggtgcttcgaaaacagctagaagctaaggttcaagagaaacaaaaggaattggaaaacgagtataacaaaaaattacaagaagaactcaaagatgtaccacactcccctcatatctcaggtgatgagagggacaagttacgggcagaaatcgaaagcaggttgagggaggagttcaacaatgaactgcaagccataaagaagaaatccttcgacgaaggaaagcaacaagcaatgatgaaaactacccttttggaaagaaaacttgccaagatggaatctcaattgtcagaaacaaaacaaagtgccgagactcctccgaaatctgttaacaatgtacaaaatccattactaggattacctaggaaaatcgaagagaattcaaattcaccatttaatccgttactttccggtgaaaaactcttaaagctaaattctaagtcttcatcaggtggatttaacccttttacctcgccatcccctaataagcacttacaaaatgataatgacaaaagggagtcgttggctaacaagacagatccaccaactcatttggaacccagcttctacattcccgcctcaaggggtctaatatcttcatcttccactttgtcaacgtga

SEQ ID NO: 80545 - DNA, 108 bp, Saccharomyces pastorianus
atgctagtccagttcagaagcattgatgatagggtgcttcgagtgggagttagcagtatcatagacagtatcaaaaccattgtggaagccatggacgttctatcataa

SEQ ID NO: 80546 - DNA, 231 bp, Saccharomyces pastorianus
atggtcagttcgtgggcaaaagtcagcctgtatgacgttgatttcaatctagggcttgggaagcccaagagtgtacgtcggccgcgcttcattcctcttgagagcctaatatatttcatgcctagatcctctagaggtgaaatggtggttgctctttgccttagagataaagattgggagtgcctgaatgcggataaagaatggacaaattatgctacacatataggatga

SEQ ID NO: 80547 - DNA, 1245 bp, Saccharomyces pastorianus
atgtttagagtcaagatcatctctcagaaacgtacacaaagtgtacagatgctagaaaacgatcaacttgatattttgggacaacaaccttcgctatacaaactatacactcaaatatgctctatctaccgtgtaccagatccttctgctcatgaccatatcgtaaataccttaacaagaggacttgaaacattggctaaaaatttccagtggctagcaggaaatgtcgtgaatgaaggtgctgacgaaggtaacactggtacctacagaattgtcccgtcagacaaaattccacttatcgtccaagatcttcgagaagatctgtctgccccaacaatggattcgcttgaaaaagctgactttcctatctacatgttagacgaaaagacttttgcgccttgcatgactatcaatccacctggaaacaccataggtatggccgccaagagtgggcctgtatttgcagttcaagcaaactttatctccggcggcctcgtcttaactattgtcgggcagcacaatattatggatataacaggacaggaaagtatcatcaatttgctcaataaatcttgccaccaaaaacctttctctgatgaagaactgctcattggaaatatagataaaagcaaatctattcctttgtttgatgaaacttgggaacccgacaccacgctagttcatgaaatagtggaaacctctagaaatacaagtggagaggaaaaggaacagtcttgttcttcgaactctacttgggcttatgttgaattttctgctatctcattgcagaatctgaggattttggcaatgcagacatgtacttctggcacaaaatttgtctccactgatgatatcgtcactgctttcatctggaaatcagtttctcgagcccgtttatctcgacttaaaccagaaacgaaatcaactgtagggcgtgctgtggatgttagaaaacggctaggactccccgcaacgtatccagggttattagtcaacatgacctttaatacaggttccctgaaaagcttggatcataaaagtttgggcgttcttgcatcacagattcgcaggaagctagaccctaagtcttcgatttggcctataatacatgcgcacttgctacgctccttagccgatgcccggacaagactaaggtttctatacctcaaccaattgatactgtatctggaattatggtcagttcgtgggcaaaagtcagcctgtatgacgttgatttcaatctag

SEQ ID NO: 80548 - DNA, 660 bp, Saccharomyces pastorianus
atgaaacaaaaaatgataatatatgacacacccgcagggccttatccggcccgagtccgcattgccttggctgagaagaacatgctatcaagtgtgcaatttgtcaggatcaacctctggaagggagagcacaagaagcctgaatttcttgccaagaactattcaggcacagtgccagtgcttgaacttgatgacgggactttaatcgctgaatgcacagccattactgaatacattgatgcacttgatggtacacccactcttaccggcaaaacaccgctggaaaaaggcgtaatccacatgatgaacaaacgcgcagagttggaactgctcgaccctgttagtgtttattttcaccatgctacacctggattggggcctgaagtcgagttctaccaaaacaaagagtgggggcttcgccagcgcgacaaagccctacatggaatgcattattttgatacagttctcagagaacgcccatatgttgctggtgattcattctcaatggctgacatcacagtaatagctggtctaatatttgctgcgattgtcaaactacaagtgccggaagagtgcgaggcgcttcgagcttggtataagagaatgcaacagcgccccagcgtgaagaaactgctagaaatccgttcaaaatcctcgtaa

SEQ ID NO: 80549 - DNA, 186 bp, Saccharomyces pastorianus
atgtctaacgaatctaacgaccttgaaaaaaacatttcgcacttggacccaaccggtgttgacaatgcttatattccacctgaacagccggaaacaaagcattcgcgttttaatattaacagagataccttaagaaaccactttatcgctgctgtgggtgagttttgcggtactttcatgttttaa

SEQ ID NO: 80550 - DNA, 2169 bp, Saccharomyces pastorianus
atgaagcatgacgaccatagctcgttgaatatgcatagaacgcttctgtttttaacgtggctgatatctttaacaaaggcttttaatataaaattaccacacactgaaaaaaaagaccatttggaatccaacgctgtgctggcatgcgcatcctatataaatactctgaagtggtcatttgatagctccgtcgtaccgggtttctattctaccatatgctcttattcaccagcgtttgatacttggtcactttgtatcttcaattcgcttacagaccagattattcccatggacaacacaagtttcgaagaaagcttgggtaacgtacgaaaaacgtgctcgtttgtcgataaaaagtttagcaatatttcactggagcaatactactcatctttaaataatgcttcttctcacgctttggaagactatggttctattgaaagtttatcgacatccattcgagtcgatcgtgagacaagatctagatggatacgagcttttcatgcgcatgcctataatttagatatcagcagtgtttatggtgcatatttaacttactacttcgtcatagtgggtattatcgccgtcttcttccatatgagtcactataacggcctgaatcgagcgctatttgcaagccggttcgtcaattatattcggggccattttgtgttgcctacgtttttagtagataagcacgctaatcacttcaagtttctaaacgtggaagtctttacgggactgatgccgaattccttggaggcctggatcatttttggatacacattggcgaacatcatatttttgtccataagttacatcatagacccatataacctcattttcaacagtcacctgtcgcagtttacaagactgttggctgatagatctgggatactggcgtttactcagttccctctcattatcatttttacggcaaggaatagttttctcgaatttttaacaggagtcaagttcaattcctttattagtttccataaatggatcggtagaatcatggtcttaaacgcaacgatacattcgctttcttattcattattcgcaattatcaaccatgccttcaaaataagcaacaaacagctctattggaagtttggtattgcatccataacagtgctttgcgttctactagttctatcgctaggaatagtaaggaaaagacattacgaatttttcctgtacacccacatcatactagcccttttgttcttttactgttgttggcaacacgtcaaaattttcaacggttggaaagagtggatagtggtatccttgctcatttgggggctggaaaagcttttcagaatatggaacattttgcagtttagatttccgaaagcaacactaatcaatttgaacaccagcaacaacccgcacgatgaaatgtttaaagtaatcatacccaaatataaccggagatggcattcgaaaccgggtcaatattgtttcatttattttttacatccattggtattttggcaatgccatccatttaccattatcgacgaaggtgaaaagtgtgttttagtgatcaaacctaaaaatggtctcactagattcatttataaccatattttgcaatctttaaatggtaaattacaactccgagtggccattgagggaccttatgggcccagtaatcttcacctcgataaattcgaccatttgctgttactaagtggaggaacaggcttgcctggtccattagatcatgccataaagctgtcacgaaaccctgataaacccaagagtatagatttgatcatggcgatcaagaatccttcttttcttaacggctataaatccgagatactagagctaaaaaatagccgatcccacgtcaacgtgcaggtttaccttacacagaaaacagctgttacaaaggcagcaaacgcacgagaccaattaatacattttgatgatataatgaccgaactgacaagcttcgcccacatcggcaatgcaagacctgattttagcaatgtaattgaaaacgcaataaaaagtacgccgcctggagattcattagcggtcgtgtgctgcggccctcctgttctggtggacgatgttagaaacaccgtttctcaaaaactcctcggttaccctgagagaattatagagtatttcgaggaatatcagtgttggtaa

SEQ ID NO: 80551 - DNA, 471 bp, Saccharomyces pastorianus
atgtggggggaaaaattcataagaagccaggaaaatgtgaagtttctgtgtagtgttgctgttgctgatgaatcccttaccgctttcaatgacttgaagttgggtaaaaaatacaaatttattttattcggattgaacgatgctaaaaccgaaattgttgtcaaggaaacctctactgacccatcttacgatgccttcttagagaaattgccagaaaacgactgtctttacgccatttacgattttgaatacgaaattaatggtaatgaaggtaagagatccaagattgttttcttcacttggtctccagacactgctccagtcagatcgaagatggtctatgcatcctccaaggatgccttaaggagagccttaaacggtgtctctaccgatgttcaaggtactgatttttccgaagtttcttacgattctgttttggaaagagtcagcagaggcgctggttctcattaa

SEQ ID NO: 80552 - DNA, 162 bp, Saccharomyces pastorianus
atggatgcaggtgaggtaaaagagtatgatcacccatattctttgttacttaacaaacaaagtgccttttatagcatgtgtgagcatagtggagaattggatatcctaattgaattggctaaaaaagcctttgtggaaaaattgaactctaaaaaggactag

SEQ ID NO: 80553 - DNA, 903 bp, Saccharomyces pastorianus
atggcaggttctcgtgaattgaaaagatttgaatctatttctagatcaccgatctatcaacatttttccgagactcttgtcggtgttaccaccattcgtgcgtttggtgatgaagggaggtttatgcaagagaatttacacaaaattgatgaaaataataaaccattcttctacttgtgggttgctaatcgttggctggcctttaggatagatatgattggatccttggtcatttttggagctggtttgttcattctattcaatattaataatctggattcgggtatggctggtatatctttgacgtatgctatttccttcactgaaggggcattgtggttggtaagattgtactccgaagtggagatgaatatgaattctgttgaaagagtcaaagaatatatggaaattgagcaagagccatacaacgaacacaaagaaataccgccaccacaatggccacaagacggtaaaatcgaggttaatgatttatcattacggtatgctccaaacctacctagagtaattaaaaatgtttcattttctgtcgacgctcagtctaagatcggtattgttggtagaaccggtgccggtaaatcaactattattaccgccttgttcaggtttttggaacctgagacaggccatatcaaaattgataatatcgatatttccggtgttgatttacaaagactgcgtcgttctataactattattccacaagatccaacactattctcagggacgattaaaacaaacctagacccatatgatgaatttagtgacagacagatctttgaagctttgaaacgtgtaaatctaattagtgaagaacaattacacaaggcgccacaagagaaacagcatgaggttcgtcgactactccgaaatgttataaatctg

SEQ ID NO: 80554 - DNA, 255 bp, Saccharomyces pastorianus
atgggtgttccatacgccattatcaagggtaaggctagattgggtactttggttaaccaaaagacttctgctgttgccgctttgaccgaagtcagagccgaagacgaagctgctttggctaagttggtttccaccattgacgctaacttcactgacaaatacgatgaagtcaagaagcactggggtggtggtatccttggtaacaaggctcaagctaagatggacaagagagctaagacttccgactccgcttaa

SEQ ID NO: 80555 - DNA, 108 bp, Saccharomyces pastorianus
  modified_base (89)..(89): a, c, g, t, unknown, or other
gacagaaacaccgctgctgaaaccttcaagttgttcaacaagtacagaccagaaaccgctgctgaaaagaaggaaagattgaccaaggnaagctgccgctatcgctga

SEQ ID NO: 80556 - DNA, 4011 bp, Saccharomyces pastorianus
atgattccaataacattccacctatcaaaagggcattctgaaatggatcctgctttctcttttgatattgtaactcaaagaatcgcggaaattacactttctgctaggtcaatcgctatgctttctcacatcccggcgtctctaaccgaagagctgcccttagcttccagggtatctcagaagccatatcaactggtaaacgatacagaattagattttgacgtctggatacaggataaaacgactgaagacaacaaaaacgaagttgtgctcttaaaagcaaacacttctcttccttgggaatttgaagattggagaagtattagagagaaattggatattgataagtcgaaaaacattttgggtgtttgtgtttctgggcaaaattataaaaccattatgaatattgatgccacaacagaaggtgaaaacttgcatgttttgagcccaccaagaaataatgtgcataatagaattgtttgtgaggccagatgtgatgagaataacgtgaagattattacgtttaggtcaactttagttatcgaaaacacaacttcaactgagattgagcttttggttgactccaaagatccaaataagccatctttaaaatatgctattaaaccacatcaaagtaaatctgttcctgtagaatatgcctacgattctgatattaggataagacccgcatcagaggatatatacgattggtctcaacagacgttatcttggaaaagcttgttgagcaaccaaatgtctatattctgttcttcaaaagaagattccaatcaaagatttcatttcgaaattggtgcaaagtatgatgaaagagaaccattggcaaagatctttcctcatatgaaaatcgtggtttcggcatctatgactattgaaaatttacttccagcagatattaacttctctatttttgacaaaagagaggagaagagaacagatttcttgaagactggagaaagtatggaagttcatcatatttctttggatagtttcctgctaatgtctgttcaaccattacaagatgaggcttctgcttcaaagccctccatcgttaatacaccacataaaagtcctttaaacccagaagattcgttgtctttgaccctatctggaggtcagaatttgttgttgaaactagattataaaaacatcgatggtacaaggtccaaagttattcggatatactccccttatattattatgaactctaccgatagagaactctacattcaaagtagtctcttaaatattgcacaatccaagattttgcttgaaaacgaaaaaagatatactattccaaaaatgttttcatttgataaagaagatgataaaagtaacagagctcgtattaggttcaaggaatcagagtggagttccaaattatcatttgacgctattggccaatcatttgatgcatctgttagcataaaaaataaggaacaagaatcaaatttaggcatcaacattagcgaaggtaaaggcaagtacttgctaagtaaagttattgagattgcacctaggtatattataagcaatactttagatatccctattgaagtttgcgagacagggtctatggatgtccagcaaatagaatcgaacatcactaagcctttatacaggatgagaaacatcgtcgacaagcaattagtgctgaaattcttaggcggagactccaattggtcacaaccattctttatcaaaaatgtcggtgtaacatatttgaaagttttgaaaaattcacgccataagcttttaaagattgaaattcttttggacaaagcaacaatatttataagaatcaaggacggtggtgacagatggccattttccataagaaatttcagcgaccatgactttatattttaccaaagagatcctcgtaaagttagtgatccatacaaggatgaccagtctaacgagtcctcaagccgtagtttcaaacctatcttttacaggattccctcgaaaagtattatgccatacgcatgggattttcctacagctaaggagaaatatctggtgttagaatcaggtacacgtacaagggaagttcggttggctgagattggcgaattgccaccgttacgcctggataaaaggtcaaaggataaaccagcccccattgttggattacatgttgttgctgacgacgatatgcaggccttagttattgttaactataaggccaatgttgggttatacaaattgaaaactgcctctgcaactaccacgtcttcagtttcagtaaatagttcagtgactgatggctttgtacaaaaggatgaggatgagaaggttaatacacagatagttgtttcgttcaaaggagttggtatctcattaatcaatggtcgtttacaggaacttctatatattaacatgagagggatcgaattaagatacaatgaatctaaagcataccagactttcagttggaaaatgaaatggatgcaaatagataatcaattattttcaggaaactactcaaatattctatatccaacagaaatcccctacacagaaaaggaaattgaaaatcatccagtgatatcaggttctatttctaaagtcaacgattccttacaggctgtcccatactttaaacatgttacgttattaatccaggaattttccatacaattagatgaagacatgctgtatgctatgatggatttcataaaattcccaggatctccatggatcatggattcaagagattataagtacgatgaagaaatccagttacctgatgtttctgaattaaaaacggcgggtgatatatatttcgagatcttccatattcagcccactgtcttacatctgtcctttatacgctccgatgaaattagtccaggattggctgaagagaccgaggagtcattttcgtcatcattgtactatgtccatatgtttgctatgacattaggtaatataaatgaggcgccggttaaagttaattctttgttcatggataatgtaagagtcccattgcccattctgatggaccatattgagagacactatacgacccagttcgtgtatcagatccacaaaattttaggatcagcagattgttttggtaatcctgtaggtcttttcaacacaattagctccggtgtctgggacttattctatgaaccatatcaaggttacatgatgaatgatagacctcaagaaattggtatacatctggctaaaggtggactaagttttgcaaagaaaacagtctttggcctctctgatagtatgtccaagtttacggggtcgatggccaagggcctgtcagttacacaagatctggaattccaaagggtcaggagattacaacaaagaataaataaaaacaacaggaatgccttggcaaactcagcgcaatcctttgccagcacactgggaagcgggttgagcggaattgcactggacccatacaaggccatgcaaaaggaaggcgctgctggtttcctcaaaggccttggtaaaggtatcgttgggctgccaactaagacagccattggattcttagatcttacaagtaacttaagtcaaggcgtgaaaagtaccaccactgtgcttgacatgcaaaagggttgcagagtgcgtctaccaaggtacgtggaccatgatcaaatcatcaagccttatgatctacgtgaggcccaaggacaatactggctcaagaccgtgaatggaggagtatttatgaatgatgaatacctgtcgcacgttatattgccaggcaaagaactagcagtaattgtgtccatgcagcacattgctgaggtgcaaatggccacccaagagcttatgtggagcacaggatatccttccatccagggaattacattggaaagatccggtcttcatattaaactcaagtctcaatccgaatacttcattcccatcagcgatcctgaagaacgtcggtccttgtacaggaacatcgccattgctgttagggaatacaataagtactgcgaagctatcctatga

SEQ ID NO: 80557 - DNA, 93 bp, Saccharomyces pastorianus
atgccaatattggacatgaatgtaaatgaaatcactgcttcagctaaggattggtctacgactgttgaagctcgtgcttctctagatacggga

SEQ ID NO: 80558 - DNA, 249 bp, Saccharomyces pastorianus
atggagaggaggaggagagcacagacaaaatacgattttctcatgaattttgaaaggaaattagcggtgttggatccaagcattttaggtgagcgcagcagggctagccagagctcagattccgaatcaattgtagtgcctacttcaattttgaaaaacgaaacattcaatgctgacttaggcggactgagatttattttaattggtgacgtccaggtaaatgccaatattggacatgaatgtaaatga

SEQ ID NO: 80559 - DNA, 4368 bp, Saccharomyces pastorianus
atgattgcatcgaaaaattccactgcccccaagcatcaatacattttgaaaccggttagcgggctagggaagcttagtatcaacaagctgggttccacggaggaacaacctcacattgacttgcaaatgttttatgatgaatttggtttagaattagatgatacagaatataatgatatcttgtatgtcctctccagtatacagttaagacaaattaccaaaaagtttaagaaagcaagaccatccgtcgcagttagtgaaaacccgacagaatggtttaaatacattgctgcttgtgttattaatgaaattcatgaaaaaaacaaaatgtggacttgggaaagcatgaaggagaaatgtgaacaacggaggttgtacacaaaattatgggttgaaaagttaaagttaaaaaatttagaagctccgctacgtgaccccattcaggaggctcaattatctgaattgcataaagatttaacgtatgatgaaattattctcttcagatctgtcgctaagagacagtacgcgcaatacaagttgggcatgtcggaagactcacccacaccaacagctagctcaaatattgaaccacaaacttccaacaagtccgcaactaaaaataatggaagctggctctcttcttggtggaacggtaaacctacagaagaagtagacgaagatttaataatgactgaagaacagcgtcaggagctttatgatgctattgaatttgacgagaatgaagataaaggtcctgtactgcaagttcctagagaaagggttgaacttcgtgtaacgagtttgttaaaaaagggttcattcactatacgaaagaagaagcaaaatctaaatttgggttccataatttttgaaaattgtaaagttgattttgctcaaagacctgattcatttttatcgagtttccaattgaacaaattcagtctcgaagatggctcacccaacgcgttatacaaacatatcattagtgtcagaaacttatctaaagatcaatcttcaattgacaaccacgctaccggggaggaagaagaagaggatgaacctttattacgtgcttcatttgaattgaatccactagatggattagcagattcgaacttaaacattaagttattgggaatgactgtgttttaccacgttcatttcattacagaggtccacaagttttttaaggcgtcaaatcaacacatggaaacaatcggcaatatcgtaaacgccgcagaggcaactgtagaaggttggacaacacaaacaagaatgggtattgagtctttgttggaagaccacaagaccgtaaatgtatctttagatttacaagcaccattaatcatattaccgttagacccacatgattgggataccccttgtgcgatcattgatgccggtcatatgtctatactcagtgatttagtgccaaaggagaagataaaggaaataaaagagttatcgccggaagaatatgacaagattgacggtaacgaaatcaataggttaatgtttgataggttccaaattttatctcaggatactcagatatttgttggtcctgatattcagtccactataggtaagatcaataccgcctcttccacgaatgattttagaatcttggataaaatgaaattagagttaactgtagatctatcaatccttcctaaagcatataaattacccacgataagagtttttggtcatttgcctcgcttaagtctttccataaatgacattcaatacaagactattatgaatttgattgctaattctataccttctatgattgatgatgaagaaaacaacggcgattacgttaattactcttctggttccgaaaaagaaatgaagaagcaaattcaattgcagttgaagaatactttgaaagcgttagaaaatatgcagccgcttcaaattgaacagaaattcttagagctccattttgatatcgatcaggcgaaaatagcattctttcaatgtatcaaaaatgattccagaaacagcgaaaaattggttgatatattgtgtcaaaggctaaatttcaattttgataagagagtcaaagaaatgaatttagatctaagagtacattcattagatgttgaagattacatcgagctgactgataacaaggaattcaaaaacttgatatcatccggcgttgaaaaagtgacaagatctcaaaaagatttgtttacgctaaaatacaagagagtgcagagaattgtgcctcataacgatactttgattgaattattcgatcaagatattgttatgcatatgagtgaattgcaattggtattaacacctagatctgtattaactttaatgaattatgcaatgcttacttttacggatcctaacgctccagaaatgccggctgatgtgttgagacataataaagaagatagggacgatgcgccacaaaaaatcaatatgaaaattaaaatggaggccgtcaatgttatttttaatgatgattctataaagctggcaacgttagttctatcggctggtgaattcacaatggttttactaccggaaagatacaacattaacttaaaattaggcgggttggagttgactgatgaaacaaatgaatcgttttccagggattcggtatttagaaaaataattcaaatgaaaggtcaagaactagtcgaattgagctatgaatcattcgatccggctacaaataccaaagattatgattcgtttttaaaatattctacgggctctatgcatgttaattttatcgaaagtgctgttaacagaatggttaacttttttgctaaatttcaaaaatctaaagtatcctttgatagagctcgtcttgcagcgtacaaccaagccccttccattgacgccgtaaataacatgaaaatggacatagtaatcaaggcacctattatccagtttcctaaattagtaggcacacaagagaacaattacgatacaatgcggttttatttgggtgagttctttattgaaaacaaattttcggtaatagacgaatctcataaaataaaccatatcaaacttggtgtccgcgagggccaattatcctcgaacttaaacttcgatggttccagtcaacaattgtatctagttgaaaatataggtttacttttcaatatagacagagatccccttccgcaagatgacactccagaacttaaagtaacgagtaattttgaatcatttgcgttggatttgactgagaaccagctgacttacttattagaaatttccaataaagtatcctctgcattcaatatcacagacgaaaactctggtgaatcaggaggaaaaggcgagatcaaaagtccctctcctgaccctgcttctttaagtagcgaaagcgaacgcacagctactcctcagtctctacagggatcgaataaaagcaatataaaaaatccagaacaaaaatacttggatttttcttttaaagctccaaagattgcccttactttatataacaagacaaagggcgtcacttctttgaatgactgtggtctgacaagaattatgtttcaagacattgggtgcagccttggtttaaagaatgatgggaccgtcgatggtcaagcacatgttgctgctttccggatagaagatgttcgtaatataaaagataataagcatacagaactaataccaaagagtaagaataaagaatatcaatttgtggctaatatttccagaaagaacttagaggtcggacggctattgaacatttcgatgacaatggacagtccgaaaatgattttggcaatggactatttggtttctctcaaagaattttttgatgcaattatgtccaaaagccacgaaaacaatttatactatcctgaaaacacaaaccaaaagcctgaaaacaaggctattgttgaaagcgttcaagaaggtggtgatgtgactaaaatccaatactctgttaatatcatcgaaacggctctgatcttacttgctgatccttgcgacatgaatagtgaggctatttctttcaagataggacaatttttagtaaccgatcagaatattatgacagttgcagccaataatgttggtatcttcctattcaaaatgaattcgtctgaagaaaaattgagattattggacgacttttcatcctccttgacaattgataaaagaaactcaacttctcagaccctaatgacgaatatacagctttccgttcagcccctgttgatgcgtatttcacttagagatattcgtctggcgatgttaatattcaaacgagttaccacattgctaaataagatgacggaaaaagaggataatggagaggaggaggagagcacagacaaaatacgattttctcatgaattttga

SEQ ID NO: 80560 - DNA, 678 bp, Saccharomyces pastorianus
atgttagagtctttagctgctaatttgctaaaccgattgctaggctcatatgtggaaaatttcgaccctaatcaattaaatgtcggcatatggagtggtgatgtgaagttaaaaaacttaaaactaagaaaagactgtttggactcattaaatttacccatagatgtgaaatcagggatactgggtgatttggtcttaacggtcccatggtcaagtttaaagaataagcccgtgaaaatcattatcgaggactgttatttattatgctcaccacgttcagaagatcacgaaaatgatgaggagatgataaagagagcttttcggttgaagatgaggaaggtaagtgaatgggaactgacaaatcaggctcgcatactgagtacccaatcagagaacaaaacctcttcttcttcttcagaaaaaaataacgccgggtttatgcagtctttgactacaaagatcatagacaatttacaagttaccataaaaaatatccatttaaggtacgaggacatggacggaatcttcactacaggcccatcttccgttggattaactttgaacgagctatcagctgtatctacagattccaactgggctccaagtttcattgatattacacagaatatcacgcataaactattgactttaaattcactctgtttgtattggaataca

SEQ ID NO: 80561 - DNA, 462 bp, Saccharomyces pastorianus
atgcaaattttcgtcaaaactctaacagggaagactataaccctagaggttgaatcttccgacactattgacaacgtcaaaagtaaaattcaagacaaggaaggtattcctccagatcaacaaagattgatttttgccggtaagcaactggaagacggtagaacgctgtctgattataacattcagaaagagtctacgttgcatttggtgttgagattgagaggtggtatgcaaattttcgtcaaaactctaacagggaagactataaccctagaggttgaatcttccgacactattgacaacgttaagtcgaaaattcaagacaaggaaggtattcctccagaccagcaaagattgatttttgccggtaagcaactagaagatggtagaacgctgtcggactacaatattcaaaaggagtccactcttcaccttgtcttgaggtcgaggggtggtaactga

SEQ ID NO: 80562 - DNA, 492 bp, Saccharomyces pastorianus
atgcagattttcgtcaagactttgaccggtaaaaccataacattggaagttgaatcttccgataccatcgacaacgttaagtcgaaaattcaagacaaggaaggtatccctccagatcaacaaagattgatctttgccggtaagcagttagaagacggtagaaccttgtctgactacaacatccaaaaggaatctactcttcacttggtgttgagattgagaggtggtatgcagatctttgttaagactttgaccggtaaaaccataacattggaagttgaatcttccgataccatcgacaacgttaagtcgaaaattcaagacaaggaaggtatccctccagatcaacaaagattgatctttgccggtaagcagctagaagacggtagaacgctgtctgattacaacattcagaaggaatctactcttcacttggtgttgagattgagaggtggtatgcaaattttcgtcaaaactctaacagggaagact

SEQ ID NO: 80563 - DNA, 246 bp, Saccharomyces pastorianus
atgaacatttatgtgccaccttgccatacccagattttagataaacaacctgaggatgctcaatggataatagtaagaaataagacggaaactcctttttgtgactttcttccatccccccgcacaattacatgggatgataatatacaaataccgttcgcaacttttgaaagaaggaaaaaattggaacatgtgtggaaagttcgtaagaacgtcatgagacgtggccaattcatgaaaagataa

SEQ ID NO: 80564 - DNA, 1611 bp, Saccharomyces pastorianus
atggtgatagattccaaacaggatctacctcaatataccaaagattcaggttcagaatcggactcagactcaagtaataatttcattgtgggatctccgtcaattccatcttcaaaaagtgcaaccgtagttctcaatagtgaagagtatgaggacgacgaaggtgatgacttgaacgggctggatgctgaattgatcgataatataacgtatgaaggagatgaagatgaaactatgtttgtggggttgaaagaaaaacagaagttacatttatctggtgttttccggctgcaagtggtgaaaggaggtattgtctacaacaatgtacactataacgcttcgagagaaattttaaccttctggcacccgttatcacagtccatacctactatagatttttcgcactttgcaggctggcaagacactatttttatgccgagaaacaacaggtttaaaattagagatgaagaattcaaatcatttccatgtgttcttcgcgtttttaattctaatcatacgggcttgttagaagcaggtcatttatatcgggatgttaattatctatggaaacctaaagaaccttactttccattaaacgagagaacaacgtatcatttattacatgagtcagaccgaattcaatctttatccgtaccgggatattggtcaactccgttagagaagttatatttgagtcacaagaacgctgcgtatgatacaagaatcatggtgattggtggtaaaaactctgggaagtctacattcttgaggcttttattggaaaaatttacgcaagatatacgagattctactacgagccaggaagaattggtatacctggatttagatcctggtcaacctgaatactcactacctgattcaatatccctgaataagattctttccagccctatttctctcggacaacatctctgccaaggttcaaatttccaaactttgttacagttctacgctggctcctcttccccgcaggacgagcccacatcatacctgaactgcgctgataaacttatagaccatttggaagagcaagccttcttcggaacgtcattgcttaatctacctgggtggataaaaggattcgggatgcagattttaaatcatataataaggaaatataagcccactcacttattgtttttggaaacagctaattcgaaaagacacctggatgaactaacaattccacagagtttttccacatcactacgagatgcatatgcacctgaagttgttcgcgttccagcccatagtctgaaccacaccttatcttctaggttccatgcatcacaactgagaacattcaaaatactggcactgtttcataaaataactcaatttgattatgattttgcgcctcttttaaaatctgcacctttgcaaatttcatatggcaaaggtaaaagcggtattaaaggcattcaatttcctatggaattccagaatctgaatcctcaagatatcaagtccgcattggaaggtactgtcattgggatatatacatattctggagaagactcactagaggtgaaatccttgaatacctttcccatcctacaatcgtgtacttcttcttctaaaaattcataa

SEQ ID NO: 80565 - DNA, 141 bp, Saccharomyces pastorianus
atggtttggaaaatcttctgcccaaggtttatctttgcttctttaagtttaatagtcactcaactggtcgttacttttggtacaattgcatttgctagtgggagattgattaagcacataaatgacattttttggaaatga

SEQ ID NO: 80566 - DNA, 1005 bp, Saccharomyces pastorianus
atggcagtcgtccccgccgcatttgccgacatgtgtgatactaatgttagaggtaaagccattgcgctattttctctaggtgtttttgtaggccccattttatcgcctgtcatgggttcttatatcgcacaaagaactacctggagatggttagaatatgttgtcggttgtttcgcttccgcagttttcgttgccatcgtattgttctttgaagaaacacatcaccctaccattttggttaacaaggccaaacagatgagaaagcaaagtaataactggggtattcatgctgctcatgaagacgtggagctatccatcaaagacattgtccaaaaaactgtgacgaggcctatcatcatgcttttcgtggaaccattgctactattcgtgactatttacaactcttttgtctacggtatcttgtatttgttactggaagcctacccacttgtctttgtggagggttatgggtttactgaaaacggtgagttgccatacatcgccttgattatcggtatgatggtgtgtgctgctttcatttggtatatggacaacgattatttgaaaagatgtagagccaaggggaaattagtgcccgaggccagattatacgcaatggtcattgcaggtaccgttttccctattggtatcttatggttctgttggacgggctactatcctcacaagattcattggatggtccccacagtaggaggggccttcatcgggttcggtttaatgggtattttcttgccatgtttaaactatatcattgaatcgtatctattgttggcagcttctgccgtcgcagcaaacactttcatgaggtctgcatttggtgcatgcttcccattgtttgcaggatatatgttccgtggcatgggtatcggttgggctggtttgttattaggtctatttgccgctgcgatgattcccgtgcctttactattcttaaaatatggtgaatctatcagaaagaaatccaagtatgcttacgccgcttaa

SEQ ID NO: 80567 - DNA, 1122 bp, Saccharomyces pastorianus
atgatccaaaatgtggtcgattcagacaccatttctgaaacagctgcaagattgactggtatccctgttaagaagttgtcagaatctgaaaatgaaaaattgattcatatggaacgtgacttatcatctgaagtcgtgggccaaatggatgccattaaagctgtttccaatgccgttagattgtctagatcaggtttagctaatccaaggcaaccagcatccttcttatttttaggtttgtccggttccggtaaaactgaattggctaaaaaagttgctggatttttgtttaatgatgaggacatgatgatcagggtcgattgttctgaattaagcgagaagtatgcggtctctaagttgttgggtaccacggcaggttatgtcgggtacgatgaaggtgggtttttaactaaccaactgcaatacaaaccatactccgttttgttattcgatgaagtagaaaaggcacatcctgatgttttgactgtcatgctacaaatgttggatgacggtagaattacttctggtcaaggtaagacgatcgactgttccaattgtattgtcatcatgacttccaatctaggtgctgaatttatcaattctcaacaaggatcaaagatccaagaatctaccaagaatttggtcatgggtgctgttaggcaacatttcagaccagaatttttgaacagaatttctagtatagtcattttcaacaagctatctagaaaagctattcataagatcgtggatattcgtttgaaggaaattgaagagagattcgagcaaaatgataaacattacaagttgaatttaactcaagaggccaaggacttcttggccaaatatggttattccgatgatatgggtgcacgtccactgaacaggttaattcaaaacgaaattttgaacaaactggcactaaggatcttaaagaatgaaatcaaggataaggaaactgtcaatgtcgtcttgaagaagggtaaatctcgtgatgaaaatgttcctgaggaagctgaagaatgtctggaagttctaccaaatcacgaagctactataggggctgacacgttaggtgatgacgataatgaggacagtatggaaattgatgatgacctagattaa

SEQ ID NO: 80568 - DNA, 735 bp, Saccharomyces pastorianus
atgaacgaccaaacgcaatttacagaaagggctctaacgattttgacgttggctcaaaaattggcttcggatcatcaacacccacaattacaacctatacatattctagctgccttcattgaaacgccagaagatggatcagtcccttacctacagaatctaattgagaagggccgttacgactatgatcttttcaagaaagtggttaatagaaatctagtaagaattcctcaacagcaacctgcacctgcggagataactccaagttacgctttggggaaagtccttcaagacgctgctaagattcaaaaacaacagaaggactcatttatagcgcaagaccatatattgtttgctctattcaatgattcgtctattcagcaaatatttaaggaagctcaagtagatattgaggccatcaagcaacaagctcttgaacttcgtggtaacactagaattgactctcgtggcgctgatacgaacacacctttggaatatttatcaaagtatgccattgatatgactgagcaggctcgtcaaggtaaacttgaccctgtcatcggccgtgaagaagaaataagaagcactattagagttttagcaagaagaattaagtccaacccatgtttaattggtgagccaggtatcggtaagaccgctattattgaaggtgttgctcaaagaatcattgacgatgacgttcccactatcttacaggcgctaaatgttcgggat

SEQ ID NO: 80569 - DNA, 201 bp, Saccharomyces pastorianus
atgacaattttgtgccaattaactggcgatggaatactagcgaaggaaaagagcgatcaagattatgctgacaaaaacttcaaacagcggttggcagggattgcgtttgatgttgccaaatgtacaaaggagctggtaaaaactgtagaagaggcaagtttgaaggacgaaataaattatttgaattcgaagttgaagtaa

SEQ ID NO: 80570 - DNA, 360 bp, Saccharomyces pastorianus
atgaaacatgaagaacaagaacaagaacaaaacagaagtgaggaagaggaaagtgaagatgacgatgaagaggaagaagacagtgattttgatgtggatacatttgacattgaaaatccggataatacactatcagagttactattgtatttagaacatcaaacaatggacgtcatatccacgattcaatcgcttttgacatcgatcaagaaaccacaggtgacgaagggtaatttgaggggagaatcgaatgcaatcaaccaagtcataggtcaaatggtggacgctactagcatatcaatggagcaaagcagaaatgccaatttgaagaaacacggtgattgggtggtgcaagtctaa

SEQ ID NO: 80571 - DNA, 150 bp, Saccharomyces pastorianus
atgacagtgaaaatggaatccccaaatttaaagggaaatactgtgtctgaacctcaagaaataaggagagacattgtctcctcagagccgatagagaatgttgaccccccaaaagtactaaaaaagattgtctttccaaagggctgttaa

SEQ ID NO: 80572 - DNA, 1434 bp, Saccharomyces pastorianus
atgacgccgactttcccctcgacttctggaataaatatgaagaaggggtttataaacccaagaaaaccagcatctttcttgaatgatgtggaggaagaagaatctccagtcaagccattgaaaattacacaaaaggcaattaacagtccgatcataagaccgtcatcgtctaatggagttccaacaacctcaagaaaaccttcaggaacggggctatttagtttaatgattgattcatcaattgctaagaatagctcccataaagaggataatgataaatatgtctcgcccataaaggcagtaacatcggcctccaattctgcaagtagcaatatttccgaaattcctaaactaacactacctccacaagccaaaatcggtactgttattccaccgtcagagaatcaagttcccaatattaaaatcgagaatacagaagaggataataaaaggagtgacataacaaatgaaatctctgttaaaccaacttctagcattgctgataaactgaaacaatttgagcaaagttccgaaaagaaatcatcaccaaaggaaaatcctatagcaaaagaagaaatggattcaaaaccaaaactatccaataaatttatcacttcaatgaatgatgtgtccacagatgattcaagctctgatggtaacgaaaatgacgatgcagacgatgatgatgattttacctatatggcattgaaacaaacaatgaagagagaaggttcaaaaattgaaaaaaataatgatagcaaactacctgcaaatatagtggaacttgatttacatgagtcatcggagtccgtgaagattgaatctcctgaatcgataaaggaaatcacgtcatctgaaatgtcttcagaaatgccaagtagttcgctgcctaagagattagtagaggatgttgagccttcagaaatgtcagagaagggcgcatctgtagaatcagtcaggaagaaaaattttcaagaaccacttggtgatgtcgaatctccggatatgacgcagaaaatcaagtctttgggtatgacaggaaaggctgtaggcccagagtcagctagcagggttgaatctccgggtatgacaggacagatcaagtctttagatatgacaggaaaagctgtagacccagaatcagatagtagggtcgaatctccgggcatgaaagagcagatcaagtctttgggtatgacaggaaaggctgtaggcccagaatcagatagtagggtcgaatctccgggcatgaaagagcagattaagtctttgggtatgacaggaaaaattgcagctcaagaatcaatcaagtccccggaagcggctaggaagttggcgtcatcaggagaagttgacagaattgaatctccaagaatggtaagggaaagcgagtccttggaggtagtaggcaatactatcccgctcaaaccatga

SEQ ID NO: 80573 - DNA, 357 bp, Saccharomyces pastorianus
atgaaaagggtcttgcagtcatgtgatcgcttagatatttacatctcaaaggtcttgcaacaggattacggcgatagcttaagcatcaattggaatctaccgccggagaaaaactggtctttgataaattcgaaattggcatggaaaagacaaacacattcctcttcttcctcaactactgatgaactcgataaggaaactttcttgttttggtactggttcatcgatctactcaggaaaatgtttgagttcgacccaacaaaaaggattaccgcaaaggacgctctggaccatgaatggtttaatctgggcatactggatgatggtattgcaacttataataatacccaaggatag

SEQ ID NO: 80574 - DNA, 1668 bp, Saccharomyces pastorianus
atgtttgctcggcaaaattcttttctaacagacaatctgaggaacagtctagacctgaatcaagcagacaatccgctccgtcctcggcaacaccaacaccagttgttcttggacaatgaaaatgccatagaactagacgaggagccgcgtatcattaacaccacaatcaataacagtaataatcataacagtagtcgagtggacgaggatgctgacgatgacatcatttttatcaaagagcagccaattcagttttcgtcacctttgattctgcctagtagcagcagtatcaataacaacaataatattgttacttcaaataatccagggtgcggtaccgcagttacaagcaatagtacgtatatcacgacaccaaagaaattcaagaagcaaagaaccatctcactgcctcagttgcctctatcgaagctgagctaccaatcgaactattttaatgttcctgatcaaaccaacgctatcgtgccaagagtaacgcaaactgaaaatgagctgttgcatctaacggggtcgtgtgcaaagactctggagggcaacaaggcagtgaatctcacgattgctcacagcacttctcccttttacaacccaccagcacaaatagcttccctgcctcaatccaacctcaagaaacaaattggttcttcactacggaaatttacatcaaacggctcttcagaaagcgcatcatccaataaatcaaatttcaaaacggacaaagacggtcactacgtttaccaggaaaacgacatatttggcagtggcggccgctttgttgtgaaggacctattgggccaaggcacgtttggtaaagtacttaaatgcatcgataacaagtatgaacctaattacgtggctgtaaaagtgataagggctgtagatagatatagagaagccgccaaaacagaactaagaattctacagactatcctgaataatgaccctcaaggtcagttccagtgcctcttgctaagggagtgcttcgattacaaaaatcacatttgtttggtgacagatctatacggcaggtccatttacgattttatgtgctccaacggcattgccaggttccccggctctcatattcaggccattgccagacagctaatcagatctgtctgcttcttgcacgatttgggcataatacacacggatttgaaaccagaaaatatcctgatttgtgacgaaacccatattgctcaaaaattgcctttgaaaaccgtacagtcgctaagcaagagacgccgtgaagccagtaaggggaagcgcaaaatcttgaaaaatccagaaatcaaaatcattgatttcggtagcgcaattttccattacgaatatcatcctcctgtaatatccactcgtcactatagagccccggaaattgtccttggcttgggctggtcgttcccctgcgacatttggtccatcgcgtgtgtcctagtagaactggttattggcgaatctctttaccccattcatgaaaatctagaacatatggctatgatgcaacgaatcaatggaacccctttccccacagacattattgacaagatgttttacaaatctaaacataaattgggcaactctccatcagacctaaactcaacggtgataaagcatttcgacagaaaaactttaagcttactatggccgtga

SEQ ID NO: 80575 - DNA, 1782 bp, Saccharomyces pastorianus
atggctgcagataaagtaatagttttatatataggtatatgtactgcacaattcacacgatgggtgtttctgcggtgcttgaaaagagctaggaatttactagcaacgttcatagtctgctgttttatggcagtagtgcttgttctggcgctggcacaccattttataaatgagcacagagacactaggagttcatcgacccaaatcgaagttgatgacgaaagtaaaagaaacgtacaccatgaccatgttctcactagaaccaatgcatacgcgacgccatacctcgatctggaacatgacaagaaaaacggtatcgtctacgatcatacaagaacggttgtccgtaaaaagaaccacgaagtggggtcctcgccactgcataaaaacctttttcacaaatttttgacaaagcttatttttaggtttatcgagaaggaaaaagttaccgaaggcgtaacgcaaggaaagttcaataatagtagcaatgaaattgccaatcatgaaccggtttttgaaaaaattcctgtacagtgcgacgatccattacagaatctaatcttatcggaagacttgacattagttgcggatcttaattattattttaaccagtacaatattcaaatagaggaatttagattggagaccgaagatgggtttgttatagatttgtggcacttgataccaaaatatagaacgacagattctgacaagaagaagaggccacccattttgatgctacatggccttttgcaaagcagtggttcgttcgcatccaatggtagaaaatctctggcatattttctgtatcaatccggttacgacatatggttagggaataacagatgcgggtttaggccggaatggaacgaagcgaaagtaccgacactagcttccaggtgggactgggaccttcgcgagatggttaagtacgatctgacccttttgattgataccgtgttagctaagacgcagtttgaaaagcttactttgatctcgcattctcagggcactacacaggggtttatgggcttggtcaacgaagataagtttttccctcccggttcgggatctaaagaatcttttttcacttctaagatcgcaaactatattgccttggcccccgcagtgtatcctggtcccttacttaacgagaaattgtttgttaagcttatgacaaaggaaatcgaaaatccctggttctttggtgaaacgagcttttttgagataatgatgattgtaagaaacttgtgcgttggtgagagcttgttctcctttgtttgttacaccatcttcaattacctgtttgattggaacgataccctttgggataccgcattaagagatcgccatttcctgttttcgccagtccatgtttcagtgaagttgatgcaatggtggctgtcacccgaccccaacaaggtaagttttaaatttggttcccataagatgttccccgataatgttaagtggttttcagacgcatcaaaggccccaaatatctacttgtttgttccaaagcaagatagattagtggacggagaaagactaatcaatcatttcgtcaatgtggagtcgaatgtcaactacaagatctggtacattgatgagtatgcccatattgatgtcctatgggcacatgatgtcatagagagaattggtaaaccaattttacagaatttgaacaactattactccaagaagccatccagcgcctttgaaagtgattgttcggacacagaggtagaaacggagctggagatggttgctgagaaggcttga

SEQ ID NO: 80576 - DNA, 1689 bp, Saccharomyces pastorianus
atgacgttagaaaaaggcggcaaagatgacgaaatagatgaagaagacgattctgaagaggcaaaagccgatttctatgcgcctgaaactgagggagatgaagctaaaaagcaaatgtacgaaaatttcaacagtttgtctttatctcgtccggttcttaagggccttgcaagtttgggttacgtcaagccttcccctattcaaagcgccacaatccccattgccttattgggtaaagacatcattgccggtgctgtgactggttccggtaagactgctgcgtttatgattcccataatcgagcgtttgttgtataaaccagccaaaatcgcttccaccagagttattgttctattgcccactcgtgagttagctatccaagtcgctgacgttggtaaacaaattgcacgtttcgtctccggtataacctttggtctggccgttggtggtttgaacttgagacaacaagaacaaatgttgaaatctcgtccggacatcgtcattgctaccccaggtagattcattgatcatatcaggaactcagcaagttttaatgtggactcagtagagattctggttatggatgaagccgatagaatgttagaagaaggttttcaagatgaactgaacgaaattatgggcctattaccaagcaatagacagaacctattgttttctgctacaatgaactccaaaattaaaagtttagttagtctttctctaaaaaaaccagtaaggattatgattgatcctccaaagaaagctgctactaagttgacacaagaattcgttcgtattcgtaaaagagaccatttgaagcctgctttgttatttaatttgattaggaaattggatccaacgggtcaaaagaggattgtcgtttttgtggctagaaaagaaactgctcataggttaaggattatcatgggtcttttaggtatgagtgtgggtgaattacacggttctttaacccaagaacagcgtttagattccgttaataaattcaaaaatttggaagttcctgtacttatctgtacggatttggcctccagaggtcttgatatccccaagattgaggttgttatcaactacgatatgcccaagagttatgagatctacctgcatagagttggtcgtaccgccagagctggtagggaaggtcgttccgtcaccttcgtcggtgaatcatctcaagatagaagtattgtacgtgctgctataaagagtgtagaagaaaataagtccctaactcaaggtaaagcacttggtagaaacgtagactgggttcaaatcgaagaaacaaacaaacttgttgaatccatgaacgatacgattgaagatattctggtggaagaaaaggaggagaaggaaatattaagagctgaaatgcaattaagaaagggtgaaaatatgttgaagcataaaaaggaaatccaggcaagaccaagaaggacatggttccaaagcgaatcagataagaaaaattccaaagtattaggtgctttatcaaggaacaagaaagtcactaacagcaaaaagagaaagcgtgaagaagctaaggcagatggcaatggtgcacgttcttatagaaaaaccaaaaccgaccgtattgcagatcaagaaagaacttttaaaaagcagaagagtacaaattcaaataagaagaagggcttcaaaagccgtaggtaa

SEQ ID NO: 80577 - DNA, 216 bp, Saccharomyces pastorianus
atgccgttatctgaggttactttaatctattttcctactgatgacacaattgagtcaatccaacgtggaacgggttgcccttgtatacatttcagtttacttcttttcatgtatttccttaatagtttatttttcactttctgcctatccgtttcaattccgaagaaccgtcaacatccaataaagatcatctacaacaataagtgcccctcataa

SEQ ID NO: 80578 - DNA, 144 bp, Saccharomyces pastorianus
atgacacaattgagtcaatccaacgtggaacgggttgcccttgtatacatttcagtttacttcttttcatgtatttccttaatagtttatttttcactttctgcctatccgtttcaattccgaagaaccgtcaacatccaataa

SEQ ID NO: 80579 - DNA, 1062 bp, Saccharomyces pastorianus
atgcaaagcgtgttgcatccttcttcgttaggatcgttagcaacgtcctccaaattttctggatggtcgtttgctcaagggttttttgtaggacagctaagcatagtgttgttgttcatctttttcctaaagttctttatattcagtgatgagccatctaaaagtaagaatccgaaacctgcagcctcccgtcacagatcaaaatttaaagaatatccctttatatctcgcgaattcctgacttctcttgttaggaagggtgctaaacaacactacgagctcaatgaagaggcagaaaatgaacatcttcaagaactagctcttattttagagaaaacctattataatgtcgacgtgcaccctgcagagtcattggactggttcaacgttttagttgcccaaataatacagcaattccgcagtgaggcttggcacagggacaatatccttcattccttgaatgattttattggaagaaaatcacccgatctgcctgaatatttggataccataaaaataactgaactggatacaggtgatgatttccccattttctcgaattgcagaatacaatattcgccaaattcaggaaataaaaagctagaggctaaaattgatatagatttaaatgaccacttaactttaggagtagaaacaaaactattacttaactatccaaagcctggtattgccgcactccccataaatctagtagtgtcaattgtgaggtttcaggcgtgtttgaccgtatctttaactaatgcagaggagtttgcttctacttcgaacggtagcagtagtgaaaacggtatggagggcaattcaggatactttttgatgttttctttttctcctgaatatagaatggaatttgaaatcaagtcgctaattggctcacggtctaaacttgaaaatattcccaagatcggcagtgtcattgaataccaaataaaaaaatggttcgttgaacgatgcgttgaaccaagattccaatttgtcaggttaccaagtatgtggccacgtagtaaaaatacgagagaagaaaagcctacagagttataa

SEQ ID NO: 80580 - DNA, 249 bp, Saccharomyces pastorianus
  modified_base (237)..(237): a, c, g, t, unknown, or other
  modified_base (241)..(241): a, c, g, t, unknown, or other
atgactgatagtgagaatgaatccaccgaaacggattcgttaatgacgtttgacgattatataagcaaagagctacctgaacatttacagagactaatcatggagaatttgaagggttctactactaatgacttaaagcaaacttcaaacaactcagagtttaatgtcagtaaaaacgggagcttcaaaggtctcgatgatgcaattcaagctttgcaaatgcaaagcgtgttgcancttnttgggtag

SEQ ID NO: 80581 - DNA, 132 bp, Saccharomyces pastorianus
atgcctgcaggtcattttggtagaatacccgctgtaccttttagcctaagcgccaattctcctaaaatcgatcaagatatggattatataagagagcatgataaatccccgttaagtcgtaaacgtcaatag

SEQ ID NO: 80582 - DNA, 129 bp, Saccharomyces pastorianus
atgggcaaattcggcacgacaaataaatcaacggagaatcttctgcgtgataaattcgtacccgagacatctccaactaatattcccactgatgtactcatcaagccaagggcaaataacggattccac

SEQ ID NO: 80583 - DNA, 741 bp, Saccharomyces pastorianus
atggccaacgatgaagctgaaagttttaggaatacttggctactatttcgctcgttccaacaatggataactttaacacaaactcttaaggagcagtcaaggttagcagatcaggcctttttgaataagatgtttaggaaaattttaaaggcacaagagcattggaaacacttagaaactgttaacactgacaacattaagaagatatttttacgaacaacatttcatatatggaagctaagacataaagaaataaactaccacgggttggaaagaaggattttcgaaagaataaaacagaaagttataaactatgaatacaataagagcattgcagaaaaagtgaggtcgttttctctacaaagaaaatatctgaataaatgggaaaagaaaaacattgaaaacgaagataaacttggggcactttatgagctggagaataaattcatcaaacaaaagttttttcgcaaattaaaccggtcatttcaacatagtcaacaagaggcaattgcaaagagtaaactaaatcagacacttttgaggtgcgtttttgagaagatgtggctgaaaagattcgaagaccatctgcatttgtattcaattgtaagtctaaaagaggctaacctcgtgaagcgtatttttcattcatggaaaaacttctatatattgacctcaaagcaagcgattattcgaggactaatttgctcaagtcatcattgcgaagttggaaacttgaagtaa

SEQ ID NO: 80584 - DNA, 1248 bp, Saccharomyces pastorianus
atggaaaaacttctatatattgacctcaaagcaagcgattattcgaggactaatttgctcaagtcatcattgcgaagttggaaacttgaagtaaagttaaaaatatttgagcagaaatgtaaaaagagtattcaagcaagcgcgtatcgtacatggaggaaaagaatacagtatgggaaaatatcgagcgaacatgttaaaacggcatttcgtgcaaaatatcatgatgtgtggaaaaggaggatgctacaaatgaattctatgaatgacgaagcatccaaattttacgaagagggtctcgtaaatgagtgtctagctatatggaaagaacgcctgattaaaactaaggaattggaggatagatacaatttcttatgtaagacacatgcaattttgactgtaaaacggacgctaatgcatattgataatgttcatttgctatatacgaaactggcgccctctatggatagaataaagctttctaaggcctttttaaagtggcggaaagccacaaggttcaaagtcaggcataagttaaacgatattttacacgtttatgaaaagagtaaagagcgcgaacttcaaagccaactgttcaacgcttggcgaaatagattttgcttctacacagaagaatgtaacattcaggctatttcaaagagaaactaccagcttgaaaaaatggtgctgaagaaatttagagaaagacttttagagatagtaaaatcagaagaattagcagacgaagttcgcgaagaatttgtgttagtcaagacgttttatatttggaaaactcatctagacgaaatattttatatgaatacattattggaacaatcggaagctaataaacaattcataattacatccaaattcttgaaaatgtggagtcttcgattcctaaaaattaagcgtaatgatgagacagtcgaggtttttcgtcatcggtgggacagggccactgtaaggggattgttattattatggaaaaatcgttcagacagttctccaaagagaaggaaggacttcaatcttaaacatgaactaaaaactcccataagatcagactctcaaaacgcctcaaccataccaggctcagaaagaataaagcagcacagaatggaagcgatgaagtcgcattatagcagggcaagaagagctataccaagtccggtgaaatcttctagtgttcttgattctacagctaaaaaacagatcaaccttgaaagtacgacaggcttaaaagga

SEQ ID NO: 80585 - DNA, 1191 bp, Saccharomyces pastorianus
atgaaagcagagctagcttgttctcaactaatgaataagttttctacaaacttcatttcatccatagatggtacatcctccgacattaatacgaaggaactctgtggtggtgcccgtatttattacatttacaataatgtttttgggaattctttgaagtcgattgatccaacttctaatttatccgttcttgatgttagaacagcgattagaaattctactggtccccgtcctacattatttgtacctgagttggcttttgacctattggttaaacctcaaattaaacttttactagaaccatctcaacgttgcgtcgagttagtttacgaggagctgatgaaaatatgccataaatgtggctccgctgagctagctagatatcctaaattgaagagtatgttaatagaagttataagcgaactacttagagaaaggttacaacctactcgctcttacgttgaaagcttgattgacatacatcgagcctacatcaatactaatcatcctaattttttaagtgcaacagaagcaatggatgacatcatgaaaacgcgtagaaaacggaatcaagagttattgaaaagtaagttgtctcaacaggagaatggacaaaccaacggtattaatggtacttcatctatatcttcgaatatagatcaagattctgctaaaaacagtgactacgatgatgatggtatcgacgcagaatcgaagcaaacgaaggacaaatttttaaattatttctttggcaaggataaaaagggtcaacctgtgttcgatgcatcagacaagaaaagatccattgccggtgatggaaatattgaagattttagaaatttacaaatatcagatttttcactgggcgatatagatgaccttgaaaacgctgaacctccactaaccgagagagaagaattagagtgcgaattaattaaacgtctgattgtttcatactttgatattataagagaaatgattgaagatcaagtaccaaaggcagttatgtgtttactcgtcaattattgtaaggattctgttcaaaacagattggtaaccaaactctacaaagaaacactgtttgaagaacttttagttgaggatcaaactttagctcaagatagagaactatgtgtgaaatcactcggagtttataaaaaggccgcaacccttattagtaatattctgtaa

SEQ ID NO: 80586 - DNA, 441 bp, Saccharomyces pastorianus
atggctagtttagaagatcttattcctactgtcaacaagctgcaggatgttatgtacgactccgggatcgatacactcgatttgcccattttagctgttgttgggtcacaatcctccgggaaatcctcgatattggaaacgttggttggaagagattttttacctaggggtactggtattgtcacaagaagaccgttagttcttcaacttaataacatatctccaaattctcctctaatagaggaagatgataactcagttaatccacatgatgaagttacaaaaatatcaggattcgaagctggtacgaagcccttggagtataggggcaaggaaagaaatcatgcagatgagtggggggagttcctgcatataccaggaaaacggttttatgatttcgacgatatcaaagagaaatcgaaaacgaaacagcgaggatag

SEQ ID NO: 80587 - DNA, 189 bp, Saccharomyces pastorianus
atgcagaaaattatagaagctactgacttgcttttccaaggtaaggaaaagttagatatcattcttgatgcaagttatttagatcctaaggataatactatattatcattcgagaatgcagccgtcctctgccaagtcttgaaaacctttttgaataaaaaaagctccgtgaaaatactgttatattaa

SEQ ID NO: 80588 - DNA, 366 bp, Saccharomyces pastorianus
atgtctaatccagatgatttagatgatggactcgcctatgattttgatgccgaacatgaagtaatttttgacgccaaggatggtagtcccccaaccaaaaaggtacaaaagaggtctatagaacaagatgacgttgatgatatagatgggaaaaaagaggagagaaattcagaagatgattcgaatagacctatttcgaaaagacagaaaaagctacagaaaaaatcaaagctaattgagaaaaagaaagaggaaagccagtatatcgtctcacaacgaaaagcacttccagcaagttcaccagaaaaaattattgagtacctaacaactttgatacgagaaaaaaatcctgacttgagtgtatag

SEQ ID NO: 80589 - DNA, 1182 bp, Saccharomyces pastorianus
atggaacctgtggtcacttacttaattcaaaaattccccatttccaaaatcctaggtacttttattaccgtctggggtatcgtgttggcttgccatgctgcttgtaagacgtacgcctcgttgatggtcgttcgtactctcctaggtctctttgaatcctcgagtgcagttggttgtatcgctattagtggtatgtactatactaaatctgaacagagtgcaagaattggattctgggccacacaggctggtacaggttatattgtgggcgggttaatttcttttggctttttacattatcatggtaccgctttcacctcttggcaaataatgtttttggtcattggtctggttacagttgcgtttggtgttctaacattcttataccttccagataacgtcaccaatgcttggttcctaaacaaagaggaaaaaattcaagttgttgagcatatcagagctaaccaaactggcctggaaacaaagaagtttaagaagcagcaagttaaagaactattccttcatgataagtttacttggccgatgcttttattaactgcatgttctcaaatttctactggtgccattggtacattttcagtgaccatcactggtacttttggtttcgacaagtacgaaacagcattactgcagttgcctattggtgccattacggctatgattattcttataacaactcaaatgttgtcccgctggggtcatatcacactcataaccacatctatgtatattccagctattataggttgtatcgttcttatcagtttacccttatcccataagatcggtaacttattttctctgtacttgctttacagtggttcctgtgtcattaccaatatttacatctggaattcatgcaacacctccggttacaccaaaagagtttttagaaatgctattacaatgattgtatacaatgtctcctgtattattgctccacagatgtttagggcatactcagctccacgttacataccagcaaagattgccttattggtcactcagtgtgtttgtgttcccctacaattatacattggctacatttgcaagaaggagaacgaaaagcgtgataaggaacaagaaggtcaagaaaggaagaagtaccaatttttggacttgactgatatcgaaaacagaaatttcaggtacatttactaa

SEQ ID NO: 80590 - DNA, 90 bp, Saccharomyces pastorianus
atgaaaaacatgtcacaacgatccatggacgtggagaagaaggcagctaacgctgatagttgttccgtaagtacctcgagcttaatgtag

SEQ ID NO: 80591 - DNA, 483 bp, Saccharomyces pastorianus
atggatttacagctgcctgtcttgtcttttatagaagctgccaagcagattagggacttcgaaaaacaaaatggcattggcattcaaaaaagtctcaataactcacactccaatcttgaaaaaggtacttcaaagagattctctcaggcgcccgtgattattgtagcattgaccgcatctaactctcagatggataaaagaaaagcacttctttctggttgtaacgactacctgactaaaccagtgaatttacactggcttagtaagaaaattacagagtggggatgtatgcaagccttgattgattttgacagctggaagcagggagaaagccggatgaccgacagtgttttggttaaatctccacagaaacctattgcaccttccaaccctcactcattcaaacaagcgacatctatgacccctacacacagcccagtaagaaaaaattcaaacctctcgcccactcaaatagaattgtga

SEQ ID NO: 80592 - DNA, 300 bp, Saccharomyces pastorianus
atgaagactgtctattacaaagaaatcacctaccagcagtatcttcaactgcaacctgaacaacaggaaaaatacctggctttatgtcaaaaagattttgaacaagagactgaaagaattgcatttgatcgtcaaggaggtgtgcctggtattgctaggaaatttgcacaagaagaagttgcttggttcgatcgcgttacaacatggtcatatatgaatgcttatattccgagctacagaagaagaagaaaccttttaaagattgatatgttaaagatgtccaatgctgaagaatattga

SEQ ID NO: 80593 - DNA, 1377 bp, Saccharomyces pastorianus
atggtaatctattcaataatgagacctaatgtccccggtgtttggtatactatgggttctgtactaagactaacggttgacctaggactacattcggaaaaaattaataaaaattatgacgcctttaccagagaaatacgcaggcgtctattttggtgcgtttactccttagatcggcaaatttgctcgtattttggtcgaccttttggtatacctgaagaaagcatcaccaccaggtatcctagccttttggacgattccttcatcacattaactaaccgagaaattgacgactactcagacttaccaagcccaaatccgtcttcaaaagttatcgcattggccatgtataaaatcagaagaatccaagctagtatagtgagaatactctacgcgcccggtgcagaattgccgaggaggtttatggatctcgagagctggcggattgaaacctacaatgagcttgagcgttggttccaagtggacgttcccaaaaactttgagatgatgaattgcaaatttaacagcatctggtttgatctgaactatcattactcgaagagcattctttatggactttctccaaaattccctactttgaatgataccgcttttaaaattgtcctggacagtacgaagggcaccatagacgtattttacaatctttgtgtcaataaaaaaattggttacacgtgggtagcagttcataacatgttcatgacaggtatgacttacctttacgtaaatttttactcaaaaaacaacataaatgattgtcaagaaaaagtgtcagagtacactgaaaaagtgttgatagtactgaagaatctgataggtttttgcgaatctgcgaaaacctgttacacgagttacaaaattttatcatcagttgtaataaagttaaaatttatgcaaataaatgatgccaaagggatattttcggattcaaatcccctaacctctcaggcaaaccgcatgtcaagttatgataaaaaaacgaacgtacttggttttgacgacggtacttttgataacaaggtttttaatagaaccaattttgaagaaaaagcaccttttgatatacctctagatgaattttttaccgaactggaaaaacacagcaatgtttcccagtttaatactttagatgtaagcgaaggtaatcaagtgataaatgaaagtgcttctacaaatacgtcttctgcattgaattgccagtcgtataccaataatcaagatatcatggatatccttttccaggttacttcgggatctgtatgggatgagttttttgtcaggtctggtaacggaaacgaaggcgagtcttcttacgatatcagtaaaggaaagaactctgaatccggtggaatattttag

SEQ ID NO: 80594 - DNA, 975 bp, Saccharomyces pastorianus
atgatgcgtgtgttgaaagaatatggagtagatcccacgaaaatacgaggaaatatacctgctacaagcgatgatgaaccttttgatttgaaaaagtacagttcagtttcatctttgggagaagagggaatattgccacataatggcttattggcggattatttggttcagaaagggaattctatggcatcctcagctataacgagcaagtctatggcaagcccacagactataaatgtacaacgcaaggaatttctggtaaactcaaaaaaacaagatggtagcgctttattacccgagacaggcagccctatgacttcagatgcaagagcggaagagctacgccgatgtaataaggagatcagtgcgctgggcacgatgagagaaagtagttttaactcttttttaggagattcatcgggtatttcctttgcgaaattagtcttcacggcaactaattttcgtcaagattccggagatgacgttctggatgaagatattaaacaaagggaacagaaatacaatggatatgcagaggctgaaaacaatccacactttgatccattggaactaccacctcgacatgccgctgaagttatgatatccaggttttttgtagatactaattcccagttacctttgctgcatagagaacttttcctgaaaaaatactttgaacctatttatggtccctggaatcccaatattgcattggcatctgatcagacaggcataaatagcgcgttcgaaattccaattaccagtgcttttagtgcgcatactgaaccaaaaagggagaacgttactgagaagattgacgtatgctcttccgaggatgttccatggtatgacacttgggagacatctcaaaaagtcaacatgcgtccgatagttgaactaccgacaaaatttcacataccttattttttttttaaacattatatttgctattggccatgctacgcaggtacttaa

SEQ ID NO: 80595 - DNA, 960 bp, Saccharomyces pastorianus
atgcaggagaatgggaatagcggcaatggaaaactagcacctttatcaagggatcactccaacaactcgtacgatgaggagaaagaatatgaagattataatgaaggagacgtagaaatgacggaggttaacaatgccggagaagaagaagaagaagaagacgacgaagcaaaagaaaagcaagaccatgtcgttcatgaatataacgttgacgcagatagaaattccagtattaatgacgaggcgccactacaacagggtctgtatcaggtggatcaagaagatatgaatccacaatatgtcgccagcagtcctgataatgatttaaacttgatacctacaacggaggaggacttctctgacctgacgcatttgcaaccagaccagtaccatgcccccggatacgacactctgctaccacccaagttgcaagaatttcaacagaaaaaatgtctgatattggatctagacgaaactttggtacattcttcctttaaatatatgcattcagctgatttcgttttgcccgtcgaaatcgatgatcaagttcacaatgtctatgttattaagaggccaggcgtcgatgagttcttgaacagggtgagtcaactatacgaagttgttgtgttcacggcaagtgtttcgaggtatgcaaacccccttttagatacgttggaccctaatggaaccatccatcatcgattattcagagaagcttgttataactacgaaggtaactacatcaagaacttatcgcagatcggaagaccattgtccgaaacaatcatcttagataattcgccggcctcttacatctttcatccgcaacatgctgttccgatatcttcttggttctctgatactcatgataatgagttactagatattatcccacttttggaggacctttcatcaggaaacgtgttggatgtggggagcgtgttggatgtgacgatatag

SEQ ID NO: 80596 - DNA, 1314 bp, Saccharomyces pastorianus
atgactagtaatacctctttatcagagaacggtgatggaaatgctaatattaaaatggaaacgaatgtgaaccaagccccatatgctgcagagaatcccttccaaaacattgcgcttgcggaggataccaagctggtacctgacttaaagtactattataaagagtatggtattgatattgaagaatttgaggtggagacagacgacggttttatcattgatttgtggcacttcaagtccaggttaaacgatggcgtagaggaagtgaaacgtgaacccattttgctattacacggtcttttgcaaagttgcggggccttcgcatcttcaggtagaaaatctctggcatacttcctttatgaatctggatttgatgtttggttggggaataacagatgtggcttaaatgccaagtggaacatgaaaaaattaggtaatgatcattccaaaaaatgggattgggatatgcaccagatggttcaatacgatttaaaagcacttataaattatgtacttgatagtaccggatatgctaaactatcgctcgtggcgcattcacaaggtacaacacaagggtttatggggcttgtcaacggtgagaaactatacgcaagtgattttaaattagtcgataagctggaaaactttgttgctttggcacctgcagtgtaccctggacctttattggatgaaaaagcatttgtgaggctaatggcaaaaggtattgattctccgtggtactttggtagaagatcgtttatacctcttatgatgacaatgagaaaactaatggttgggaccaagattttttcgttcctctcatacatcatgtttaactacctatttgattggaacgatgtcttatgggatagagttttaagggaccgaaatttcttattttcaccagtccatatttccgtcaaactaatgcaatggtggttgtcacctcttcctaataagctaagttttaagaagggtgcagagaaaatttttccagataaaaagacatggtttcctattgccaagaatgatgatgacagtggcaataatttggataacaacaaactacacttaaatccgaaaagacaaaatagtgaagaatttccacacattataatgtttattccaaagcaagatagattagtagatggtgaacgattaattaatcacttcattaatcatgaagcaaatgcagtgtacaaaatctggtatattgatgagtattcccatctggacgttttatgggcgcatgatgttatagatagaattggtaagccaatgatagaaaatttgaggtttcctaatgcaaggtga

SEQ ID NO: 80597 - DNA, 414 bp, Saccharomyces pastorianus
atgagggctatgcaggaaggtgctaaggcaatgaaaactattcacagtggccttgacatagataaagtggatgaaactatggacgagataagggagcaagtcgaattaggagatgaaataagcgacgctatatccaggcctttaattactggggcaaacgaggtggatgaagatgagctggacgaggaattggacatgctggctcaagaaaatgctaaccaagaaacgtccaagatcgttaataataatgttaatgcggcgcctatctcagagaacaaagtctcactacctagtgttccaagtaataaaattaaacaaagtgagaactctgtgaaggacggggaagaggaagaggatgaagaagatgaagatgaaaaagcattaagagaactacaagcagaaatggggctttga

SEQ ID NO: 80598 - DNA, 249 bp, Saccharomyces pastorianus
atgtggtcatcactttttggttggacatcaagtaatgccaagaataaagagtcaccaacaaaggccatagtgcggttgagggagcatatcaaccttctatccaaaaagcaatcgcatttacgtactcaaattacaaatcaagagaatgaagctagaatctttttgacgaagggcaataaagtaatggcgaagaatgcacttaaaaagaagaagacaatcgaacgacctgcaggcatgcaagcttggcac

SEQ ID NO: 80599 - DNA, 81 bp, Saccharomyces pastorianus
atggacaaagttgtcttccaagcggcggattcatttgatatcgtctacgtggagaacccaattcgtttattccaccactaa

SEQ ID NO: 80600 - DNA, 1149 bp, Saccharomyces pastorianus
atgggcaaatataccaagactgcgatcctgtcagtttatgataagacaggtttattagacttagccaagggattggtagagaacaatgttcgtatcctagcatccggtggtacggccaacatggtcagagaagctggttttccggtcgacgatgtttcttcaattacgcatgcaccagaaatgctagggggtagagtcaagactcttcaccctgctgtgcatgcaggtattcttgccagaaatttagagggcgatgaaaaagatttaaaagagcagcacattgataaggtggattttgttgtatgtaatctatatccgttcaaagaaactgtggctaaaattggtgttacagttcaagaagctgtagaggagatcgacattggcggtgtgactttgttaagagcagccgcaaagaaccattccagagtgactattctttcagaccctaatgactattctatctttctgcaagacctgtctaaggacggtgaaatttctcaggatttaagaaatagatttgcacttaaggcgtttgaacatacggccgattatgatgcggccatttctgactttttcaggaaacagtactccgaagggaaagcccaattaccgctaagatatggttgtaatccccaccaaagacctgcacaagcttatatcactcagcaggaggagttgcccttcaaagtgctctgcggtacaccaggatatataaatcttctggatgccttgaactcatggcccttagtgaaagagttatctgcatcattgaacttgcctgcggcagcatcgttcaagcacgtttctccagcaggtgctgctgtgggacttccattatccgatgtggaaaaacaagtttattttgtgaatgatatggaggatttatcaccattggcatgcgcatacgctagggcccgtggtgcagataggatgtcatcctttggtgatttcattgcattgtccaacattgtagatgtggccactgcaaaaatcatctctaaagaagtttccgatggtgttattgctccaggttatgaaccagaggcattgaatatactatctaagaagaaaaacggaaaatactgtattttacaaatcgatccaaactatgttcctggccaaatggatcccgagaggtttttggcgtaa

SEQ ID NO: 80601 - DNA, 90 bp, Saccharomyces pastorianus
atgtgtttccaattaatacgcttactcaaggaattagacagagaaaacaacacacaattggttcaaaaggcactcgagagattcaaataa

SEQ ID NO: 80602 - DNA, 2733 bp, Saccharomyces pastorianus
  modified_base (1294)..(1294): a, c, g, t, unknown, or other
atgttcatcaaacagtctgaaaaaaatacacctaaatgcctctacaaaaaaaaaggtaaggtaagagtgttattgaccggaagctgtaagaaactgaacacgtggaaaatgcacttatggccagtcagtccgccccaattgcttagaattccaccccgcaacgccgaattaggtgagggtactaaaatagatgattgcaatattcttcaatcaatgacactaccccaggccaatgttcttatcatgctaaccccaacaagagtgctcatttacaacttcaaaccaatggcactagtagctagccatgaacgaacaatggcttctcttaaggaatttggcgataacagatcaatgaaacgatcagctccatataatgatatcatcgaagggcttatttcaaaaaaggactcgcaatacttattgtggcaccagggaaagctgatattttacgtaatgactgataaaaacttccttttaacataccaaattttaaaaaactgcacaaatgaaataattttcaaagaatacggcatacccgtcatagagcctcttttaatgagtgaagaagaagcgaacagtgctgaatatgactataacaacgatgatgatactctcacggtatttgataaaaatagttcttcaagaattatacagaatggatttggcataactaaggaaaaagggtttttacactttctttctaatcaagaaaacattgatgaactccccgtgaaaaaactagaacttcgtttaaaagtagttcttaaatttgactatgaaatcatagacatgattggcatcaagacattttccaaagtcggggatgggcgttatgaagaagttttgatagttttattccctcatggattacaaatacttacaatatcggattttaaagttagcaagagctcgttggttgaagtgaagaagggatccaagacaattgtgtgtaataaacaattaatggttttatctcatgattccgtcgaaaagcagactattgtaagcattatagacattgaaaagcaagctgttgaagcaataccgttaacggacacaccagatgaacttttgacttgcctagaagttaatggatacctggtggtcgtttacaaagaaaaaataatctgctttgatacaagaattaaaaaagtaagccattcttggaaaccaccatttgtgataaaactttgcgataaaattaatgataaaatattacttttggtttctgaggatagtgttaacattcatttttacacagaatttgggaatctgtatttcgctacatatttgnacgaagatgattataatggtgataacaataatgacaacagcaaggataaaaatgagaaaaaggcggctgaatataaaatttctgattttgtatgcttggataaatcactgataacagtgtctcattccggaaaatatcaagtttggaaattatgggaagaaataaaacaaacacaatttgatttcagaaacccaaaatgttacgtattaaccaatacgaacaatgatgtaatcatatattcacctgtgacaagttcttcaatcaataatgataatttacaagtcataaaacttcctacaaagactttcaataatcatattgcttttgtaaaaattaattcttccttgaggttatttgctacttatgtgtcgaacaaaaacatactgcttatccacaatctagagaccaatatgtggtctagttttgctgaccaaaacgtgttggatttacattggctaggtgataattatttggtttgtcatatgaagaatgatgacggctcaacaaatctgaaatgtctgcagattccactgcaagaagcgaatccggacgtggaactatcagattatgtcatttgggaatacaatgttccagagaatacgattgttttcagtttacatgttaatactttatcccggtataagttgttgaaaatgaaatccaagaatcacaatgcttctgaaaaacaacctgatgcattgcttaaaactgccgagattattttagttactgatacacagacgattgtcttcgatgtaatttctactgtacatccatgtggattaaacatcatcaaaaaattctaccagtatctcaaaattaacattccaattgatgttttacccaacaaaattgagtggataactaacatgaaggagggcttgttattttttgccgataggaaatttataaagcttggcaaagtggatggagggggctggcaaaccttaactttgttggataacatagaaaaaataatcgatgttatcagggacgaaatatttgtagttcaaggccataattacgtcgtatactctttggaagatttatgggatgataaaaagccactagtttccattccaatcgaagaagatttgtatccaatatcaaccaccccagaaacagctacaacacatacacttcactgcatttttaacgcgcgattttccaaattggtggtgaaacaccaaatatacctcgaccaattaatcttagcgaaattagaagacaacacagatttggaggatatttcacacaattatcgttttttaaagccttacaaatttgcactcgaaaagattctgtctactaaaatactgcgaagcgactctttggatgatatcctgaaattaattaagatgtatgacaacaccgatcctgagcataatatttcaccaccaacccacagtggtatgttagaaattattataattgtttaa

SEQ ID NO: 80603 - DNA, 177 bp, Saccharomyces pastorianus
atgacaccaagagatttattagcactctgtatcgaagaaaatgaggctaaaatgcttggcgtacttctgttagtgtttttaaattacgatgagaaagatttgggagatgatctacattttaagaaatcagatttacggagtgaggaaagcaaagctctaaatgattactttacataa

SEQ ID NO: 80604 - DNA, 921 bp, Saccharomyces pastorianus
atggagaataaatttctgctgaaaaaaagttctgtacttccctccaagagagtggcatcttcaccgttgagaaatgataacaaaagtaaagtgaacccaatagggtcagtagcctccgcatcaaaaccatcaatggtagctgctaacaataaatcgaggatcctgttgacgtctaagtctttggcaacgccaaaaaacgtagtagctaatagcactgacaagaatgaaaagttgattgaagaatacaagtacagactgcaaaaactacaaaatgatgagatgatatggaccaaagaaagacaaagcctattggaaaagatgaataatacagaaaattataagatcgaaatgattaaagaaaacgaaatgctaagagagcaactaaaggaagcgcagtctaaattgaacgaaaagaacattcaattaagatccaaggagattgatgtcaataagctgtctgatagagtactgtcactagaaaacgagcttagaaacatggagatcgaattggatagaaataagaaaagaaatgatacaaacttgcaatcgatgggtacgatttcatcatactccataccttcttccaccgtgtcaagcaactatggagtaaaatctttatcttccgctttgccatttaaggaggaggaagatgtcagaaggaaagaggacgtcaactatgaaagaagatcaagcgagtccatcggcgacctgccgcaccgcgtaaactctcttaacatacggccgtacagaaaaaacggcactggagtgagcagtgtctccgacgatttggatatcgatttcaacgatagttttgcctcagaagaaagttataaacgtgccgctgcagtgacatctaccctaaaggccagaattgaaaaaatgaaggccaaatcaaggcgggaagggacaaccaggacgtaa

SEQ ID NO: 80605 - DNA, 921 bp, Saccharomyces pastorianus
atgactgattatgaaggtttttatgcatacaatcctcacaaaggtgcagcgattgcatttgtcgttctgtttggcattttaatcctttctgccttggtgcagatcataatggcaacacacacgagcaagagacgtattcatcgctgggaaaacaatgagttgttagaggaaaattccacaataatatactttcctgcccgcggtttgatgtggacacattttcctttcgttttagggatttgtttagagttcgtaggttatgtgttgaaaatagtctttatcaatagcccctcgatttcgactttcattgctcaatcggtgcttctattgatagcaccttcactttacgcccttagtatttttatgttgttcagcaaaatggcacgtctaattcttatggaggcatatatgttaattcctgcgaaatttagtacagtttctttcgtagtggcagacatgattgggcgtgtcctacaggctgtaggaggtgggttgttatcctcatggaacagcaggaatactgggcgtatcctaattattgtgggtctttttattcagatattttgttatacctttttaacgttcagtcaactttttcttcactataaaatgaaggcagcacctagtaaaattgtgcaggatagtaatgaatggttccagtacaattttatacttttagctgggatattgctggttaatggtagaaccattgtcagagtagtacaatttttaatgggcttacaaagctatataggtcagcacgaatggtgcctctacgttttcgatacagttctaatgtttttactacctttgattttcctagcaacctttcgcgcaagaaatttgttcaagctgcaggataaatctgtcaatattcaattagacaaattattagacaaggaatctgtgtctgaagattaa

SEQ ID NO: 80606 - DNA, 1620 bp, Saccharomyces pastorianus
atgttacctctccacaaatggatttccagaattgttgtgcttgaatctattctacacacgtggttctatctctattacatgtacattaatgatacgttatacgtgaaaatgagaaaactacccaacatttatggggttattgccctcggccttttcctactgattgccatcacttctgtgagatatgccagacgatggagctacagagttttttactatgttcactatgtaagcacatggcttattttggtgtttctacattatcacgctcgcccaggaatttcatattataccactttaaatgtgctcatattaacgggacaaatcgtctataggctctatatcaccaatgttacgagagttacgatagtacccatttcttcatcattgtctcttttggagttcccattaaccgatttacccaaaaagcccatcctaccaggagggcatctaaggatcaacatttaccatagaaattttttaaggaggtttttctcccatttgatacccttccaacatccttttactattgctagtattccaagtgataatttggtcaggttaattattagaaacgggcattttccattacgtacaaatgaaaagtattacattacaggggcttttgaacctgagttgagtttcatttctaaacctactgttccttttaatattaccacgaaatcttccaagaatccatttcgaaacaattcttctgcactaataaattcgcctttaaattttctaattaaagcgcaaagagtgtttatgtgtgttggaggttcaggaatttcctttggtttaccattacttcgtattctaaacttcaacggtgtaaacgttaggctcctttgggtttctagagattataaggatctggaagtattgaaccacttcaaaaacaattttgaaggtatggagatatatattagtggtaccgaaggcaacgaacaggacatagaaattgattatattgactatcatgactgcgctgctgatattaatgatgaagtcaggagtatttcttcgagcggccgagtttcagaactgggagataattccatgttatctgatggaaatccccaacctacggagcccaatgagaacacagcccttctaagtaagaaatctaccttgagaaaccatcacccaccaaaaacaagtgatatacctgacatcaatgctgatgacgagatagattttacatatgcttttagcagatccaaatcaaggaaaaatactgcacaaggaactctaactacacattcttcgtttaacggatcgagcgttttcagacaaccaaagatcattgagccacctgcccaagatccttgtttagaggcggcgcctaaaaagatcaggattcccgcaggtgttaaagtgttctttggcaggcctacacttggagataaggattatgaatggtgtctgcaaaccgaatgtgatgcagagacggattctattcaatgttgcaggtgggcgaatcaaggcagagaccatgctgaatatttgtcacaagtatgggttctcgctgcaggccctagaggcttaattgaaagcaccaaaagatgggcgacagatggtggtttacactttcacggagaaagttttgcattataa

SEQ ID NO: 80607 - DNA, 141 bp, Saccharomyces pastorianus
  modified_base (129)..(129): a, c, g, t, unknown, or other
atgtcaccatttaaagcatcatgtttcaacagaagatcatgggttcacaaaacacgtatgtatcacaaacagtcactacaactatgtttaatatgctttgttttcacctccgttttttgttatacaagngcgctaacggag

SEQ ID NO: 80608 - DNA, 282 bp, Saccharomyces pastorianus
atgaatttaaagtccatcgttagctggttcaaggaacatcttcccagttttgatgtcgacgtggacaagcattttagaactttaagagtccgcaaatattctcagatatgtcttttaatttctttcattataatatgtgttattatacccttaatgaattatttgttgctaactgacaaattcttcaaaatatgtcaccatttaaagcatcatgtttcaacagaagatcatgggttcacaaaacacgtatgtatcacaaacagtcactacaactatgtttaa

SEQ ID NO: 80609 - DNA, 255 bp, Saccharomyces pastorianus
atgacgctttgtccaggacattttagagcacctgggagtccagagaggtttcaatggtccatattgaagcaggatgattttatatatcgtaatgacaggaaggaaagaaagtcgactattttggaaacactcatgggtgatgaagcttctaataagtatttcaagcgtaaatacaacgaatttcaggagaaatctacgagcggtaggaaggcacattacaagaaaatgaaagagatgagaaagaagcggaggtga

SEQ ID NO: 80610 - DNA, 480 bp, Saccharomyces pastorianus
atggatcaaagtgtggaagacttatttggagcactaagagatgctagtgccagtctagaagtaaaaaattcagcgaaggaacaagtttctcttcaacaagaggatgttttgcagataggcaataatgatgatgaagtagaaattgaaagtaaatttcaagagatcgaaactaaccttaagaagcttcctaagttagaaaccggatttgatgctttagcaaacaagaagaagaagaagaacgtcttgcctagtgtggagacagaagataaaagaaaacccaacaagagcgacaaaaacgataatgactggtttaccttaccaaagccagatgataacatgcgtcgtgaagttcaacgagatttattgctgattaaacatagagctgctcttgatccaaagagacattataagaagcaacgttgggaggtgccagagaggtttgccattggtaccataattgaagacaaggggatcctctag

SEQ ID NO: 80611 - DNA, 657 bp, Saccharomyces pastorianus
atggatgtcgatgttgaccgctccatggtttgttatggaattgacggccattctaaactatacatgaagattgattatgaaaaccacggtgtaaggaagctcattatcgagtacttcactttcatctttttcactgattgcggtgtgtatttagcgcacagatggttgcattggccaagggtctaccgtgctctgcacaagcctcatcacaagtggctggtctgcacacctttcgcatctcattctttccatcctgtagacgggtttttgcaatccatctcgtaccacatctacccattgattctgccattacacaaggtttcttatttgattctgttcacttttgttaacttttggactgttatgattcatgacggtcaatacctatcaaacaatcctgccgtcaacggtactgcctgccacacggttcaccatctatatttcaactacaactacggtcaattcaccactctgtgggacagactagggggttcttaccgtagaccagatgactcattgtttgatcctaagttaagagatgctaaggagacctgggacgctcaagttaaggaagttgaacatttcatcaaggaggtcgaaggtgatgataatgatagaatctatgaaaacgacccaaataccaagaagaacaactga

SEQ ID NO: 80612 - DNA, 507 bp, Saccharomyces pastorianus
atggatttggtcttagaagtcgctgaccattatgtcttagacgacttgtacgctaaagttctgcccgcttcgttggcagctaatattcctgtcaagtggcagaaattgctagggttaaacagtgggttcagcaattctacgattttgcaggagactttgaactccaagaatgccgtcaaagaatgtagaaggttctacgggcaggtgccattcctgtttgatatgtcgacgacgtcttttgcatcgctattgcctcgttccagcatcttgagagaattcctctcactatgggttattgttacgatctttggtttactactttacttattcacggctagtctcagctacgtgtttgtgtttgacaagtcgattttcaaccatcctcgttacttgaaaaaccaaatggcaatggaaatcaagttggcagtcagtgctatcccatggatgtcgatgttgaccgctccatggtttgttatggaattgacggccattctaaactatacatga

SEQ ID NO: 80613 - DNA, 342 bp, Saccharomyces pastorianus
atgaaaattaaatttgatctaaatacagatctcactcccctattcaattggaatacaaagcaagtttttgtctatctaactgctgagtataacagtactgaaaaaataacaagtgaggtaacattttgggataagatcataaaaagcaaggatgatgctgtgattgatgtgaacgatctaagatccaagtattctatctgggatattgaagatggaaaattcgaaggcaaggatttggttttcaagttacactggaatgttcaaccatgggtaggtttgctaacttacggtgaaactgtaggcaactatacactgaccgtggaaaataaaaacaaagtttag

SEQ ID NO: 80614 - DNA, 156 bp, Saccharomyces pastorianus
atgttctcctttgtccaaagattccagaatgtatcgaaccaggccttttcaatgggaattgtaatggttgtattcatcatggcatcctcatactatcaattaatcaataataacgcgttctcagtacctagtaatatcgataacgtcaaactttaa

SEQ ID NO: 80615 - DNA, 246 bp, Saccharomyces pastorianus
atgggacaagaggaaatacaatttcccatctcgatcattccaacaaaagaactgacattccaaggctgtttccgatactgtcaaggtgattatagtgactccatcgagctagtctctagcagaaaactctcgcttaaaccattgattacacatcgctatagctttaaggatgctgtcgaggcattcgaagaaacaagccaccacccgttaaataatatcaagacgatcattgagggcccggaatga

SEQ ID NO: 80616 - DNA, 219 bp, Saccharomyces pastorianus
atgtatcgtgaagtttggaagagcagatacaagtcccggtcaacgaagattatttgtctagaagtggggttcaccaacttggacagaccagaatacttgaagaagagagaagctggtgaagtcaaggacgacggtgctttcgttaagttcttgtccaagaagggttctttggaaaacaacatcagagaattcccagaatactttgctgctcaagcttaa

SEQ ID NO: 80617 - DNA, 396 bp, Saccharomyces pastorianus
atggactccgataacccctttagtacatcagagaccatcatgaataaaaggaacgttggtggtgcgagtgcaaatggtaaagagggctctagcaacggtgggggactaccgttgtaccaagggctacaaaaggaacagtctgttttcgaaaggggtaacgctcaattagattacattctagaaatgggccaacaatcattcgaaaatatagtggaacaaaacaaaattttatccaaggtacaagatagaatgtcaaatggcctaagaacattgggtgtttcggaacaaactatcacctctatcaataaacgggtgttcaaagatacactagtcttttggatcgcgttaattctcttgatcataggtatttattatgtgttgaaatggttaagatag

SEQ ID NO: 80618 - DNA, 423 bp, Saccharomyces pastorianus
atgccattttctgataaggaagaaagtataacgagtaacgagcttttcgaaaagatgaacaagttggaggggaaaatcatggcaaatgatatcgatccattactccgcaagatgaacaagattgtggagaatgaacgtgaactgattcaacgtttaagaccactgttagatctgaagaaaacagccataagtgacgatagtttccaagattttctttcgatgaacgcaaacctggacagattgataaaagaacaagaaaaaattcgacaagatgccaagctgtatggcaagcagaccaaaggtcatgatgagatattttccaaaataagtgtatggttggcactgctgattttcattatgatcacattggcgtactacatgtttagaattaaccaagacatcaagaaggtcaaacttctgtaa

SEQ ID NO: 80619 - DNA, 852 bp, Saccharomyces pastorianus
atgactacaagaaagacagcttcctctcttcagcttttagggaaaatcacaggaacaaaagctggaactgagcaaaagaagatgaatttcattaatggactgatatggttatatatgtgtgtgtggatggtgcacggaaaagtgacgcagaaggatgaattgaaatggaataaaggatactcgctaccaaatttgctagaagtgacagatcagcaaaaagaactttcacaatggactttgggtgacaaagtaaaacttgaagaagggaggtttgttttaactcctggaaagaatacaaagggttcactttggttgaaacctgaatattcaataaaggatgcaatgacaatagagtggacgtttagaagtttcgggttcagaggcagcacaaaggggggtcttgcattttggctgaagcaaggaaatgagggagatagtaccgagttatttggtggaagttcgaagaagtttaatggtttgatgatattgttacgattagacgataagttgggagagagcgtgacagcgtatttgaatgacggaacaaaagatcttgacattggatcctcaccgtattttgcgtcatgtctgttccaataccaggattccatggtaccatcaacattaagattgacttacaatccactagataatcacttgttaaagttgcaaatggacaacagagtgtgtttccagacgaggaaagttaaatttatgggcagcagcccatttaggattggaacaagtgctatcaacgatgcatccaaagaatcgtttgaaatcttgaaaatgaagctttatgacggagttatagaggattcgctaattcctaacgtgaatcctatgggataa

SEQ ID NO: 80620 - DNA, 1107 bp, Saccharomyces pastorianus
atggaggaagagaaattggaagtaacaaatgtgaatgcgtcctcttcaaaaaaagtacataaaagcaaaaagagcacttcaaaatatgaccaaaagaatgtatttagaaactcaatgacaggaattgcacaaatactgccaacaaaacctgtgaaaattatagagcagaatattgattttgccaatccgaagagcttcgacctcctgcaatctacacatactatttgctttaataaaagaattaacactactaataccaagttgaatgtggaaactcatacttctagtgatattgacaacgacatattgcacgttggagcccccacagacttggggggaaacagtaatgacgaagcggaaacaaggcaactaaggaagtttcgatggtccaataataaagaaaaaagtctttgtgaaaagttaacagtcatatattgggccctcttgctccacacaacaaagagagcaagtaaaaggagacctatattatgtcatcaaatgatagctgagttttttaacagagtttataaggagaaatcaagagtacctataacttcaagatatattagagataacctcgtcgcttgggtcactcaaggaaaggaattgcatgaaaaaggttgggtaggggatgccaaaactggcgatttgcaagaacagttcaatatagccactgtcaaattatatgaaagcgcagaagacgggcgtctttccattggtaaagacaaaccctttcgagaggaaaacaccggcagtgatagtttggttcgagcggaagaggactctaccgctgtcactaatgaaaatggacatatttcttcagaaaaaaacttgaaaaaagatcgtagagagtctataaggaaccaaatcctgactttagacctaaatgacgaagattttttccaaaatgtaatgaaagttttatcagccattgatgaaccagaactgagacaatatgtaatcgtaatctcagaattagttagcatggaaatggatgatggtaaaacggtacgagaaaagctccgagacgttgaattgaatattaataggttgcaggttgatataaaagaaataaaggaaatgcttgttacactgataaacaaatga

SEQ ID NO: 80621 - DNA, 456 bp, Saccharomyces pastorianus
atggctggctctcatatcatatcaatgaccctaaaagaaatgtaccaaatgattactatgggtggaaatgctgaattagaacttgtggatagtctagatcctttttctgaaggagttacgtttagtgttatgcctcctaaaaagagttggagaaatataacaaacctttcaggtggtgagaaaacactaagctccttggctttggtttttgctttacataagtataaaccaacccccctttatgtcatggatgaaatagatgccgctctggatttcagaaatgtctcaatcgtagctaactatatcaaagaaagaaccaagaatgcacagtttattgttatttcgctgagaaataacatgttcgaattagcgcaacagttagttggtgtttataaaagagataatagaaccaaaagtaccacgattaaaaacatagatatcttaaacagaacttag

SEQ ID NO: 80622 - DNA, 3639 bp, Saccharomyces pastorianus
atgtctgatagtccattgagcaaaagacaaaagcggaaggccgcccaagaaccagaattatctcttgatcaaggtgatgccgaagaagaatcgcaggtagaaaaccgagttaacctaagcgagaatacaccagagccggatcttcctgcgttggaagcatcttattccaaatcttatactcccagaaagcttgttttgagttctggggaaaatcggtatgccttttctcaacctacaaactcaacaaccacgtcattacatgtaccgaacttgcaaccaccaaaaacctcttctaggggtcgcgaccataagtcctactctcaatcaccaccaaggtctccaggaagatcgccaactagaagattagaattgctccagctttcgccagtgaaaaatagcagggttgaactacaaaaaatttatgatagccaccagtcgtcgagcaagcaacagagcagactatttattaacgaattggtcttagagaacttcaagtcctacgctggtaaacaagtagtaggtccctttcatactagcttctcggccgtggtaggccccaatggttcaggtaaatcaaatgtcatcgattccatgttatttgtatttggatttagagcgaacaagatgagacaggacagattgtcggatttaattcataaatcagaagctttcccaagtttgcaatcatgttccgtagctgtgcattttcagtacgttattgatgaatcttcgggtacttcccgaatcgatgaagaaaaacctggattgatcattacaaggaaagcctttaaaaacaactcatcgaaatattacataaacgaaaaagaaagtagctacacagaggtgacaaagcttttaaaaaatgagggtattgatttagaccataaacgatttttaattctacaaggtgaagtagagaatattgctcaaatgaagcctaaagcagaaaaagagagtgacgacggactactggaatatctggaggacataattggaactgcaaactataagccgttaattgaagagcgaatgggacagattgagaatctaaatgaagtttgcctggaaaaggaaaatagatttgaaattgttgatagagaaaaaaactctttagaatcagggaaagaaacggcgttagagtttttagagaaggaaaagcagctgacgcttttaagatcaaaattatttcaatttaaattgttgcaaagcaactctaaacttgccagcaccttggaaaagatctcctcttcgaataaagacctcgaagatgagaagatgaaatttcaagaatctttgaaaaaagtggatgaaattaaagcacaacgtaaggaaataaaagatcgaatatcatcttgtagctcgaaagaaaagaccctggttttagaaagaagagaattagaaggcaccagggtgtctctagaagagagaacaaaaaatttggtaagtaaaatggaaaaagcagaaaagactttgaaatccaccaaacattcaatatcagaggccgagaatatgcttgaagagcttcgtggacaacaaaccgaacacgagacggagatcaaagacttgactcaattgctggaaaaggaacgaagtatacttgatgatattaaactatctttgaaagataaaacgaaggatatatctgcagagattattcggcatgaaaaggaactggagccttgggacctccaacttcaggaaaaagaatcacagatacaattggctgaatccgaactatctttgttggaggaaactcaagctaaactgaaaaaaaacattgaaactttagaagaaaaaattcttgccaagaaaacacacaagcaggagctacaagatcttatcctcgatctgaaaaagaagctgaactcacttaaagatgaaaggtcgcaaggtgaaaagaattttacttctgctcatctaaagttaaaagaaatgcaaaaggttttgaacgcgcatcgccagcgtgcaatggaagctagatcctctttatcaaaagctcaaaataaaagtaaggttttaacagctttatcgagactgcaaaagtcaggacgtataaatggtttccatggacgtttgggcgatttgggcgttatcgacgatagttttgacgttgctatttctactgcttgtccgagactggatgatgtcgtggttgatactgtagaatgtgcgcaacactgcatcgactacttgagaaaaaacaaacttggttatgcaaggtttattctcttggataggttacgccaattcaatttacaacctatcagtataccagaaaatgtaccgagactatttgatttagttaaacctaaaaacccaaaattctcaaatgcattttacagtgttcttagagacactttggttgctcagaatttaaaacaagccaataatgtagcatatgggaagaaaagatttagagttgtcactgtggatgggaaattaattgatatttctggtacaatgagtggtggtggcaaccatgtagcaaaaggtctaatgaaattaggtacgaatcagtcagacaaggttgatgattacacccccgaggaagtagataaaattgagcgtgagctatctgaaagagaaaataacttccgcgtggcaagcgatacggtccacgagatggaggaagaactgaaaaaattgagggaccacgaaccagacttggaatcacaaatatcaaaggcagaaatggaagctgattccttggcgagtgaattgacactggcagaacaacaagtgaaagaggcagaaatggcgtacgtcaaggcagttagtgacaaagcgcaactaaacgtggtgatgaagaatttggaacgcttgagaggcgaatacaatgatttgcaatccgaaacaaaaactaaaaaggaaaagatcaaaggcttgcaagacgaaatcatgaaaattggtggtatcaaattgcaaatgcaaaattcaaaagttgaatcagtttgtcagaaattggatattctagtggccaaacttaaaaaagtcaaatctgcctcaaagaagtcaggaggagatgtcgtaaagtttcaaaaactgctccaaaattctgaaagagacgtagaactatcatcaaatgagttaaaagtcatcgaagaacaactaaaacatacaaaactggctttggcagaaaatgacacaaatatgaatgagacgctcaacttgaaagttgaattaaaagaacagagcgaacaactgaaggaacaaatggaggacatggaggaaagcatcaatgaatttaaatctatagaaatcgaaatgaagaacaagctggaaaaattgaactcactgttgacgtacatcaaaagtgagataacgcagcaagaaaaaggattaaacgaactatcaattagggatgtaacccacaccctgggaatgttagacgataataaaatggactcagtgaacgaggatgttaaaaacaatcaagaacttgatcaggaataccggtcctgtgaaactcaagatgagagtgaaataaaggacgatgagacttcttgtgacaattatcatcctatgaacgttgatgagacttcagatgaggtatccagagggataccaagactttctgaggacgaattaagggagttggacgtagaactgattgaaagtaaaataaatgattgtcatata

SEQ ID NO: 80623 - DNA, 1671 bp, Saccharomyces pastorianus
atgccttcacaagcgtatagttactttagagaatctgaatggaacattttgaggggctatcgatctcaaattaaagaaatggtaaacatgacttctatggaaagaaacaatttgatgggttcttggttacaagaatttggtactaagactgctatttacgaaaatgaacaatatggagaaacattgtacggtgtaatgcacgctcctagaggtgatggaacagaagcgatggtgcttgccgttccatggtttaattcagatgatgaattcaatattggcggcgcagctttgggtgtatctttagcaagatttttctcacgttggccagtatggtccaagaatataatcgttgtcttcagcgaaaatcctcgtgcagcattaagatcatgggttgaggcataccatacttccttagatttgactggtggttccattgaagctgctgttgtgttggattattcgagtacggaagatttcttcgagtatgtagaaatctcatacgacggtctgaatggtgagctgcccaatttggatcttgtcaacatcgctatatccattacggaacatgaaggtatgaaagtttctttgcacggtctacccagtgatcagttaactaataataatttctggtcaagattaaaaatattatgcctgggaataagggattgggcgttgtccggtgttaaaaagccgcatggtaacgaggcatttagcggctggaggattcaatctgtaacattgaaagcacatggaaacagtggtcatgatattactacatttggacgtatacccgaagcaatgtttcgctctattaataaccttttggaaaaatttcatcaatcgttcttcttttatttgttattagcaccacgtcagttcgtatccattagtagttatttgccaagcgctgtggctttatctatagcattcgccataagttcattaaatgcatttataaacaatgcttatgcaaatatatccttattttccgagtataatttggtagcgttgttggtttggttcgtgtcattggtgatatcatttgttgtttcacaagcgtttcttctaataccttcatcgggattattgatgacaattagcattgcatcttgttttttacctttgatactttccagaaaaattcacatctcagaaccactatcatacaggttgaaaaatgttgcttttttatatttcagtttggtttcaacatctttgctaatgataaactttgcaatggctttactgatcggtacattggcatttcctatgacatttgtgaagaccattgttgaaagttctagcgaacatgaggtgacaactcgatcctctatcccaataaaaactgagccgaaagatgagatagagctcgtcgagaatcacatggatacaacgccagcaaccccccaacaacagaaacaaaaactaaaaaatttagtactattaattttgacaaatccatttatttcaataaccttattcggactattttttgatgatgaatttcatggatttgatataataaacaaactggtttcagcatggttggatttgaaatgttggagttggtttgtactttgtataggttggcttccatgttggctattgatattagcgtcatcgtttgaatctaaatctgtcgtagtaaggtcgaaagaaaagcaaagttag

SEQ ID NO: 80624 - DNA, 159 bp, Saccharomyces pastorianus
atggccttattggagaagttgcatcgaaggattgttgatatggggcttgtcccgcgtataatcgccttattaccagttatttccatgctatgcgctctatttggtttatttctatcgctattctgcctatggacctcaggcatgcagctggcactgccg

SEQ ID NO: 80625 - DNA, 213 bp, Saccharomyces pastorianus
gttcaagaagctcgccacttagagttaactccggatgaattttattgtaagaagttgttagaatctactggcatttgcactgttcccggttctgggtttggccaagaacctggtacttaccatctaagaacaacatttttggcacctggtctggaatggattaagaaatgggaaagtttccataaagaattttttgaccaataccgtgactga

SEQ ID NO: 80626 - DNA, 948 bp, Saccharomyces pastorianus
atgagagctgaagaattgaaagctcaactggagaaggatcctcaatctctgccatttgataggattatcaacgccaatattggtaatcctcagcaactacaacagaaacctctgacttactacagacaggtcttgtctctcttacaatacccagaactattaaaccaaaacgaacagcagctagttgattcgaaattgtttaaactagatgccattaaacgtgcaaagagtttaatggaagatatcggtggttctgttggtgcttactcttcttctcaaggtgtagaaggtataaggaaaagtgtcgctgaatttataacgaagagggacgaaggcgagatatcatacccagaggatattttcctaactgctggtgcatccgcagctgtcaattacttgttatcaattttctgtagagggccagaaacgggtgtcttgattccaattcctcaatatccattatataccgctactctagctttgaacaattctcaagctttaccatactatttagatgagaattcaggttggtcaactaatccagaagaaattgaaactgtcgtcaaagaggctatacagaacgaaatcaaacctacagttctagtggttatcaatccaggtaatcctacaggagctgtcctatcacctgagtctatagctcagatttttgaagtcgcagccaagtacggtacagtagtgatagctgacgaagtttatcaagaaaatatcttcccgggcactaagttccattctatgaagaaaattttgagacatttacagagggaacatccaggtaaattcgataatgttcagctagcttctttgcattcgacttctaagggtgttcctggtgcatgtggtcaaaggggtggctacatggaactcactggattcagccatgagatgagacaagttatctcgaaactagcctcgattccatcgtgtccc

SEQ ID NO: 80627 - DNA, 333 bp, Saccharomyces pastorianus
atgttatcactgtctgccaaaaatcacttcacagtgagtaattctataactcacgttattaagtcatatcatataaggactctcacttcaagcgcagaaaaaatgccacatatcactactcctttttctacctcagccagtagtacaaagttaaaagctttcaggaaagttagacccgtcctacagagacatagctcttcctggattgttgctcaaaatcatagacgttcattatctggtcaatcttcgctaaacgacctgcgtcatttgaatcgctttccacaccacacgttgaaacttcgaataacgagttttatcccgccgaacaattga

SEQ ID NO: 80628 - DNA, 408 bp, Saccharomyces pastorianus
atggaaaacgcgcccagcacctcagtcgatgttgaaagagatgacaggccattgctgaaaatactatgcttagacttctcacaagtggcacagacagacgctacggctcttcaatcattggttgatttgagaaaggccataaatcaatatgcagataggcaagttgaattccactttgtgggtatcatttcaccatgggtgaagagaggtttaattagcagaggatttggtactctgaacgaagaatacagtgatgaatccattgttgccggtcatacaagttatcacgtagccagagtacctcaaggcgaagaaaatcctgaaaaatatagcgtttataccgcttcaggaacaaatctacctttcttccatatcgatatcccagattttgctaagtgggatatctag

SEQ ID NO: 80629 - DNA, 1695 bp, Saccharomyces pastorianus
atgtccagggaaggttatccaaacttagaagaggtagaaattcctgactttcagggaactaacaacaccgttccagatcttgatgatttagagttagagtacgaccaatataaaaataatgaaaataatgacacgtttaatgataaggacttagagagcaattctatagcaaagcacaacgcagtgaacagctcaaagggcgtaaaaggctcgaagattgactactttaatccttcagatgtctcgttgtatgacaattccgtttcccaatttgaagaaacaacggtatcgctaaaagagtactatgaccacagtatacgatctcatctcacggtgaaaggagcatgtagttatcttaagagtgtttttcccatcatcaactggctaccacattacaattttagctggtttactgcggatcttattgcaggaattaccattggctgtgttctcgtgccgcaatccatgtcgtatgcacaagtcgccacgctaccagcgcagtatgggttgtactcctcgtttattggtgcttactcctactcttttttcgctacatcaaaagatgtttgtattgggcccgtggctgtcatgtctttgcagaccgccaaagtcattgcggatgtcacggccaaatatcctgatggagattctgccataactggtcccgttattgcaacgactctagcgttactatgtggtatcatttcggcagcagttggcttcttgcgtctagggtttcttgtcgaactgatttccttaaatgcagtcgctggatttatgactggatccgcgtttaatatcttatggggtcaagttccagcactaatgggttacaatagtttggttaacacgagagctgccacctataaagtggtcatagagaccttgaaacatttaccagatactaaactggacgcagtttttggactaatcccgcttttccttctttatgtttggaaatggtggtgcggaacatatggaccaaggttgaacgatagatacaactccaaaaacccaaggttacacaaaattatcaaatggacatatttttacgctcaggcttccagaaatggtatcattattattgtattcacttgtattggttgggcaatcacaaggggcaaatctaaatcggagaggcccatcagcatcctaggctcagttccatccggtttgaaagaagtcggggttttccatgttccaccaggattaatgtctaagcttggtccaaatttgcctgcatccattattgtgttattgttggagcatatcgctatttcgaagtcttttggtagaatcaacgactataaagtcgtccccgaccaagaattgattgctattggtgtctcgaaccttttaggtactttcttcaatgcttacccagcgactggttccttttcaaggtctgctttgaaggctaaatgtaatgtccgtacgccgttatctggtttgttttcgggttcatgtgttcttttagcattatattgtttgaccggcgcattcttttacattccaaaggctaccttatctgcagttatcattcacgctgtatctgatcttttggcctcttattcaactacctggaatttctggaagatgaatccattggacttcatctgtttcattgtcaccgtcctaataacggtatttgcctctattgaagatggtatttactttgccatgtgctggtcatgt

SEQ ID NO: 80630 - DNA, 219 bp, Saccharomyces pastorianus
atgaacgataacatcgacaagttcttggagagacaagaaagagtttctttattggtggataaaacttcccaactaaatagcagcagtaataaatttaggcgcaaagcggtcaatataaaagaaataatgtggtggcagaaggtccaaaatattacgttattaactttcactattatactatttgtaagtgctgctttcatgtttttctatctgtggtaa

SEQ ID NO: 80631 - DNA, 1290 bp, Saccharomyces pastorianus
atgccaaattctgttgatgtaaaacagaaacccgctaaaaacactaccatagcacctcctataaggtcagtatcacaaaagcaaaacagtgatcttccagctttacctcagaacgccgaactaattgttcaaaaacaacggcaaaaactattacaggaaaatctcgacaaattacaaattaatgataatgataacaacaatgtgaacgctgtagtcgatggtatcaataatgataatagtgaccattatctctccgttccgaagggtcgtaagttacatcctagtgcaagggctaaatcggtggggcatgctcgtcgtgaatctttgaaatttactaggccgcctatattagcagcccttccgccatcagatatgacaaacgataacggctttttgggagaggcaaacaaggagagatacaatcctgttagcagtaacttttcgaccgttcctgaagattctaccacatacagtaacgatactaacaatggactgacttcggtgtattctcaggagcttactgagaagcaaattttggaggaagcttcaaaagcaccccccgggtctatgccatcaattgattatccaaagtcaatgtttttgaagggttttttctctgtacaaacaacctcctctaaaccattgcctattgttcgtcacaatatcatatctgttttaacaagaatgaatattgatttcaaagaagtgaaaggcgggttcatatgtgtccaacaaaggccatctattgagactgcagctgtccctgttataaccactactggcgtgggtttggattccggaaaggcgatggatctgcaaaatagtttagacagtcaattatcatccagttaccatagtacagcgtcctcagcatcaagaaatagttcgataaaacgccaaggttcttataagaggggccagaataatataccactaacacctttagcgaccaatacacatcaaagagattcatctatcccaatgtctccaaactacggaaaccaaagtaatggtacatcaggggaactatcttccatgtcattagattatgttcaacaacaggatgatattttaacaacatcaagagcccaaaatataaataacgtaaatggtcaaacagagcaaaccaatacttctggtataaaagaaaggcctcctattaaatttgagattcacattgtaaaggttcgtatcgtcggcctagcaggtgtacatttcaaaaaggtttctggtaatacgtggctatataaagaattggcatcgtatattttaaaagaattaaacctatag

SEQ ID NO: 80632 - DNA, 1833 bp, Saccharomyces pastorianus
  modified_base (1721)..(1721): a, c, g, t, unknown, or other
atgcctaatccgaatacagcagattacttggtgaatccaaatttcaggaccagtaagggcggatctttatcgccgacgccagaagctttcaacgacacgcgagttgctgcaccagccactcttcgcatgatgggcaagcaatctggaccaagaaatgaccagcaacaagcaccactgatgcctcctgcagatatcaaacagggcaaggaacaggcagctcagagacaaaatgatgcatcgaggcctaatggcgccgtggaattaaggcaatttcatagaagatctttgggagattgggagttccttgaaacggttggcgcaggctctatgggtaaagttaaattggtcaagcatcgtcaaacaaaggaaatttgtgtaataaagattgttaatagggcttccaaggcttatctccataaacagcactctttaccttccccaaagaatgagagtgagatattagaaagacaaaagcggttagaaaaagaaattgcgagggataaaaggactgttagggaagcctctttgggccaaatcctttaccatcctcatatctgtcgtttatttgaaatgtgcactatgtcaaaccatttttatatgctttttgaatacgtttccggtggacagctgttagattatattattcagcatggctcattaaaggaacaccatgcgaggaaatttgccagaggtatagctagtgcgctgcaatacttacatgccaataatattgttcatcgagatctgaaaattgagaatataatgatatctagttcaggtgaaattaagatcattgattttggtctttccaacatttttgattataggaaacaattacatacgttttgtggttccttgtactttgcagcaccagaactattaaaagcgcagccatacacaggacctgaggtagatatttggtcgtttggtattgttctttatgtcttggtctgcggtaaagtaccatttgatgatgagaactcaagcattttacatgaaaaaataaaaaaaggtaaagtagactatccttcacacttatccattgaagttatatctttattaaccaggatgattgttgtcgacccattaagaagagcaacattaaagaatgtcgttgagcatccatggatgaacagaggatacgattttaaggctccatcatatgttcctaatcgtgttccattaacccctgaaatgatagatagccaagttctgaaggaaatgtatcgcctagaatttattgacgatattgaagatacaagaagatcattgatccgattagtaactgaaaaggaatacatccaactttcccaagaatactgggacaaattatccaacgccaaggggttgagttcaagtttaaataataactacctaaattcaacggcacaacaaaccttaatacaaaatcatattacaagtaatccatcgcaaagtggttataatgaaccagatagtaattttgaagatcctactttagcatatcatccattactatcaatatatcacttggtttcagaaatggttgcacggaaattagcgaagttgcaaagaaggcaagcattggccctgcaagcgcaggctcagcaaaggcaacaacagcaacaagtagcacttggcactaaggtcgccttaaataataactccccggatattatgaccaaaatgaggagccctcagaaagaagtagtacctaatcctggtatctttcaagtgccggncattggaacatcgggaacctcaaacaacactaataacctcaacaaacctccactgcatgtaatggttcctcctaaactaacataccggaacagcgcatactttcaaatctag

SEQ ID NO: 80633 - DNA, 948 bp, Saccharomyces pastorianus
atgtcagatgctataaacttctatcgaagtgcattgaaaatccatgataatgtggaatcactgtacagaaaaaaaatacttgatgagtggatgctgcacaaaaaactatcgggattatcaatgactactgatgctccagatgaacaaaatgaaaccggtaaagatgacttatctgttgaagaaaatgctgaacttcaaccctgctggattctggaaatcttgcctgacgacattttactgagaattattaaaaaagttatattaatgtctggtgaatcttgggtgaatttgtcgatgacttgttccacctttagcaagctttgcttccacgattctgtgccatttaaaactttcgcgaagtacatatattctaagcaaatatacgacaaaatggcaatggatcttaacggaatcaccgatataaatacctttgaaaaggaaatatggcggggtgatgattatcgtatgttaagggaaaggccatatattaaattcgaaggtgtttacatcagtgtagtaaattatgtaagatacggttccaatgcagaaagttcgttatctcttttaaagccagttcacatgatcacctattacaggtatttcagattttatgagaacggccaatgtttgagattactttctacagatgaacctagcgctgtcgtgaagcacttctccaaagagaacaaacccaggcatagtcatatgtgttattggagcctcggatttgattatgattttggtcatttaaagataacaaggtcagatgaaaagtatacgtttatcgaagaattccaaatcaagaatcaaggcaataagagatatcaacggttgaaatggctaagttcaattgtagtggataaggaagggaatgcatctaactgttcgttgagaaatgagaaatcttttttcttctccagagtgaaatctttcaaggatcctggatga

SEQ ID NO: 80634 - DNA, 135 bp, Saccharomyces pastorianus
atggcgtttccaccaataactgcagaaacggatgctaaagtgagaatagataattttggaaggtccataattgaaatacgtcgtgaagatctttcaccattcctggagaagctgaccttgagtggattgttataa

SEQ ID NO: 80635 - DNA, 105 bp, Saccharomyces pastorianus
atgtggaagctaggtacaaataatggaagaatcattctcgttgctgtaaaagccgaaaccttctctgggacgaaggaatattgcaaaatgattgattttctgtga

SEQ ID NO: 80636 - DNA, 1377 bp, Saccharomyces pastorianus
atgtctggccgaaagggcgagatcgtggtttatacaaaagagttagaaactacccccgagcttttaccaaaccatgaagttttcaagattaggattggccaaaagctatttgagatctcaggtgctacattgaattcggatgcgcccaattttttcacccgattcttcaatgcgcacgataaaaatacgattctatttgttgatagatcggaagacgtgttcatcataatatacagacatttacaaggttattttcccgatattaaggacgaagtacaatttacctgtcttttcgcggacgcattatattttcagttacccaagttagttaaactcataaaagaatacgactaccacttcactaatattggaggtgttccctttaaggtaccaaaatcattattccatgaagaagggaaccggttgaactattttgaaacgatttctcgcacatcttatgaggaaattgagaagtgggagtcaaataagaagccgggctccccacctttattaccaccctcatatattgcaaggtccccagaatttttccgagatatattatctttactgggcggttccgaattagaactgtctgaggaaagaaccgcatctctgataaaagagtgtcgttattaccgtctcaacaggttggagcaggaattagtgcgggcaaaaattatatataatcccttaactaattgtcaagaagtttgcatagctcttgatagcgtctccaagaagggtgtaaccattgaaaggttaacatcacttcataccggaaaccaatctttagcggtaagcagttgtctcaatggaactgagggtgaaaaaaccgctactggatttcataaaaccgagactgattcaggcaacaatgacgaatctgaacctccaacaaaaaaggtaaaacattgtattgaaagacactggagcatgttaaaataccaaaggccttatatcgatacagtttcgcacgatcttattttccaattacactctaaccagtgcaaaataatattcaacaaaaagaataagactgttcatgtagacctatccagagaggctgcaatgttgtttgaaaacaagttctcggatgttttattggaaaacccagattttaaaattgatctgtccgaatataaggtcaaacttcgtgacagtcaaatgcaagttgaatcccacttaattattcctgcatgtgtctccatttgtgacttgacggtaaatggcgcaaaatgctgtaatattttctcattagttaacgactccaaatgtaaagagagggtcttggattgcaccaatttgaaagttttgaattgcgttcatggtttgaaactacactttatcgaaatccatgtggaagctaggtacaaataa

SEQ ID NO: 80637 - DNA, 1185 bp, Saccharomyces pastorianus
atgagaaatcaagacattttagtggaaaacgtcaatggagtaccaccgattgatcatattatggggggtgacgaagatgatgatgaagaggaagaaaacgacaatttgttgaatttactcaaggataactctgagaaatcagcagcgaaaaaaaatacggaagttcctgtagacattataattcaaccaagtgccgcttcaaaacataaaatgttcccatttaaccccgctaaaatcaagaaagatgattatggtactgttgtagattttacgatgtttttacctgatgattctgacaatgttaatcaaaatagcaggaaaagacctctcaaagacggtgctaaaaccacgagccctgtaaacgaagaagataacaaaaatgaagaagaagatggttataatatgagtgatccaattagcaaaaggagcaaacaccgtgcttctcgttactcgggattttctggaaccggagaagcagaaaattttgataaccttgactatttaaagatagacaaaacgctctccaaaagaacaatctcaactgtaaatgtccaattgaaatgctccgtagtaatcctaaatttacagagtttagttgatcaaaggtctgcatctattatatggccatcgctaaaatctagaaaaatagttctttccgcccccaaacagattcaaaatgaagaaattacggcaaaacttatcaagaaaaatattgaagtggtcaacatgccattaaataagatagtggaattcagtacaacaataaagaccctggatatctccattgactccaacctcgataaccttttgaaatggcaacgtatcagtgatagttatacagttgccactgtcgttggcaggctggttaaggagagcctaccgcaagtgaacaatcatcaaaaaacagcgtcaaggagtaaactagtcttgaaaccattacacggttcatctaggagccataaaacaggtgcgttgtcaatcggtgacgttaggttagcacaattaaagaaacttctcacagagaaaaactacattgcagaatttaaaggggaaggtacacttgtcataaatgaaaaagtagcagtccgcaaaatcaatgatgcagaaactattatcgatggtacgccttccgaactttttgatactgtcaaaaaattggttacggatatgttagcaaaaatctag

SEQ ID NO: 80638 - DNA, 939 bp, Saccharomyces pastorianus
atgacttataaatacaattgctgtgatgatggatccggaaccaccgttggttcagtggtacgatttgataacgtcaccttgttaatcgatcccggttggaatccatctaaagtatcgtatgagcaatgcatcaagtactgggaaaaagtgataccggaaattgatgtaataatactatcacaaccaacaattgaatgtttaggtgctcattcccttctgtactataatttcacctcccatttcatatccagaattcaagtttacgcaactcttcccgttatcaacttagggagagtttccaccatagattcatatgcatctgcaggtgttataggtccatatgacacaaataaactcgatcttgaagatattgagatatcttttgatcatattgttcctttgaagtactcgcaattggtagatctacgatcaagatacgatggattgactttgctggcgtacaatgctggtgtgtgtccaggtggttctatttggtgcattagcacatactcagagaaattggtttatgcaaagcgatggaaccacactagagataacatactaaatgctgcttctatattggacgccactggtaagcccttatcaactttgatgaggccctctgcaataattactactttggacaggtttggctcctctcaaccgtttaaaaaacgttcaaaaatctttaaagatacattaaagaaaggtttgagttcggatgggtccgttataataccggtagatatgagtggcaaatttctggacctgttcacacaagttcatgagttattatttgaaagcacaaagatcaatgcgcacacacaagtacctgtacttattctgtcttacgcgagaggaagaactctaacatatgccaaatcaatgctcgagtgctgtccccttcactacttaagacatgggaaacgggatcctcta

SEQ ID NO: 80639 - DNA, 477 bp, Saccharomyces pastorianus
atgagccgttttgacagaaacgccacggtaaataattctgcgccaatgcagagcaatgacgtacactataatagcaatactcatccaattcaagcaccaaaaagatctcgttatgacaataattcggcggaaccttctttaaaatttccggcttcttcacgttatgcaccatcaccttcacctcctgcgtcacatatttcgaggcaagctcaaaacgtgacgcctacaccccctcccggcctaacatcaagtagctttagttccggagttccaggaatcgcccctcccccattacaaagccctccagagtcggaacaaccgaaattttcgctacctccaccccccggtatgactacggtacaatcctcaattgctcctcctcctggcctaagcggtcctccagggttttctaataacatgggcaatgacattaacaaacctacacctccgggactgcaagggcctcccggattataa

SEQ ID NO: 80640 - DNA, 285 bp, Saccharomyces pastorianus
gtttttgaagaggcgatagtttttttcaaggagaaggatgataaacaagggagactgtctattttggaagcgctaaaagactatgaagaaacttacggtactgaactcgatcaagaaaccgtcaagaaaagattccctaaagtaatcaaaaaagtgaggttacaggacggtgtggaagaagaattcgtggattacgtttttcctgatgatatcgatgatgacaagccaaaaccatcaaagttcttggaactagccaaaaaatggaaacaggaacaggcactttga

SEQ ID NO: 80641 - DNA, 1161 bp, Saccharomyces pastorianus
  modified_base (1099)..(1099): a, c, g, t, unknown, or other
  modified_base (1133)..(1134): a, c, g, t, unknown, or other
  modified_base (1141)..(1141): a, c, g, t, unknown, or other
  modified_base (1156)..(1157): a, c, g, t, unknown, or other
atggacactttagagccaacagctgttgatacgcatgtttctgcggagcagattctgcgggatgtgtacaagaaggggcaaaaagcaagaggatcgactaatattgatatattagacttggaggaacttcgagagtatcaacgaaggaagagaacagaatatgagggttatttgaagagaaaccgattggatatgggacaatggattcgttatgcgcaattcgaaatcgaacaacacgacatgaggcgcgccagatctatctttgaaagagcattattagtagatagttcattcatccccctttggatacgatacattgatgctgagctgaaagtcaaatgtattaaccatgctaggaatcttatgaacagagctattagtacgttgcccagagtagacaagttatggtacaagtatctcattgtcgaagagtcgttaaacaacgttgaaattgtacgatcactgtacaccaaatggtgctccttggagccaggggttaatgcatggaattctttcgtggattttgaaataagacagaaaaactggaacggtgtaagagagatttactcaaaatacgtcatggctcacccgcaaatgcagacgtggctaaagtgggtgaggtttgaaaatagacatggtaatactgaatttacgagaagtgtgtattctttagcgatagacacagtagctaacctccaaaatttacagatttggtctgatatggaggttgcaaaattagtaaattcatttgctcattgggaagctgcgcagcaagaatacgaaagatctagtgctctttatcaaattgctatagaaaaatggccctccaatcaattgcttaaggcaggactgttggattttgaaaagcagtttggtgacataaactcaatagaagaaactattagctataaaaggaaaatggattatgaaacaatattgggtaataacgcctatgattatgacacctggtggctgtacttggatctcatttcagaaagtttccccaaacaaataatgcaaactttcgagaaagctgttgtggacagccgaccaaaagaactatcaaaaaatgttcagtggaaaagcgtatactttatcntgtggactgagatatatatgcgtaatgttgagtnntggaatntggaaaattcgcttnnttag

SEQ ID NO: 80642 - DNA, 552 bp, Saccharomyces pastorianus
atggatgtggtaccatctccgggtttaccagaaaaagtaaacgaaaaaagcaaaaatattcccttacctgaaggaattaaccttttatcatcaaaggagataatcgatctaattcaaacccacagacaccaattagagttatacgtcacaaaattcaatcccttaacggactttgctggaaagattcatgcattcagagatcaatttaaacaattggaagaaaattttgaagatttacatgagcaaaaagataaggtccaagccttattagaaaactgtaggattttagaatccaaatatgtagctagctggcaagattaccattccgaattttcaaaaaaatatggtgacatagcattaaaaaagaaattagaacaaaacacaaagaaacttgatgaggagagttcacagctagaaactaccacaaggtccattgactcagccgatgacctggatcagttcatcaaaaattatctggacatacgaacacaatatcacttgaggagagaaaaactggcgacctgggataaacaaggtaatttgaaatactag

SEQ ID NO: 80643 - DNA, 108 bp, Saccharomyces pastorianus
atggcgctctttcatacagtcttcattctatggccgcacttttgtggcattctctggacggtccatgaaaaattatataactatttgctttctattgaagtctattga

SEQ ID NO: 80644 - DNA, 96 bp, Saccharomyces pastorianus
atgataatgcaaaagcggctcctaaacagaaattcttcagtagtcaaatctcgaaattgccttgcttgtcatcaacatgaatcatctatatcataa

SEQ ID NO: 80645 - DNA, 210 bp, Saccharomyces pastorianus
atgtttttcttgtgcttggtattgcttcgtggagatatatattctcatatcaggacggaattttacaaagtgagaactctaaatggtgtagtaaagagaagaaaaaaaaaaagctcagcgatttacgctcattacaaccaccgagattcactaggaaacggagctgtccctcggaatttattgtcaacatatcatccaatgctaatgtag

SEQ ID NO: 80646 - DNA, 267 bp, Saccharomyces pastorianus
atgatgcagcgtgttatcacatcttgcgttaccgggccttgcaaaaattgctatgtttttcttgtgcttggtattgcttcgtggagatatatattctcatatcaggacggaattttacaaagtgagaactctaaatggtgtagtaaagagaagaaaaaaaaaaagctcagcgatttacgctcattacaaccaccgagattcactaggaaacggagctgtccctcggaatttattgtcaacatatcatccaatgctaatgtagaatga

SEQ ID NO: 80647 - DNA, 363 bp, Saccharomyces pastorianus
atgcctgcaggtcttattgaacatagcgagatggattttgatcaagcacaaaagaccgccccaatggagattgagaacagtaactatgaactacataacgattctgagatagaaagaaaatatgaattgacacttcaaagaagtctgccattcatcgaaggaatgctgactaatttaggcgcaatgaaacttcataagatccattcttttttgaaaattaccgtgccaaaagattggggatataaccgaattactcttcaacaattagagagatatttaaacactctggccgatgagggtaggctgaagtacattgccaatggttcatatgaaatagtgaaaaatgggcctaaaaactcatga

SEQ ID NO: 80648 - DNA, 1869 bp, Saccharomyces pastorianus
atgtcatttcagattaccccaactcgagatttgaaagttattacagatgagttacaaacactttcctcatacatctttcacacaaacatagtcgatgatttgaactctttacttacatggatgagccctaatgatgccaagagtaaccatcaactacgtcctccaagtcttcgtattaagaatatcattaaggttctcttccctaataacgcaaccacatcgccatatagcatgataaacactagtcaggcaaacaattcaatagttaatgagggaaatacaaacaaagagttacaactacaacttttttccacgctcaaagagttttatattttccaggttcgttatcattttttcttacattttaacaacattaattatctaaaagatatccaacgatgggaaaattattacgagtttcctttacgttacgttcctatttttgacgtaaatgtaaacgactgggcacttgaacttaattctttaagacattatctgttgaatagaaatataaagttcaaaaataatttaagaacaagattagacaaattaataatggacgacgatttcgacctggcagacaatttaatccaatggctcaaatctgctaatggttccttatcctctacggaattgatagtcaatgctctttacagcaaaatcaataaattttgtgaagataacatgagtagagtatggaataaaaggtttatgattatggaaacattcaacaaatttattaatcaatattggtctcagttctctaaattagtcggttgtccagaggatgatcacgaactgaccactacagttttcaactgttttgagtccaattttcttaggataagaacgaatgaaatctttgatatatgcgttttggcttatcctgattcaaaggttactttattggaattgaggaaaattatgaaagattttaaagactacacaaatattgtaacaacttttttgtctgatttcaagaaatacattctaaaccccagcgtaactacggtagacgctttgttgagatatgttaaaactatcaaagcatttttggtcctggatccaacaggaagatgcctacattcaataaccacgtttgttaaaccttactttcaggagcggaagcacttagtaaacgtattgttatacgcaatgttggacttacctgaagaagaactaaaggagaaaattaatttcaatgtagatatgaaggcactgctctcacttgtagacactttgcacgattctgatatcaatcaagatacgaacatcaccaaaagggacaagaataaaaaaagcccctttctatggaacctcaaggtgaaaggaaagagtgaattgaacaaggacctaccaataagacacgccatgctatacgaacatatactcaattattatatagcttgggtaccagagcctaatgacatgattcccggtaacatcaaatcaagttatattaagacaaatttgtttgaggtgcttttggatctatttgaatcaagagaattttttatatcagaatttcgaaatctcttaaccgacagattattcactttgaaattttatacgttggatgaaaaatggacccgatgtttgaaattaataagagaaaaaatagtcaaattcacagaaacaagtcattccaattatataacaaacggtatattaggactcccagaaacaacagcccctgcagcagatgcagaccagtcgaatttgaatagcattgatgttatgctttgggatataaaatgtagcgaggagctctgccgtaaaatgcatgaagtggccggactggatcccataatatttccaaatttatctcactcctctactggaagtacaactgcgatacagggatcctct

SEQ ID NO: 80649 - DNA, 405 bp, Saccharomyces pastorianus
atgcaaggctgttccaccatttcagacatgcaagagtgcatcaagacgttagatgttaaattacatgaagacttacaatatttcacacagatttataactatgctttcaatttgattctggacccaaatcgaaaggatatagatacagacgaaggcatccagtattggaagctatttttccaaccagagtacccagtgcgtatggaaccagatttgcttgagacatggttccgtttccttcgcgatgaggggaaaaccactataagtaaagacacctggcgtatgctgctcctctttttcaaacgataccccaccattcagaaaataataagcgattacgacgaaactgcagcctggccatttattatcgatgagttctatgagtacttacaggatcagcaataa

SEQ ID NO: 80650 - DNA, 948 bp, Saccharomyces pastorianus
  modified_base (8)..(8): a, c, g, t, unknown, or other
atgcgaantacccagaacccaacagtaagaaatgcaaacgctttagcgtcatcaagtgtactacctcctattcctggttccagcaataacactccaattaagaattctttgccacaaaaacatctatttcaacatactcccgtcaaagctccaccaaagaacggaagtaacctagctccgcttctaaatgcaccggatttaacagatcatcagttagaaattaagacacccatacgaaataacagtcacggtgaagtggaaagctatccgcaagtaccacctgtcacacatgatattcacaaaagccccactttgcatattacgtctcctttaccagatgaaataatacctaggactacgccaatgaaaataaccaagaaaccaactactctgcctccgggtaccattgaccagtacgtcaaggaactacccgacaaactattcgagtgcttataccctaactgtaacaaagtattcaagcgtagatacaacataaggtcgcatattcagacacatttgcaagatagaccgtattcatgcgactttcccggttgcaccaaggcgtttgttcgcaatcatgatttaataagacacaaaatctcccataatgccaagaaatacatctgcccatgcggaaagagatttaatagggaggatgctctaatggtgcatagaagtcggatgatttgcaccggcggtaagaaattagaacattcgatcaacaagaaacttacatctcccaaaaaaagcctgcttgacagcccgcatgacacaagtcccgtaaaagaaactatcgcccgggataaagatgggagcgtcctaatgaaaatggaggaacagctgcgagatgatatgcgcaaacatggattactggatccacccccatccacagcagcgcacgagcaaaactcgaaccgcaccctttcaaacgaaactgatgctctctga

SEQ ID NO: 80651 - DNA, 684 bp, Saccharomyces pastorianus
atggataacgttgtagatccgtggtatataaatccctcaggcttcgcgaaagacactcaagatgaggagtatgttcaacatcatgataatgtcaatcctaccatacccccacccgacaattatattttgaataatgaaaacgatgatggcctcgataatttgttaggtatggactactataacatcgatgacctgttgactcaagagttaagagatctggatattcctttagtgccttctcctaagacgggcgatggctcttctgataaaaagaatattgatagaacttggaactttggtgatgaaaacaacaaagtctcccactatagcaaaaaatcaatgtcctcgcacaagagaggtctaagtggcacagcgatatttggatttctcggccataataagacattgagtatttccagtttacagcaatccattctaaatatgtctaaagatccgcaacccatggaactcataaatgaattgggtaatcataatacggtaaaaaataacaatgatgactttgaccatataagggaaaatgatggtgaaaatagctatttgagccaagtttcgttgaaacagcaggaggagttaagaattgctcttgaaaaacaaaaggaagtgaacgaaaaattggagaagcagttgagagacaatcaaatacagcaagaaaagtcgcgtaac

SEQ ID NO: 80652 - DNA, 852 bp, Saccharomyces pastorianus
atggatatggtcgatagatatcacaagtggcttatttctcaagaacagggtatagagcaagtcaaccaaaatcttgtattctgccataatgatgcccaatacggcaatggacttttcactgctcctgtgatgaacacaccgagcctatacactgcaccttcgtctacatcattgacttcccaatcaagttccttatttccttcgagctccaatgtcattgtagatgatataatcaacccgccaaagcaggagcaaagccaagattccaaattggtcgtcattgattttgaatatgcaggtgccaatcccgccgcatatgatttagcgaatcatctttccgagtggatgtatgattacaacaatgctaaggccccacatcagtgccacgctgatagatatcccgataaagaacaggttttgaatttcttatactcttatgtttcgcatctaaggggtggtgctaaggaacccatagatgaagaggttcaaagactctataagtcaatcattcaatggagacccactgtacaactattttggtcgctctgggccatcctacaaagtggtaaattagagaaaaaagaagcctccactgccatcactagagaagaaattggacccaatggaaaaaaatatatcatcaagactgaacccgaatcccctgaagaagactttgttgaaaatgacgacgagcctgaagctggcgtcagcattgacacgttcgattatatggcttatggtcgtgacaagattgcggtcttttggggtgaccttattggcttaggcataatcaccgaagaagaatgcaaaaatttcagctctttcaagttcctcgatactagttatttgtaa

SEQ ID NO: 80653 - DNA, 885 bp, Saccharomyces pastorianus
atggtacaagaatcacgtccaggtagtgtaagaagttactcggtcggttaccaagcaaggtccagatcgagttctcaaagaagacattcgttaacacgccaacgttcctcgcaaagactgattagaaccatcagtatcgagtctgatgtgtctaatattactgacgatgacgatttgagagctgtcaatgagggagtagcggatgtgcaactggacgtctctgaaaccgcaaataagggaccaagaagagcatcagcaactgatgtcacagatagtttgggttcgacttcgtcggaatatattgagattccctttgttaaggaaacattggatgcaagtttaccttcggattatctgaagcaggacatattaaatctcattcagagtttgaagatatccaaatggtataacaacaagaaaatccaaccggtagcacaagatatgaacttagtcaagatctctggtgcgatgacaaacgcaattttcaaagttgaataccctaagttaccatcgttgctattgagaatatacggaccgaatattgataatatcattgacagggaatatgaattgcagattttggctaggctttcattgaaaaatataggtccttccctttacggctgttttgtaaacggtagatttgagcagtttctggagaattctaagactttaacaaaagacgacattagaaactggaagaactctcaaaggattgcaaggagaatgaaggagttacatgtaggtgttcctctcttgagttcagaaaggaagaacgggtcggcttgttggcaaaagattaaccagtggttgcgcacgattgaaaaagtcgaccaatggtgggggatcgacctgcaggcatgcaagctggcactgccgtcgttt

SEQ ID NO: 80654 - DNA, 873 bp, Saccharomyces pastorianus
atgttgctgtggatagctatcatgttagctgggcagtccatatcaagcttgcactcgtccagagacaacggaaactccaccacaggatacgttttgtggtctaccacacctttcttcatcaactggctgctgtatagtactagcgctgcacctttccgtcttgggagtcaggtggaagtaacctgcgggtcttcttgcgaggggcacaagcttgagttgcccaggctgatcgacctcacgggcgctgatcgcggcaagagaggtatcttggaacttggagcaggaatatcaggtattttgcccgtgattcttggtaacttcgtcgacacctacgtgtcgacagatcagaagggcattcttaataaactaaaagataacatcatggaaaacttatcacagttgaccagaaagcggtgcatttcccgatcactaagattggaacttcccaccgtcgaaccagttggcgacgctgatatcaccgcagcgtcacttccatctaagtctacgttgcatttggaagtagccgctctagactgggagaagataaacttgcaagacaaaaagacccactctctgcatcctgagttgtcactcataggtgaaacatgttcttccgtgtacgttatagctatggatgtcatatacaacgagtacctgatagatccgtttctgaagacgctcaagcaactcaaacactggttacaaactacctacaatttgcaattccatgtcctcgtggggatacacttgcggtcacaagaggtgacaacactgttcttggagaaagccatcatagaatatgacttcacggtttatgatatcgttgaccaggtcatacaagagtcccgttttaacttttatcttatcacctag

SEQ ID NO: 80655 - DNA, 159 bp, Saccharomyces pastorianus
atggcattcaagttatggctactggatgaggaaacaatatacgagcacgtgttcgaacggtacacacaattggagggccagtccgggaaactggcgcaggatttgggtattcaggatagaaggggcggtgtgctagagataacgttgaccctctacctg

SEQ ID NO: 80656 - DNA, 108 bp, Saccharomyces pastorianus
atggaacacaataatactggccaactttggtcaagaaaatacgtcaatgaagagggtgagttcactttgcccataaaagaagtcctgttggaaaactgggaccagtaa

SEQ ID NO: 80657 - DNA, 606 bp, Saccharomyces pastorianus
atgatccctggtttattgcgttacgaagaaggtattgagttatatgacgaaattgtcttgataactaccaagggtgaagccattgctgttgccatcgcacaaatgtcaaccgttgacttagcttcctgtgatcatggtgttgttgctagtgtgaagagatgtatcatggaaagagatttatacccaagaagatggggtttgggtccagtcgcacaaaagaagaaacaaatgaaggcagacggcaaattggataaatacggccgtgttaacgaaaacaccccagaacaatggaaaaaagaatatgttccattagacaatgctgaacagtcaacttctagctctcaggaaactaaggaaactgaagaagagcctaagaaagctaaagaagattctttaatcaaagaagtcgaaactgagaaggaagaagtgaaagaggatgacagcaaaaaggaaaagaaagagaagaaggacaagaaggacaagaaggaaaagaaggaaaagaaagacaagaaggacaagaaggaaaagaaagagaaaaaggagaagaaaagaaagtctgaagacggtgattctgaggaaaagaaatctaagaaatctaagaaatga

SEQ ID NO: 80658 - DNA, 216 bp, Saccharomyces pastorianus
atgcgtactttgtgtgttcatttaggtatgctattaggtgttggtggtcacatgcaagaattgcgtcgtgttagatccggtgctctgtctgaaaatgacaacatggtcactttacatgatgttatggatgcccaatgggtttacgacaatacaagagatgaatcttacttgagatccattattcaacctttagaaactctattggttggttactag

SEQ ID NO: 80659 - DNA, 999 bp, Saccharomyces pastorianus
atgattatggtctttggtgaaattactaccaaggcacagttggattaccaaaaaatcgtcagagacaccatcaagaagattggttacgatgattccgccaagggattcgactataagacctgtaacgtccttgtcgccattgagcaacaatctccagacatcgcccaaggtgtccacgaggagaaggatttggaagacatcggtgccggtgaccaaggtatcatgtttggttacgccacagatgaaactccagagggtttgcctttaactattcttttggctcataaactaaacatggccatggctgacgcgagaagagatggctctttagcgtggttgagaccagacaccaagactcaagtcaccgtcgaatacaaggatgaccacggtagatgggttccgcaaagaatcgacaccatcgtcgtctccgctcaacatgctgacgaaatcacgaccgaggacttaagggcgcaactaaagtccgagatcattgaaaaagtcatcccaagagacatgttggacgaaaacaccaaatactttatccaaccttccggtagattcgtcatcggtggtcctcaaggtgacgctggtttgaccggtagaaagatcatcgtcgacgcttacggtggtgcctcatccgtcggtggtggtgccttctccggtaaggactactctaaggttgatcgttctgccgcttatgccgctagatgggttgccaagtccctagttgccgctggtttatgtaagagagttcaagttcaattttcttatgccatcggtattgcagaaccattgtccttgcacgttgacacctatggtactgctaccaagtctgacgaagaaattatcgacattatcagcaagaactttgacttgagacctggtgtattggtcaaggagttggacttagctagaccaatctacttgccaaccgcttcttatggccatttcacaaaccaagaatacccatgggaaaagcctaagactttgaagttctaa

SEQ ID NO: 80660 - DNA, 153 bp, Saccharomyces pastorianus
atggccggtacatttttattcacttctgaatccgttggtgaaggtcacccagataagatctgtgaccaagtttccgacgccatcttggacgcttgtttagccgaggaccctcactccaagttgcgtgtgaaaccgcggcaaagactggtatga

SEQ ID NO: 80661 - DNA, 132 bp, Saccharomyces pastorianus
atggacagggccagtaaaatagagcaaattcaaaaacttgccaaatacgccataagcgcattgaattatgaagacctgcccaccgccaaagatgagttaactaaggcgttggatctgttaaattctatttga

SEQ ID NO: 80662 - DNA, 276 bp, Saccharomyces pastorianus
atggctagtaacgctgcaagggttgtcgctacagcgaaggattttgacaaagttggattagggatcatcggatactatcttcagttatatgcggtgggattgatactgagtgaagaagatcggtcgcaagagatgaccgcactagcgacagaacttcttgatactattgaagcgtttaagaaggagattggcggcgagagtgaagcagaagacagtgacaaaagcttacacgttatgaagactctagagatccccggtaccgactcgaattcgtaa

SEQ ID NO: 80663 - DNA, 78 bp, Saccharomyces pastorianus
atgagatacttgaaacacgtttcaagaagattcaagaacggtttccaaaccggctctgcttctaaggcttctgcttaa

SEQ ID NO: 80664 - DNA, 366 bp, Saccharomyces pastorianus
atgcaacaaggtggaaactcatcaatgtattctttccaatcttcgcaacatcggtttcattcgtcgcaacagcgccaaaaccaatcactttccttcagaaacaatacctatggaagtggtaacaatcaaaatacattccatccatcgccgcaactgcaacaacagcctcaaaatatgagatatttgaataataagttaccaataaatgatagatctccaataccgcaaacacagcaccatgtaccagatggccgtcccagcctccatataaataccactaaccgcacaaatccgcttactgcacaaagtggattttctcaatttatgcctcccaatagcacatcaaccaacccatattccagctga

SEQ ID NO: 80665 - DNA, 2556 bp, Saccharomyces pastorianus
atgaaaaggattttctctggtgtgaagtccccaaagttatctgctcccccaaaggttttcaaaaatgatgagagcccatccactccgagctctcccaaattcgaccaagggcttcgaagtttatcagcatcagcttcaagactcttcagtaactcaatatccactcctgggagccctacgttagatcttccgcaagaacactctattaatggtgatatctcaccagaactagtaccaatcgttactttactctctgcacaggctcataggagataccattatggtatattcttgatattacatgatttgaagacagacggaacacctgccgtgcgtcagtgggaagaatgctatggtgtgttgctaggaactcagctggctttatggaatgcaaaagaattatcagattccaagaataataagaacacatcaaccatgaaaaaagccgcatcgagaccttcttttatcaattttacagatgcttctgtgaggagtttggacgctaatgatcaggtaatcagtgcatcagagaacgaaaagacaaagaaagatctagacaatgttcttgttgtttcaacaactttaaaaaacaggtatttcttaaaattcaaaaattcaaaatcattcaaaacttggaacgcagcaattaggcttagtttgttcgagtttacggcattgcaagaggcctacacgggctcatttttgtcaagcagaggtgttaaacttggtgatatcaaagttgttatggcagatacaaaattcacttatgaggactgggttagcgtaagattcgggacaggcatgccatggaaacgttgttatgctgttatttctccacagtctggcaaaaaaaagaaaaattcgaaaggttcaatatgtttctatgaaaataacaaaaaaaccaaaaaatcaaacataatgacaacggtagtagatgcacgggctttatatgccgtttatccttcctcgccgatattaatcgacacatctacaatcataaaattggaaggttttgtctcttttgacaaaagtgaggaacctcaagaaaccaacctatttatcatgcctgaaaagcatcaaggtgttccgggatatgacactattattcgcttcttaatcccagctatgaacgcgttctacttatatggtaggccaaagggtttgattgccaacagaactgacccagactccctgctgtttgccttacccactcttccgcatatatattatttgcaggtggatgacgttttatcattaacaaaagacaaaaattacatacattggagtgctgctgattggaggaataacattgttcaagtattacagaaaaaattaagtaagggctataaaggctgtggtaataaaactgtatcagtttcatctggaatgatgaagtcgccggcaattagttcagctgaattatttgaagggtacgattctctccctgaaagacaaatggaaagtccgcaaaaatctaagatgaagtctcctacattagcatcgaccgatgatattaattccgcttctgcttccgtaaactcacatgctacctcagtaaaacaaactgaattatttgtaactgataattcttcaaaaatcaatgactctgtgtcggcgcagtccagtgtcactactaacttcaaagatacttttaccaccccaatgacatcaggaatgctcaaccaagaaaattcagagagaagctttggttcaggattaaaactcaaaatcactgattcaaatttggaaaatatggaagacgttgaagcgaaatctgctaacgaattctctacgacaccagaagacaaacatattcacctcgccaatgcagccgaattatccgccctttacgacaaatattccacatctccgtttggtaaatcggaggctaattcaagccctaaacctcaaaaatgggaagttaaagatcggtcaaaaaatgaaaacagaagtccttatgagagatacgtaggtacatccactgaaagcaagacatttgaaataggtaacgtcagagagtcgaaaagtacgataaatacttccctttcttcgcctttgagggtagaagataatagacgttcaaaaaatgaggacctgggatctttgaaagagtttgaagagttatctcaaaagattagcaatatgggaatggcaaatatttcttcagaagctttaagtgacacagcagaaaacagttcttttgttacggacctgaacttgaatatcaataacagttcatcggtcaacctcaatgaagaacaacgtgtgccggattttggggaggaaaacgtatttgatccagattatatggaacaaaaccaaatgttggaaacagaaagtaggtacactacggatgagtttgacttttcagataatcaggatgcagcatccagtaattatagcaatgggcaaaccaaccgaacagtaactgaaaccctttctgccagtgacagaaatgacaagatcccacattcttctttatttacaaacttaaaccagcttacttcgaatggaggaaactatcaggatagggaaaattctctggtgatcaaataa

SEQ ID NO: 80666 - DNA, 318 bp, Saccharomyces pastorianus
gatcctgccgtccttattctagatgaagcaaccagtgcccgtgactctcaaagtgaagaaatagttgccaaaaatcttcagagacgtgtagaaagggggttcactactatatcaattgcacataggctttcgacgatcaaacacagtactagggtgattgtgttaggaaaacatggctcagtggttgaaactggttcattccgagatctaatcgccattcctaatagtgaactaaacgcgctgcttgccgaacagcaggacgaggaaggaaaagggggagtgatagatttggacaatagtgttgcccaggaagtataa

SEQ ID NO: 80667 - DNA, 1572 bp, Saccharomyces pastorianus
atgattgtaagaatgatacgtctttgtaaaggtccaaagttgttgcgaagtcaattcgcatcagcaagtgcactatattcaaccaagtcattgttcaaacctcccatgtaccaaaaagcggaaattaatttgattattccacatagaaagcactttttgttgcggtcgattcgattacaatcagacattgcgcaaggaaagaagtccaccaagcccactttaaagttgtccaatgcaaattcaaaatcctcggggtttaaagacattaaacggctattcgtcttatctaaaccggaatccaagtacattggtcttgccctccttttaatcctcatttcaagttcagttagtatggctgtaccttccgttatcggtaaattattagacttggcttccgaaagtgacgccgaagatgaagagggttcaaaaagcaataagttatatggtttaacgaagaagcaatttttcacagcattaggagcagtatttataattggagcagttgctaatgcaagcagaatcatcattttaaaggtcaccggtgagagactggtcgcaagattaagaacgaggacaatgaaagctgcattagatcaagatgccacatttttagatactaatcgtgtcggtgatttgatctcaagattatcatctgatgcatctatagtggccaaatcggtcacacaaaacgtctctgatggaacaagggcaattattcaagggtttgtcggttttggcatgatgagcttcctctcatggaaattgacttgcgtaatgatgattttagcccctcctttaggtgctatggcactgatatatggtaggaaaatacgaaacctatcaagacagttacaaacctcagtaggtgggttaacaaaagtggcagaagagcaattaaatgctactaggacaattcaagcatatggtggtgaaaaaaacgaggttcgccgctatgcaaaagaggttagaaatgtatttcatattggtctgaaggaagcggttacttccggtttattcttcggaagtactgggctagttggcaacactgcaatgctgtcgttattattggttggaacaagcatgattcaaagtggttcaatgactgtcggtgaattatctagtttcatgatgtatgccgtgtataccggaagttcattatttggtttatcgagcttctattcagaacttatgaaaggtgctggtgcggctgccagggtttttgaattaaatgaccgtaagccattgattcgtccgactattggaaaggaccctgtatcattagcccagaaacccatcgttttcaaaaacgtgtcattcacttatcccactcggcccaaacaccagattttcaaggatttgaatattactatcaagcctggtgaacacgtttgcgctgtcggtccatcaggaagcggtaaatcaacaattgcgtctttgttgctcaggtactacgatgtgaactcaggatcgatcgaatttggtgatgaagacatcagaaatttcaacctgaggaagtatcgaagactaatagatacgtgcaacagaatccactacttttcaatgggactattc

SEQ ID NO: 80668 - DNA, 3258 bp, Saccharomyces pastorianus
atgaataatgctcaagaaatgaatgtgttgtcgcaagttgattctgaagaatctgattccagtgatagtttccaggaaaacattggtcgaaatgaggtaaaaagcaaaaaggaaaatctcaaaactaaatcgcatccggaagtaccaagattagacaaaagaaagccaactttattcgacttctcaataactagggaaaaactgtcaaaagacaatgtggctaagttgagacagcggttttgtttagacgaacaggaaccatttttgaatgatttccctgcatggctacttaaagatgtgttggttcaaggccatatttttattacaacaaaacatttcctattctttgcatatttacctaagaatcctcgggcggttaaaatgtctggaaaccttaatatcaggacaaaactaattaggtctaccaggtattggtgcgtactaaagaatcatttattttctatgtatacctcatcaactgagctatactttccggttttaaccatagatttgagggaggtccaaaaaattgaaacacaaaaacataccttaaacgggagtgctacgaaaacatttaagctttacacagatgaaagtacattcaaattcaatgcagattcagagttctccgctaaatcgtgggtgaacgctttgaaaaaggagcagttcgcagctcagaattctgaaaacaattcgataagtttaaaaattccgctgcccaacattatagagatagatgatcaacctatagtcaacaaagctttaacattgagattaagagctttggagagctcacagacctatgctatcgatgatttcatgtttgttttcatggatgggtccggtagtcaggtcaaagagagccttggcgaacagttggctatattgcagaaatccggtgttaatacactttattatgatattccagccaagaaatcaaaatcaagttttggaaaagagacaccagctacagctgagcaaaagaataacggcgaggattcaaaatatttgaatgttccaacttcggctgtgccttcttcggaaaatgggaaaaagagtcgattcagatttagagaaagaagcaatagttggtttcgtagagctaaacctcttgaagattctcaagttgaggatgtggaggaaatatataaagatgcggcgaatgatatagactcttctgtgcattccacgattcatattcatgaacaagaagatagtcaagagcaaaccgtagcttggaagccaagtcacctcaaaaattttgccgaaatgtgggctgccaaaccaatacactaccggaacaagtttatcccgtttcaaaaggatgatacctatttgattaaagaaacagaagaggtttctgctaacgagcggttcaggtaccatttcaagtttaataaagagaagtcactaatcagtacttactacacatacctgaatagaaatgttcccgtttatggtaagatttacgtatccaatgatacggtgtgcttcagatcgttattaccagggtctaatacatacatggttttgccattggttgatgtggagacatgctataaagaaaagggatttcgatttggttattttgtattggttatagtaattcacggtcacgaggagctattttttgaatttagcactgaggtcgccagggatgatattgaacgcattcttttaaagctcttagataacatatatgcaagcagtgcagaaggatcgaatatatcgagtgcttctcttggcgatgttcagcataaccctgactcagcgaagttgaagcttttcgaagataaaattaatgccgagggctttgaggtaccgttaatgattgatgagaatccgcactataaaacaagcataaaaccaaacaagagttataagtttggattattgacgattggctcaagaggggatgttcaaccatatattgcacttggaaagggcttgataaaagaaggtcaccaagtagtaataattacacattcggaatttagagactttgttgaaagtcatggaatccagtttgaagagattgctggtaacccagtggagttgatgtccttgatggtggaaaatgaatcaatgaatgttaaaatgctgagagaagcttcgagcaaatttaggggatggatcgatgctcttttacagacatcttgggaggtttgtaacagaagaaaatttgatattctgattgaatcaccctcagctatggttggtattcatattactgaagcattgcaaattccttattttcgagcatttaccatgccatggacaagaacaagagcatatccacatgcatttattgtaccagatcaaaaaaggggcggtaactataactacctgacacatgtccttttcgaaaacgttttttggaagggaattagtgggcaagtaaacaagtggagagttgaaactctaggtttagggaaaacaaatctttttcttttacagcagaataatgttcctttcttatacaatgtttctcctacaatttttccgccatcaattgattttagcgagtgggtgagagttacaggatattggtttcttgatgataagagtactttcaaaccgccagcagaattacaagaatttatttctgaggcaagatcaaaaggaaaaaaattggtttatatcgggtttggttcgattgtagtctctaatgccaaagaaatgacggaagctctcgtcgaagcagttatggaagcagatgtatactgcattttaaataagggatggtcagaaaggttgggcgataaggcggcaaagaagacagaggtagatcttccaagaaacattttaaatatcggaaacgttccccatgattggttgttcccacaagtcgatgctgccgttcaccatggtggttctggaactactggagcttcattacgtgctggtttacctactgttataaaacctttctttggtgatcagttcttttatgcaggtagagtagaagacattggagttggtattgctttaaagaaacttaacgctcaaacattagcagatgctttaaaagtagctacgacgaacaaaataatgaaggatagagctggattaataaagaagaaaatttccaaagaagatgggattaaaactgcaataagtgcaatttacaacgaacttgagtatgcaagaagcgttactttatcaagagtgaaaaccccgcgcaagaaagaggaaactgtagatgcaaccaaactgacacctgctgaaacaacggatgaagggtggacgatgatttaa

SEQ ID NO: 80669 - DNA, 342 bp, Saccharomyces pastorianus
atgcccatcactcaaatcatatcagcgtctgatagcgaggcggggccaaaaccaagcatttcgttggtacctgataagccatctgagccagaaacttcccctaggcatcatcgcctttcaaggtcactttcgaagttcaagcgctggagaggaagatcaaatagcagtttatcgatggggtcgtctgagcagcaagaactgcaggacagtccaaatgaagcccgtagtgatgatgacgaaaacggttacaataacgataatgcagatgacttggcgaaatccaagtatatgatgaaaagtattgccggtttattactactgctagtgtgtatgcagggatga

SEQ ID NO: 80670 - DNA, 255 bp, Saccharomyces pastorianus
atgtacgagcctatgatccttgaagttagattgcaagagcgtatagatttgttcagaaaccagagatggaattgctttaaaaaagggcgacttgatgcaattttgagtaagaaagaccctcttgggagggattctgactggtggaaagtgaggacaaagaacggcaatattggctacattccgtataactatattgagatcataaaaagacggaagaaaattgagcatgttgatgatgaaacgcgtacacactag

SEQ ID NO: 80671 - DNA, 423 bp, Saccharomyces pastorianus
atggtcaacaacaatatgcttattggctctgttattttaaacaacaaatctccgataaatggaataagcaatgctaggaattgggataacccagcatatcaggacactttaagtcccataaacgatccacttcttatgtcaattttaaaccgcttacaatttaatttgaataatgatattcaattgaaaacagaaggaggaaaaaattccaaaaactcggaaatgaagattaacttaagactggaacaattcaaaaaggagttggtattatatgagcagaaaaaatttaaagaatatggtatgaaaattgacgaaattacgaaagaaaataaaaaattggctaatgaaattgggcgattaagagaacgctgggacagcttagtagaaagtgcgaagcaaagaagggataagcaaaaaaactag

SEQ ID NO: 80672 - DNA, 849 bp, Saccharomyces pastorianus
atgctgcaggtccagagaaaatgttggaagattcgattcacacatagcggctacacatcaattgaagcgagtagcgggaatattgttctggctatgccaaaaaaaactaccggaagtttgatcacatcgaccaggtcgtttctatacggcaaggcaagcgtgcgaatgaaaacggcgaggtcgaggggtgtggtgactgcatttgacttaacatccgcaattggggacgagattgattttgagtggctgggtggtgatttaatgacggcccaatcaaactactattctcaagggcatttggattacacaagaatgcaaagatttcccgtaggcgctgacacttgggccacttaccacacttatgagattgattgggacccggataggataatatggtatgttgatggtaaaatagctcgcacagtcctgaagaaggatacctgggaccccattagtaaagaatataggtacccacaaacgccgatgagactagaaatcgctgtttggccaggcggctcggaaaccaacggacccggtacaataaactgggcaggtggcctcatagattgggaaaattcacccgatattatcgaaaagggccaatttacggcgcatgttgaacaaatcaccgtaacgccgtaccaaaataaattcacagaacaagtgcagttttgtataaaggcaaagaaaaaggcaccaaccttttcccaaaaagatttgtcaagagtagtcgtttcgtataacaggcaagacagactgaatcatcatgatgaggggtctctcaaatgggactgctttgttactccaaagataaatgactggttgagttcttggaaacggtcaaaatag

SEQ ID NO: 80673 - DNA, 231 bp, Saccharomyces pastorianus
atgagaatatcaatattacagctggtgccggttgttggctacatcggatttgcactgggagaattatacaaacccaaaaactccatttcttgttctccaaataacccttgtcccgcagaatggccgtgctgctcgccgtataatgaatgtggcgctggaccgatatgtgtcggtggctgcaacgtgaggtcatctttcgacgaggaaagctgtgctcctatacctgcataa

SEQ ID NO: 80674 - DNA, 981 bp, Saccharomyces pastorianus
atggcaaagactaaccctgatgtaccattgtcgtacaagggttccattctccacagagtgatcaaagacttcatgtgtcaatttggtgattttaccaattttaatggtactggcggtgagagcatatacggtgtaaaattcgaggatgataatttcactgttaaacatgataaaccattccttctatccatggccaacgccggtcctaataccgatggatctcaagctttcataacctgtgttcctacacctcatttggacgggaagcacgttgtgtttggtgaagtgattcaaggtaaaagaattgttcgtttgattgaaaaccaacaatgtgaccaagaaaacaacaagccattgcgtgatgtaaagattgatgactgtggcgtgttacctgacgattatcaagtgccagagaatgccgaagctacaccaacagatgagtacggcgataattatgaagatgttttaaaacaagacgaaaaagttgacttgaagaatttcgacaccgtcttgaaagctatcgaaacggtaaagaacattggtactgaacagttcaagaaacagaactattccgtggctttagaaaaatatgtcaaatgtgataaattcttgaaagagtatttcccagaagatttggagaaggaacaaattgaaaaaatcaatcaattgaaagtgtctattccattgaatattgccatctgtgctcttaaattaaaagattacaagcaagtattagtagcctcatcggaggtgttatatgccgaagcggctgacgaaaaagctaaggccaaagctttgtaccgtcgtggcctggcctattaccatgttaatgacacagatatggctctcaatgacctagaaatggccactactttccagccaaatgacgccgccattttgaaagctattcatgatagtaaattccaaagaaagcaacgaaacgagaaagctagaaagtctctttcgaagatgttgtcctga

SEQ ID NO: 80675 - DNA, 222 bp, Saccharomyces pastorianus
atggggagacccctttgtacggacaatggggtgacagtcagggttttaggtctgttgcccataccaggcattttcctgtcacacaacttccaaaaaattttcagccgttttaggcactatgtcattgtacaactcaaaaactatacggccttggggtttacctccaatagaaatatcaaaaaaagttttaggtctagtcatttttactccttgatcgcctga

SEQ ID NO: 80676 - DNA, 1032 bp, Saccharomyces pastorianus
  modified_base (657)..(657): a, c, g, t, unknown, or other
atggatgttcaaatcatcaaggtatccgaatatactcgtcatgcccatgaaaaggatatcaatgctttgtcagtttctcctaacgattctatttttgcaacagcatcatacgacaagacctgtaagatctggaacctagaaaatggtgaattggaagccacgttggccaaccacaagcgtggactatgggatgtatcattttgccaatatgataaattattggcaacttcttcaggtgataaaacagtcaagatatggtcattggatacattcagcgttatgaaaacattggaaggtcataccaatgcggttcaaagatgttcgtttattaataagcaaaaacaactgatcagttgtggtgctgatggcttgatcaaaatatgggattgttctagcggtgaatgtctgaagactttggatggtcataataatagattatgggctttaagtattatgaatgatggtgatatgatcgtaagtgctgatgcagatggtgttttccagttttggaaagattgtacggaacaagaaatagaagaagacaagaaaaagctaaattacaagtcgaacaagaacaatcgcttcaaaaactatatgagccaaggtgattggacaaaggcatttttgttagcaatgactttagatcacccaatgagnttgtttaatgttttgaaaagagctttgggcgaatcaaggtctagacaagataccgaagagggcaaaattgaagtcattttcaatgaagaattggaccaagccatctctatcctaaatgatgaacagttaattttgttaatgaaacgatgcagagattggaatacaaatgcaaaaacacataccatagcgcaaagaacaataagatgtattttgatgcatcataacatagcaaaattgagtgagatacccggaatggtaaagatagttgatgcaataattccatacacgcaaaggcatttcacaagggttgataacttagttgaacaaagttacatattagactacgcgctagtggaaatggataagctattctag

SEQ ID NO: 80677 - DNA, 930 bp, Saccharomyces pastorianus
atggatctgaaaacctcatataaaggtatatcgttaaaccctatttatgcaggaagcagtgctgttgccactgtttcagaaaatggtaaaatactagctactccggtgcttgacgaaatcaacataatcgatttaaccccaggctccagaaaaattttgcacaagatttctaatgaagacgagcaagaaattactgcactgaaattaactcctgatggtcaatatctcacgtatgtttcacaagctcagcttttaaaaatctttcaccttaagaccgggaaagttgtcagatcaatgaaaatctcttctccatcgtacattctcgacgcagattccacttcaacgcttctcgcagttggcgggacagatggtagtataattgttgtggatattgaaaatggttacattactcattcgttcaaaggtcatggtggtacaatttccagtttgaagttttatggacaattgaatagtaaaatatggttattagcatccggtgacaccaatggtatggtaaaggtttgggatcttgttaaaaggaagtgcttgcacacattacaagagcacacatctgctgtgagagggttggatatcattgaggtaccagataatgatgagccaagcctaaatttactttccggtggtagagacgatatcatcaatctctgggatttcaatatgaaaaagaaatgtaaattgttgaaaacacttccagtaaatcaacaggtagagtcatgcggattcctaaaggatggtgacggtaaacgcataatttatacagccggcggtgatgctatctttcagttaattgactctgaatctggtagcgtgcttaaaagaaccaataaacctatagaagagttattccttattggtgtacttccaatattgagcaattcccagatgtcccagtattgtctgaccagacct

SEQ ID NO: 80678 - DNA, 156 bp, Saccharomyces pastorianus
atgtggagaagaaggcaaagtatggtggaagcagcggctgaaaatcttcgtttcactaaaaatggtttatttagtgagagtgcattggcagatatcgaaggaattatgggcaatgatgttaaccattcattcgaattcaatgacgtcttacaatga

SEQ ID NO: 80679 - DNA, 2955 bp, Saccharomyces pastorianus
atggcaggcaaaaaaagtcctcgaaaaagtacgatcaatcatagtacacattctggtaaactgccagcaaatattaaaaggctcataaaaaagggcgaatccgatacaaagtccaggcaatcaccacccacactgagtacaacgaggccaagaagatttagccttatatactcttctgagtcatccttgagtgacgtatctgattctgataaaaacaaaagtacaaacccacataaaattaaaagaaaagcaaagaacatttcaaataattcccaaggaaaaaaaagtaaacttatacaaaggcaaatagacaatgacgacgagggcacagagtcatccgattaccaagctgtaacagatggcgaagagagtgaaaatgaagaagaagagagtgaagaagaagaagaagatgatgacgaagacgacgacgacgatgatgatgacggaagtgatagtgatagtgatagcgaaacaagttctgatgacgagaatatagattttgtcaaactgacggcccaaagaaagaaaagagccatgaaagctttatctgccatgaatacaaatagcaatacactctattcctctcgtgagaacagtaacaaaaataaatcagttaaactatcccctaagaaagaaaatgaagaagagcagaaagaagaaaaagaaaaagagaaagaagagcaacaaaaacaacaagaatcaaacaaaaaagaagtaaacggttcaggcactactactacacaacaggcgctatcgtttaaattcaaaaaagaggacgacggcattagttttggtaatggtaatgaaggctataacgaggatataggtgaagaagtcttggatttaaaaaacaaagagaacaatggtaatgaagaagataaactggattctaaggtgatgttaggtaacaacgatgagttacgatttcccaatatttcagagtcagatgaatctgaatatgatattgaccaggatgcgtactttgacgtgattaacaatgaagattctcatggagaaattggtacagatcttgaaacgggggaagacgatcttcccatattggaagaagaagaacaaaacattgtttctgagctacaaaatgacgacgaactctcattcgatggtagtatacacgaagaagggtctgatcctgtagaagatgctgaaaataaatttttgcaaaatgaatacaatcaagaaaacggatatgatgaagaagatgacgaagaagatgaaataatgtctgattttgatatgccgttttatgaagatcctaaatttgcaaatctttattattatggcgatggttcagagccaaagctatccttgagtacatctttaccgttaatgctaaatgatgaaaaactatctaaactaaaaaagaaagaggccaaaaaacgggaacaggaagaaaggaaacaaagacgaaagctctataaaaagacgcaaaaacctagtacgagaacaacctccaatgtggacaatgatgagtatattttcaatgttttttttcaatcagatgatgaaaatagtggccataagagcaagacaggcaggcataaatccgggcaaagtcatattgaacatacgaataacggctcgaatttgataccatccaatgatgatctggaaccatccactcatagtacggtcctgaattccgggaaatatgattcttctgacgatgaatatgataacattttgttggatgttgcccatatgccttcagatgatgaatgcagtgaatctgaaacgtcccacgatgctgacacggatgaagaattgagggcactagattcagatagcttagacattggcacagaactggacgacgattacgaagacgacgacgatgattccagcgtgacaaatgtgttcatagacatcgatgatttagatccagactctttttactttcattacgacagcgatggatcttcctctttgataagttctaactcagacaaagaaaattctgatggatccaaagattgcaaacatgatctcttagagactgttgtgtacgttgatgacgaatccacagatgaagatgataacctaccgcccccaagttcaaggtcaaaaaacattggctcaaaagcaaaggaaatcgtaagttcaaatgttgttggattacgtccaccaaaattgggtacttgggagacggacaacaaaccttttagtattattgatggtctgtctactaaatcattatacgccttaatccaagaacatcaacagcttcgcgagcaacatcaaagggctcaaaccccagatgttaaaagagagggaagctctaatggcaataacggtgacgaattgacactcaatgagctgctaaacatgagtgaattggaggatgattcaccatcccacacagacgatatggagaacaattacaatgatgcaattaatagcaaaagcacaaatggccatgctgcagattggtatgaagttcctaaggttccattatctgcatttagaaataagggtattaatgcctatgaagaagatgagtacatgataccagcaaattctaacagaaaagttcccattggctatattggtaatgaaagaacaagaaagaagattgataagatgaaagagctacaacggaaaaaaactgaaaaaaaaaggcagttaaagaaaaaaaagaagcttcttaaaataagaaagcaaagacaaaaggcaataaaggagcaagaaactatgaatttacaattgggaatcaatggccatgagatcatcggtaacaataacagccatagcgacataaataccggtaccgattttacaaccaatgaaaatacccctatgaatgaacttccctctcacgcacctgaagatgcgtcattaatacctcataattctgatcttgccgtggacagcaatacaaggaaaaattcaacaaaaagtgttggtttagatgaaattcatgagattttggcaagatga

SEQ ID NO: 80680 - DNA, 828 bp, Saccharomyces pastorianus
atgactaaatacatcgcagattcttggtatattgtatacaatgcgctgcaatatcctggcaagataattaatatgggatgggacaaatatacccaaagtcaagattcaaatggttctgattctaccagtaactttaatagtcggcccaaggaaagaactcttatgcagtcgttgacagctttacctgttaacttttggtccaggaggaaggacgagcctacaccggtaaacgtttggttttatgtaaaaaatgcgcacgttgccagatacataccgaaaattattacggaaataggcatatgcaactatgggccgaagcagatcgtggcaagtgcaggatatatcaacgaattgataacatctgaaggaatatactgtgttaacctaggccaccttcccaggctatacgatgagcaaatttttgaaggcactggaacgacacatcttcccctggaactgaaagctatcgacaggacagattcagatgtttgtatcaatggtgatttagttctactcggttatgactttattccatatcagatatcgaagccgtggttactctttagaatcgaacccgtaaatagcattgaagcaatcttcaactatagtgaatgttctttttcataccagtttgcatggagtttggcctgcttacaatctgaacagaaaatttcatttcctagagacacgattattgggcacggtgtacctttacaagcctatccgatattgataagaagtttcgtctacaagcatccggtactaaagcaagatcttggtcaagaaatagcattgcccaactggaataccccttatcttcgaagatga

SEQ ID NO: 80681 - DNA, 771 bp, Saccharomyces pastorianus
atggataagataacgcttaaattttcaaaggtcaatgaaaattttgtttttagtcagttttttcagtattgtgcagaaatcgaagaaatgttagccattctgagaggaaatatttgggagtgtgaatgtgatgtgttcggtcccagaatcggactattagtagatagtaaccacatgaatgaaacaattcaaaaaaatattctgtcaataactttcaaacttaaaaatgaccctcagattatatgctgcttgaataaaattctggaaggcttattactttcatcaggtgttcaatttaaagttatccagtttttttatgtattaaaactatactatatgcaagataatgaatacacattcgaagcatcatctgaaatggataaattgaccatagaatgcttatgtatcatcgaaaatattattgatgcttgtgacaatcctgatgaagtaactgactaccaactccctaaggtactgttgactgctatggaggggaaattacttgttgctgaaaaaatatccgaagataatgactgttcagaatctctggacgattatcatccccgaacttaccaattcagacatcccagaataataatagacaagatgaaaacaaaattgaagcagaaactgcgctttgactcacctaaagatccagaaacagatgatcattggattgagtattggaaatattgctatcaggataacatagggaacttgccggacattttgtcacgtatatatcaaacctttactgatccctccaattaa

SEQ ID NO: 80682 - DNA, 783 bp, Saccharomyces pastorianus
atgtgctggattaagtcatatagatctattttgcagtacactcacagacacaaaaagttttgcacttcattcgccttgttgctgaacgacttgataaatagtccactgaattgttcaggaaatatatatagccacaggccgaaaagaagctatctttttagagaagatattattttcagggaattttcttgcattaactttgcactaacagattttaatgacgattatgtgtatgattctcccgacatgattaataatataattggatgccctacattgactaaggtgctttctccaaaagaagaatgtgttctgcgaattagatcaataatattttctggcatgaaatttttagagaaaaatgacaccggcatcatatggaatgccagcaaatataagtttgatttaataagcccaaatattaaaataaaacgccaaatagcattatcggaaatttcctccaaaataaatgtaaaaacacaacaggaaagagtagtctcttcgagaaaagttgaggccaaaagagacgaacaacagcgcaaaagagccgggaaaatagctgtgacagaactggaaaaacaatttgcaaatgtccggagaacaaaaaaattgtctccgctcccagaaaaagatggcgtttcttctgagttggtaaaacatgctgcttcacgagggagaaaaactatcactggcccactatcctctgattttctctcatatccagacgaagcaattgatgctgatgaggacatcaccgtccaagtgccagatactcctacttga

SEQ ID NO: 80683 - DNA, 1032 bp, Saccharomyces pastorianus
atggataatgaagaagttaacgaagaatgtatgagaatatttttcaagaacgctcgtgcgcatctggataaacatctaacatcaaggttgacatgcgatgaaaatgcatatatcacgttcagatgcttcctggatggaatacattgcaaatctactaggtttctcgaagagctacttttgaaacaagaaaatatgtaccataataacaattacgaatgcataaatgattccgtgataccattggttctgaaacttttatggcttcaaattcacgaacctacactccaatggtttgagcactggttccatgacatcatgcgactaagtaacagaagaaagttcagagtttttagaatttttcaaaaaaaaatgattcaatttttcaaaattacacacagatattactatgacatcatcgaacacctatgcgcaaagtatgatatgaattccgttatttcaaatgctctcttcgcgaagttgaatttgatgcaatacacagatggactttcaactcatgagaaaattatcttaaacacgagtaatccactgacgttttccattgtaatctcactacaaagatgcgtgattaatctaggttccacacatttttataaaacactactaaacaagccgtctaaaaaacccaagagtgtggaaggttttgagaagtctattaggtacttgaatattgcctcactctatctcccagccgttggagatacttattttcaacgagcgaaaatttacttggtcactgggaaattctcactgtatttttttgaattagtaagaggagcattagtaaggattccgtccaaatgtgcgttaaacaatttgaaggatttcattttaactcctaattttccggaaagaagacgtctgatgaaaaaattggcaattcttgtgtcaaaagatctcaaaggtgagaaatcattctttgaaggtcaaattgttttgcaatttctatcgatagtagaacacactttggttccacagtcatggaacgcatcacttcttctaattgttggttag

SEQ ID NO: 80684 - DNA, 447 bp, Saccharomyces pastorianus
atgaatgccctcgtagacatcgcgaaggccgaaatgaaggcgggcactacggcgccgcccaagccgatgactgagagtgaactcattctcctcatggatacaaacggcattggcacagacgccaccattgcggagcacatagacaagatccaagtacgtaattacgttaggagcgagaaagtaggcaaggaaacctacttacaacccacgaccctgggtgtctcactagtgcacggcttcgaggccatcggcctcgaagactcctttgcaaagcccttccagcgcagagaaatggagcaagacctcaagaaaatctgcgaaggtcatgcctccaagactgatgttgtaaaggacatagtcgagaagtataggaagtactggcacaagacgaatgcctgcaagaatactctcttgcaagtttatgaccgtgtcaaggcatccatgtaa

SEQ ID NO: 80685 - DNA, 1290 bp, Saccharomyces pastorianus
atgaaagtactatgtgtcgcagagaaaaattctatagcgaaggcagtttcacagatcctaggaggaggcagatcaacttcaagggattccggctacatgtatgtaaagaactatgatttcatgtttagtgggttcccgtttgccagaaatggggctaactgcgaagttaccatgactagtgttgcagggcacctaacaggcattgatttcagccatgattcgcatgggtggggaaaatgcgccatccaagagttatttgatgcgccactgaacgagattatgaataacaaccaaaaaaagatagcaagcaacatcaagcgagaagcgaggaatgcagactatctgatgatatggacagattgcgaccgggaaggagagtacatcggttgggagatatggcaggaggccaagagaggcaacaggctcatacaaaatgatcaagtataccgggcagtcttttcgcatctcgaaagacaacacatattaaatgcagcacgaaacccaagtcgattggatatgaagagtgtgcacgctgtaggcacgcggattgaaatcgatcttcgagcaggtgttacattcaccagactcttaacagaaacgctacgaaataaactgagaaaccaagccaccatgaccaaggatggtgcaaaacaccgcggtggtaacaagaacgactcacaagtcgtatcgtatggtacatgccagtttccaacgctcggctttgtagtagacaggtttgaaagaatacgaaattttgttcccgaagagttctggtatatccaattggtagtcgaaaacaaagacaacggcggaacaacaacgttccagtgggacaggggccacttgttcgaccggctgagcgtgttaacgttttacgagacatgcatcgaaaccgccggcaatgttgctcaagtagtagacttgaaatcaaagccaacaacgaaatacagacctttacctctgaccacagtggagctacaaaaaaactgcgcccggtacctgcgtctgaacgccaaacaatcactagacgcagcagaaaagctataccaaaaggggttcatatcgtatccaagaacagagactgatactttcccacacgcaatggacctaaaatccttggtcgaaaagcaagctcaattggaccaactcgctgcaggcggcagaaccgcctgggcatcgtacgcggatcgctgctccaacccgaaaacacaagtaacaataacaagttcaagtttccacgaagcggctcccatgacgacaaagcgcatccaccaatccaccccatcgtaa

SEQ ID NO: 80686 - DNA, 297 bp, Saccharomyces pastorianus
atgcacatatgcagtctgctgaatcatgcaattaagcggagagctttttcgaagacaaaaggcggcaaaaacgccttacatggatgccttgacacggtcataaacttgcaagagagtattcttgcaggcattcgtcttgtgccagtacttcctatacttctcgactatgtcctttacaacatcagtcttggaggcatgaccttcgcagattttcttgaggtcttgctccatttctctgcgctggaagggctttgcaaaggagtcttcgaggccgatggcctcgaagccgtgcactag

SEQ ID NO: 80687 - DNA, 417 bp, Saccharomyces pastorianus
atgagcacgaaaattttgacttcagggctggcgtactttattattgggttttacgtctataaatatcaattgatttttgccacagatcatttgccccattctacaggaaaagtatggccattaatttttagaagaatcatcgttggattgctattgtttcaattaacaatgacaggaacactggcaggattcgaaggaggatgggttttgtcatcttgccttttcccgcttccagtagtgacattatgtttcctatatgatttcgagaagaactatttgccgttgtcaaaatatatcgcattgagttcaattcgcgagtacgaaagagacaattctacggtgaattctgccaatgaggaagagtcgtatgcatacccttacgctgtgagtgaattagagggtccgatgttggattga

SEQ ID NO: 80688 - DNA, 780 bp, Saccharomyces pastorianus
atgaaaattggatatcgtggaatctttgggaaggaagtagatgccatagagtatctggagcagcaattaaaatttattgatgctgaaattattgaagcgaggaaacaacactactccgcaacacctacggcattcgttacgatggattctgttgctaatgcgcaaatggcagctcaggctgtattagatcctagagtacattacttcataaccagattggctcctgcacctcacgatatcaagtgggatcatgtttgtctttctagaaaggaccggttaacaaaagtttattctactaccgtatttataggcctttcaagtttgtttttagtcattcctgtatcatacttagccacattgctaaatttgaaaacactttcgaaattctggccaagcgtagggcaactactaaaagatcaccagtgggccgctaacattgtaacggggctattaccaacctatctcttcacattgcttaactttggaatcccctatttttacgagtatttgacttcttatcaaggattggtatcatacagcgaagaggaaatctcacttgtttcaaaaaatttcttctatatttttgtcaaccttttcttagttttcacattggcaggtacagcatctaattactgggcgtacctcagcgataccaccaaaattgcttatcaacttgctacatctgtgaaggagttctccttattctatgtcgatttgattatattgcaaggtattggtatgttcccgtttaagttgttattagttggtagtttgatccct

SEQ ID NO: 80689 - DNA, 1122 bp, Saccharomyces pastorianus
atggaattccaatatccaggtacctctaagccacaaatcactgacattaacttccaatgttctttgtcttccagaattgctgtcattggtccaaatggtgctggtaagtctactttgattaacgtcttgactggtgaactattaccaacctctggtgaagtctacacccacgaaaattgtcgtatcgcttacattaagcaacacgcttttgctcatatcgaatctcatttggacaagactccatctgaatatatccaatggagattccaaaccggtgaagatagagaaaccatggacagagctaacagacaaatcaacgaaaatgatgctgaagctatgaacaagatcttcaagattgaaggtacccctagaagaattgccggtatccactccagaagaaagttcaagaacacttacgaatatgaatgttctttcttattgggtgaaaacattggtatgaaatctgaaagatgggttccaatgatgtccgtcgacaacgcttggattccaagaggtgaattggttgaatctcactctaagatggttgctgaagttgatatgaaggaagctttggcttctggtcaattccgtccattaaccagaaaagaaattgaagaacattgttccatgttgggtttggacccagaaattgtttctcactccagaattagaggtttgtctggtggtcaaaaggttaagttggtcttagctgccggtacatggcaaagacctcacttgattgtcttagatgaacctaccaactatctggacagagattctttgggtgctttgtctaaggctttgaaggaatttgaaggtggtgttattatcattactcactctgctgaattcacaaagaacttgactgaagaagtctgggccgtcaaggacggtagaatgactccatctggtcacaactgggttagtggtcaaggtgctggtccaagaatcgaaaagaaggaagacgaagaagataaattcgatgctatgggtaacaagattgccggtggtaagaagaagaagaagttgtcttctgcggaattgagaaagaagaagaaggaaagaatgaagaagaagaaggaattgggtgatgcttacgtttcttctgacgaagaattctaa

SEQ ID NO: 80690 - DNA, 2130 bp, Saccharomyces pastorianus
atgtctgattcccagcaatccattaaggttctagaagaactattccagaagttatctgttgccactgctgacaacagacacgaaatcgcttctgaagtcgcttctttcttgaatggtaacatcattgaacatgatgttccagaacacttcttcggtgaattggccaagggtatcaaggacaagaagaccgctgctaacgccatgcaagctgttgctcacattgctaaccaatctaacttgtctccatctgttgaaccatacatcgtccaattggttccagctatctgtaccaacgcaggtaacaaggacaaagaaattcaatctgttgcttccgaaactttgatttccatcgttaacgctgttaacccagttgccatcaaagctttgttgccacatttgactaacgctattgtcgaaactaacaaatggcaagaaaagattgctattttggcagctatctctgctatggtcgatgctgctaaggatcaagttgccctaagaatgccagaattgattccagtcttgtctgaaaccatgtgggacaccaagaaggaagtcaaggctgctgctactgccgccatgaccaaggctaccgaaactgttgacaacaaggatattgaacgtttcattccaagtttgattcaatgtattgctgacccaactgaagttccagaaaccgttcatttgttaggtgctactactttcgttgctgaagttactccagctactttgtccatcatggtcccattgttgtccagaggtttgaacgaaagagaaaccggtatcaagcgtaagtctgctgttattattgacaacatgtgtaagttggtcgaagacccacaagttattgctcctttcttgggtaaattgttgccaggtttgaagagtaactttgctaccattgctgacccagaagccagagaagttactttgagagctttgaagactttgagaagagttggtaacgttggtgaagacgatgctattccagaagtttctcacgctggtgacgtttctactactttgcaagtcgttaacgaattgttgaaggacgaaaccgttgctccaagatttaagattgtagtcgagtacattgccgccattggtgctgatttgatcgatgaaagaatcattgaccaacaagcttggttcacccacatcaccccatacatgactatcttcttgcacgaaaagaaggccaaggacatcttggacgaattcagaaagagagctgtcgacaacattccagttggtccaaacttcgacgacgaagaagacgaaggtgaagacttatgtaactgtgaattctctttggcttatggtgctaaaatcttgttgaacaagacccaattaagattgaagagagccagaagatatggtatctgtggtccaaacggttgtggtaagtccactttaatgagagctattgccaacggtcaagttgatggtttcccaacccaagaagaatgtagaaccgtctacgtcgaacacgacattgatggtactcactctgacacttccgtcttggatttcgttttcgaatctggtgttggtactaaagaagctatcaaggacaaattgattgaattcggtttcaccgatgaaatgattgctatgccaatctctgctttatctggtggttggaagatgaagttggctctagctagagctgtgttgagaaatgctgatatcttgttgttagatgaaccaactaaccatttggataccgtcaacgttgcttggttagttaactacttgaacacctgtggtatcacttctatcactatttctcacgactccgttttcttagataacgtctgtgaatatattattaactacgaaggtttgaagttgagaaagtacagggtaactttaccgaattcgttaagaagtgtccagctgctaaggcttacgaagaattatccaacactgatttggaattcaagttcccagaaccaggttacttggaaggtgttaagactaagcaaaaggctattgtcaaggttaccaacatggaattccaatatccaggtacctctaagccacaaatcactgacattaacttccaatgttctttgtcttccagaattgctgtcattggtccaaatggtgctggtaagtctactttga

SEQ ID NO: 80691 - DNA, 159 bp, Saccharomyces pastorianus
atgaagttgtttaaggatactatcaaagtctcgaccacatcttcaaccttgtacttgcagaacatggcaaaaactaacaacgctgcaagaagtcactgtaatattccaaatacccaaataacacaatccactgtgatagcaacaacgtcttccgtttaa

SEQ ID NO: 80692 - DNA, 336 bp, Saccharomyces pastorianus
atggtgccgaatttggatttggaaacagctatacagataatctcctcactggagacccagttgagcgagcttgaaggcgccacgaaagaatatgaaaatgatttggaacaagtaatatcaaagttaaaaagcgatcttcttgagagccaacaacaaaataaatgcaataagaaacagataacagatttagagatacaggtagatgagttggaaaatgaaaatatccaactgaggaataagatagagacattacattggagagtgaccgacgactggaacgcaacgttctactggaacacgagttattcgacaccaacgaggcgctgcaaaagttaa

SEQ ID NO: 80693 - DNA, 1332 bp, Saccharomyces pastorianus
  modified_base (722)..(771): a, c, g, t, unknown, or other
atgttatcttgtcttacccttgtttggacattggacaatcgttctttacaatttatcgtttgtttgatcctgagagctaaatgtggcccattgactggtatgcgtgaatcatcgatcattactaatggtacatcaagtggatttaatagttcggtagaagatgaggacgtcaaagttaaacaagaatcttctgatgaattgaaaaaagacgatttcatgaaagatgtaaatttggattcaggcgattcattagcagagattctaatgtcaagaatgctgctatttcaaaaactaacaaaacaactatcaaagaagtacaactacgctattcgtatgaacaagtccactggattctttgtctctttactagatacaccttcaaagaaatcagactcgaaatcgggtggtagttcattcatgttgggtaattggaaacatccaaaggtttcaaacatgagcggatttcttgctggtgacaaagaccaattacagaaatgccccgtgtaccaagatgcgctggggtttgttagtccaaccggtgctaatgaaggttctgctccgatgcaaggcatgtccttacagggctctactgctaggatgggagggacccagttgccaccaattagatcatacaaacctatcacgtacacaagtagtaatctacgtcgtatgaatgaaacgggtgaggcagaagctaagagaagaagatttaatgacggctnnnnnnnnnnnnnnnnnnnnnnnnnnnnnnnnnnnnnnnnnnnnnnnnnnccttcaaatgggctatcatcggtgcagccactattatcgtcattttccatgaaccagctaaacgggggtaccattccaacggttccatcgttaaccaacattacttcacaaatgggagctttaccatctttagataggatcaccactaatcaaataaatttgccagacccatctagagatgaagcatttgacaactccatcaagcaaatgacgcctatgacaagtgcattcatgaatgctaatactacaattccaagttcaactttaaacgggaatatgaacatgaatggagctggaactgcgaatacagatacaagtgccaacggcagtgctttatcgacactgagaagcccacaaggctcagacttagcatccaactctgctacacagtataaacctgacttagaagactttttgatgcaaaattctaactttaatgggctaatgataaagccttccagtctggtagaagttgttggtggatacgacgatcctaataatcttggaagaaatgacgcggttgattttctacccgttgatatgttgaaattgatggactag

SEQ ID NO: 80694 - DNA, 282 bp, Saccharomyces pastorianus
atgacaattagaatgttgctgtacttattgaactacattttgtttactcattatgaaccaatgggcagtgaagatcctggtactaatatcgtagctaaggagtacgctcaagaggcattaaattttgccatggatggctacagaaactgcatgattttcttcaacaatatcagaaacaccaattcactattcgattacatgaatgttatcttgtcttacccttgtttggacattggacaatcgttctttacaatttatcgtttgtttgatcctgagagctaa

SEQ ID NO: 80695 - DNA, 141 bp, Saccharomyces pastorianus
ctaacctatggtactgagaatgtcaatgatagtagtgagcccttgatcaacaaagggttattaccaacttcggaaggtggttctgtagattcaaataatgatgaaatttacggtctaccggaaactacccgactattctaa

SEQ ID NO: 80696 - DNA, 876 bp, Saccharomyces pastorianus
atgagcatgccatcttcatctacactagagaaccaacccataacacaaatcaatcttccaaaactttccgattcttgtaacttaggtattctgataataatcttgagattgacatggctatccataccttctaattcctgcgaagtcgacctgggagaggaaagtggctcatttttagtgcccaacgaatctagcaatatgtctgcatctgcattgacctcgatggctaaagaagaatcacttctgctaaagcatgagacaccggtcgaggcactggagctatgtcaaaaatacttgattaaattcgatgaactttctaatatttccaataacaacgttaatttaaccacggtgcagtttgccattttttacaacttctatatgaaaagtgcctctaatgatttgactaccttgacaaataccaacaacactggcatggccaatcctggtcacgattccgagtctcaccagatcctattgtccaatattactcaaatggcctttagttgtgggttacacagagaccctgataattttcctcaattaaacgctaccattccagcaaccagccaggacgtgtctaacaacgggagcaaaaaggcaaaccctagcaccaatccaactttgaataacaacatgtctgctgccactaccaacagtagtagcagatctggcagtgctgattcaagaagtggttctaaccctgtgaacaagagggaaaatcaggttagtatcgaaagatttaaacacacttggaggaaaatttggtattacattgttagcatggatgttaaccaatctctttccctggggagccctcgactactaagaaatctgagggatttcagcgatacaaagctaccaagtgcgtcaagg

SEQ ID NO: 80697 - DNA, 1131 bp, Saccharomyces pastorianus
atgtttattgaggctctagcgcgtttgaactacagattaaaagtatctggatccaaaaaaactgtggtagcgtttattgtcatgcccgccaaaaataattccttcactgttgaagcattgaagggccaggctgaggtgagggcgttagaaaatactgtacacgaagtgactacttcaattggtaaaagaatattcgatcatgctatcaggtacccccacaatgggctgacgacggaattaccaaccgatttgggtgaattactaaagagttcggataaagttatgttaaagagacgtattttggctttgagaaggccggagggacagttacccccaatagttacacacaatatggtcgatgacgctaatgacctgattttaaataaaatcagacaagttcaattgttcaatagcccaagtgatcgtgttaaaatgatcttccatccagaatttttgaacgctaataatccgatccttggtttagattatgatgagttcgttcgtggttgccatttgggtgttttcccttcatactacgagccttggggttacacacctgcagaatgtacagtaatgggtgttccctccatcacgacaaatgtctctggcttcggttcctatatggaagacttgatcgaaaccaaccaagcaaaagattacggtatttatattgtggatcgtcgtttcaaggcacctgatgaatctgtggaacaattagttgactacatggaagaatttgtaaaaaagacaagaaggcaaagaattaatcaaagaaatagaactgaaagactgtccgacttactggactggaaaagaatgggtctcgaatacgtcaaggcaaggcagttagcattaagaagaggctatcctgatcagttcagagagctcgttggtgaagaactaaatgattccaacatggatgctctagcaggcggaaagaaattgaaagttgcaagaccgcttagtgtacctggctcaccaagagatttgagatcaaacagcacagtttacatgacccctggtgatttgggtactctgcaggaggttaataacgcggacgattatttttcattgggagtgaatcctgcagctgacgatgacgacgatggcccatatgctgatgacagttaa

SEQ ID NO: 80698 - DNA, 429 bp, Saccharomyces pastorianus
atgtcccgtgacctacaaaaccatttgttattcgagactgcgactgaggttgctaatagggttggtggtatttactccgtgctaaaatcgaaggctcccattacggttgcccagtataaagaccattaccacttgatagggcccttaaataaagccacttatcaaaatgaagttgatatactagattggaagaagcctgaggccttttccgatgaaatgaggccagtgcagcatgccctgcaaacaatggaatctagaggagttcattttgtttatgggaggtggctgattgaaggtgctccaaaagtaatactttttgacttggattctgtgagaggttattcgaatgaatggaagggtgatttatggtcattagtaggaattccctctcctgagaatgatttcgagacgaatgatgctatcctatag

SEQ ID NO: 80699 - DNA, 81 bp, Saccharomyces pastorianus
atgtcaaataaattgccatattatactaatactgaactagactatgttatacacttggaccaaattgatcgggatttgtga

SEQ ID NO: 80700 - DNA, 84 bp, Saccharomyces pastorianus
atgaagcaaaatctgttggcagttgagacatggtatatgctaattttgtcgtttcgctttcttttttttttccaggaattataa

SEQ ID NO: 80701 - DNA, 132 bp, Saccharomyces pastorianus
atggcaattcgatcatccaaaagagttggaaagcctcttttccttcgatatatagtgatgatatccttgaaaagactccctaaaaagtgcagtgcggcgggtcacccgccagcttgcctgaaaaatacgtaa

SEQ ID NO: 80702 - DNA, 1785 bp, Saccharomyces pastorianus
atgtgcagaaattgcagacacacaacatcaataacaatcaacaatttcaattctatcacaggtaataccgtcagtttaccacgctcttgcttatctacgattgagagtgaatcttctatggcaaacgagtcgaatattggtgatgaatcgaccaagaaaaattgtggacctgatccatatattattatccatgagtcttcaaagtttattgatcaacagtttttaaaattacaggaaatcccagaactggttccagtaggtgagatgcctagaaacttaacaatgacttgtgaccgatacctaacaaacaaagttattcctggtacgagagtcactatagtaggtatttattccatctataattctaaaaatggtgccggatccggaaggagcgggggtggaaatggaggaagtggtgttgctattagaacaccttatatcaaaatattaggtattcagtccgatgtagaaacctcctctatttggaattcagtaactatgtttactgaggaggaagaagaggaatttctacagctaagtagaaacccgaagctttatgaaattttgaccaactctattgccccctctatttttggtaatgaagatataaaaaaagccattgtatgtttattgatgggtggttccaagaagatattacccgatggtatgaggttaagaggtgatatcaatgtactattattaggtgatccaggtaccgccaaatctcaactattgaaatttgtggagaaagtgtcacctattgcggtatatacatccggtaagggatcttctgcagctgggttaactgccagtgtacaaagagatccgatgacaagagaattttatttggaaggtggtgctatggtgcttgccgatggtggtgttgtatgcatcgatgaattcgataaaatgagagatgaagatagagtggccattcatgaagctatggagcagcaaacaatctccatcgcaaaagctggtatcactacagtgctaaattctagaactagtgttttagcggctgctaatccgatatacggccggtatgatgatttgaagtctcctggtgacaacattgatttccaaactactattttatcccgttttgatatgatttttattgttaaggatgaccataatgaagaacgtgatatttcaatagctaaccatgttattaatattcatacaggaaatgctaatgctatgcaaaaccaacaagaggaaaatggcagtgaaattagtattgaaaagatgaaacgttacattacgtattgtagattgaaatgtgcaccaagactttcaccgcaggccgctgaaaaactgtcatcgaacttcgtcaccattaggaagcaattattaatcaacgaattagagtcaacggaaaggtcgtctattccaattaccattcgtcaattagaagctattattagaataacagaatcattagccaagttagaattaagtcctattgcacaggagaggcatgttgacgaagctattagattgtttcaagcttctacaatggacgcagcgtctcaggatccaattggcggcttaaatcaagcaagcggaacatctttgtcagaaattcgtcgttttgaacaagaactaaaaagaagattacctataggctggtctacttcttatcaaactttgagaagagaatttgtagatacacatagattttcccaattagcactggataaggccttatatgccctagagaagcatgaaacaattcaattgagacaccagggacagaatatttacagaagtggtgtatga

SEQ ID NO: 80703 - DNA, 438 bp, Saccharomyces pastorianus
atgtcatttgatagaccggaaatatacagtgctcctgttttacaaggagagtctcctaacgacgatgataatactgaaatcataaagtccttcaagaatttcattttggagttcagacttgactcgcaatttatttacagagatcagttaaggaacaacattcttgtgaagaattattctttaacggttaacatggagcatttgatcggatataacgaagacatatataagaaactatcagacgaaccttcagatatcattccattattcgaaaccgcgatcacacaggtggctaaaaggataagtattctgagcagagctcaatctgctaataacaatgacaaagatccagaaaatactagtatggatactgattctctcttattgactctttaccaacattcaattaattttatactccaatgcaaatcagaggga

SEQ ID NO: 80704 - DNA, 243 bp, Saccharomyces pastorianus
atgtccctgataaatgatgctatggtgacaagaacacctgtgataatctcattaagaaacaatcataaaataatagcgagagtgaaagctttcgacaggcattgtaatatggttttagaaaatgtgaaggagctttggacagagaagaagggcaaaaatgtaattaatcgggaaagattcataagtaaactattcttaagaggtgattcagttatcgttgtgttaaaaacccctgttgagtaa

SEQ ID NO: 80705 - DNA, 1155 bp, Saccharomyces pastorianus
atgagtgcaaccctaaatgacgatatacaggctttgaaacaaaaattttgtcgttctccagctattcttaaattcaatgacgaggaaataaataagaaccaaaacaaattacttcaatattacgttaaagtcagtgaatttgacaaattcttactatgctatgtcatttttaaacttaacttaatcaagggtaaaacattaatttttgtaaataatattgacagaggatataggctcaagctagttatggaacaatttggtatcaagtcctgtattttaaacagcgagctacccgttaattcgaggcaacatattgttgaccaattcaataaaaacgtttaccaactattgattgccacagatgacaccgagtacataaaagaggaagatgacgaaatagaagaagggcacaatacagaaaatcaagaagaaaaaagcttggaaggcgagcctgagaacgataagaaaccaagcaagaaaaagaaggtccaagtgaagaaagataaggaatatggtgtttctcgtggtgttgatttcaaaaatgttgcatgtgtcctcaatttcgatttacctacgacggctaagtcctacgtgcatagagtaggtagaactgctcgtggcggaaagaccggtactgcaatttcattcgtagtcccactgaaagaatttggtaagcataagccatcaatgctacagacagcaaagaaggatgaaaggattctttcacgaatcatcaaacaacagagcaaacttggattagaattacagccttacaaattcgatcaaaagcaggtcgaggcgttccgttacagaatggaagacggtttccgtgctgttactcaagttgccattagagaagctagggtcaaagagttgaaacaagaactattggcaagtgagaagttgaaaagacattttgaggagaatccaaaagagctacaaagtttaagacacgataaagaattacatccagcaagagtgcaacagcatttaaagcgtgttccagattacttgcttcctgaatcagccagaggaaatggaaccaaagtcaagtttgttcctttccacaatgctaagaagcgccattcacataaaaagggaagagtcagtaagccaaagaatggtaaagtagacccgttgaagaacttcaaatga

SEQ ID NO: 80706 - DNA, 1692 bp, Saccharomyces pastorianus
atgtcactccatttacactcatccttctattcacacaaatacttactaccgccaaccgatgcctttgatagttctgctaacacgaatattgctgtttattggggtcaaaactcagcaggaacgcaagaatccttagctacttactgtgaatcttctgatgctgatattttcctattatctttcttgaaccaatttccaacccttggtttgaactttgccaacgcatgctctgatactttttctgatggcttgcttcactgtacccagattgctgaagatattgaaacttgccagtccctaggaaagaaagttctattatcattaggtggtgcatctggtagctacctcttttcagatgattctcaagcggaaacttttgcacaaactttatgggatactttcggtgaaggtacaggtgccagtgagagaccatttgactcagcagtcgttgatggttttgattttgatattgaaaacaacaacgaagtaggctatagtgcgttagctaccaagttaagaactttgtttgccgaaggtacaaagcaatattacctttctgccgcaccacaatgtccatacccggatgcttctgttggtgacttgttggaaaatgcagacattgattttgcgttcatccaattttacaataattactgcagtgtgtgtggtcaattcaattgggatacttggttaacctatgctcaaactgtatccccaaataaaaatatcaaactgttcttaggtttacctggttccgcttctgctgctggctctggttatatttctgacacttctttattggaatcaactattgcagatattgcctcttcaagttcttttggtggtattgcgttatgggatgcatctcaagccttttccaacgagctaaatggtgaaccatatgttgagattttgaagaatttgctaacaagtgctagccagaccgccactactacagttgccacctcaaaaacctcagcagcctcaacttcatctgcttcaacttcatctgcttctacttcatctgcttcaacttctcagaaaaagaccacacaatctacgacatctacacaaagtaaaagcaaagttactttatctccaactgcaagcagcgctatcaaaacatcaattactcaaactacaaaaacattgacgagtagcaccaagacaaaatctagtctaggtaccaccacaacagaaagcactttaaattcagttgctatcacaagtatgaaaactactctatcttcccaaataaccagtgctgccttggtgacccctcaaacaactactactagcatagtttcttcggccccaattcaaacagctatcactagtactctttcgccagcaacgaagagttcttctgtcgtttccctacagacagctactactagtacgctttccccaacaacgaccagtacaagctcaggtagtacaagctcagacagtacagctcgtacattggctaaagaattgaatgctcaatatgcggctggtaaattgaacggtaaatctacctgtactgaaggtgaaattgcatgttctgctgatgggaagttcgccgtttgtaatcatagcgcttgggtttacatggaatgtgcttctggaaccacatgttatgcttatgactccggcgactcagtctatacccaatgtaatttctcttatttggaaagcaattacttttaa

SEQ ID NO: 80707 - DNA, 261 bp, Saccharomyces pastorianus
atgacagtatcctgtatggtgggaaaggctgaacaggaaagttcgtcgacacatgaagtaatcatccgttgcaaagattggaaggtgtgttccaagctatacgctgcatttgaagaagttgttttggcgatttctcacgacgaatcctgcgtattccactgttcgttggatcgtggtagcttggaagatagcgaagaggtggaaaaaccaagggaaagaggacagattatatactatatagcaagatcgaagggcttgtaa

SEQ ID NO: 80708 - DNA, 1197 bp, Saccharomyces pastorianus
atgaaattaaaattgatagtaaatggttgtgaagcacctgatgattataaattgctaagaactactatcaatacagttgcttcgctacgaaagacggctatcttaagatttaatagtgaaagattgacaataatatccactccaaaatcatcactcaacagcagtaacaacggtacaatattacgaggggatactggtcagctttggtgtaccattcctcatgatgtattcagattatatacagttatatcagctcgcgagcttaatacaataacaatggagtgtaattgtgattctttattgagtgtgtttaaaagatatgatcgagtaatgaaccaaggatcttcctctaatatgattataaaactacagtcaatgccagaatggaatacaaataacggaacactttcaggaggaacagcaggaggcgtagatacaacctcaaaaccgaaccccatttgtgctttaggtataacattcgaagaaattgtacataccagcggcccaaatgacgctatagttatgaatgggggagtggatgagcacaatggtttaccaaccacagtaggcacaggaaatctactagcaagcaataaggttattatgcattcgttcaaagtacctgtcaaactattattccgagcacaagatacgcgaatacaagagccaatgattaactatattcaactgatgatgtacaagctaccaccaatatcgggtgagtttggctccgccttccacgggttcattagacgtgttgaacggtacagcaatgtcaaccacattcatttaatgggagtcaaaaaaaaggagcatggaaatgaaggtgatgatgtagaactcaagataattgtgaatgaattagattggcatttggaaatatgttggaatggacccttagattctgtgatacaacgccaagaagggctcactgacaatccttcccaaaaccagcacatcgacacagacggccggcaggaggaaggatctcttccgattatcgaagcggataaaccgatgtcttcactatataccaatactagagatcgagagatggaagagaatatccgctacgatgaagatttattaagaattgaggatagctcgatcgcagatacgcggggaaacatttacacagctgatacgagcggtgagactgaatgtaatgacagtatcctgtatggtgggaaaggctga

SEQ ID NO: 80709 - DNA, 879 bp, Saccharomyces pastorianus
atgcctgcaggtcttttgagggatgaagtagaagaagacactatgagcacaactgtcacatccacatccgttgctgaacctttgatttcttctatgtttaatttattacagaaaccggagcaacctcatcagaatagaaaaaatagttcagggagctctggtatgaaaaccaagactgattaccgtcaagtagccattcagggtatcaaggatcttatagatgagataaaaaacattgatgaaggtattcagcaaattgctattgatttgattcacgatcatgagattttattaactcctacacctgattcaaaaaccgtattaaaatttctgattactgctcgcgaacgtagtaatagaacatttacggttttggttacagaggggttccctaataacaccaagaatgcacatgagtttgccaaaaaattagcacagcacaacatagaaaccctagtagtcccagactcagctgtttttgctttaatgtcccgtgtgggtaaggttattatcggcactaaagccgtttttgtcaatggggggactatctcgtcaaattcaggtgtatcatccgtttgtgaatgcgcccgagaatttagaactcctgtatttgctgttgcaggtttgtataagctttctcctctatatccgttcgacgtagagaagtttgtcgagtttggcgggtcccaacgtatattacctagaatggatccaaggaaaagattagatacagttaatcaaattaccgattatgttccgcctgaaaatattgatatctacattacaaacgtcggtgggttcaatccaagttttatatatcgtattgcgtgggataattacaagcaaattgatgtgcatttggataaaaataaggcgtga

SEQ ID NO: 80710 - DNA, 210 bp, Saccharomyces pastorianus
atgtcctctcaagcattcacttcagtgcatccgaatgcggcaacatctgatgtgaatgttactattgacactttcgttgctaagttaaaaagaagacaagtgcaaggttcatacgccatcgccttggaaactttacaactgttaatgcgatttatctctgcagctcgttggaaccatgttaatgaccttattgacaaatcagagatttag

SEQ ID NO: 80711 - DNA, 630 bp, Saccharomyces pastorianus
atggataaaatgaagaatgactacttggcacctgcttacgaatacttgagaaacaacatcaagagtgaccaagttatcatcatccatgacgctttccaaccatacaattattgggatgacttcatgactgaaaacgatggctactggggtgtcactatcgaccatcatcactaccaagtctttgcttctgatcaattggaaagatccattgatgaacatattaaagtagcttgtgaatggggtaccggagttttgaatgaatcccactggactgtttgtggtgagtttgccgccgctttgactgattgtacaaaatggttgaatagtgttggcttcggcgctagatacgacggttcttgggtcaatggtgaccaaacatcttcttacattggctcttgtgctaacaacgatgatatagcttactggtctgacgaaagaaaggaaaacacaagacgttatgtggaggcacaactagatgcctttgaaatgagagggggttggattatctggtgttacaagacagaatctagtttggaatgggatgctcaaagattgatgttcaatggtttattccctcaaccattgactgacagaaagtatccaaaccaatgtggcacaatttctaactaa

SEQ ID NO: 80712 - DNA, 198 bp, Saccharomyces pastorianus
atgatgacaacgacgaaggaatctgtcgacgaatatcacttctgtcaatatttaggtaaggatttggctaaaagccgtttacagagccattggtctactttctaccaagaacaagatttcgctaatattgcttcccaaggtttcaacctctgtcagaattcctatcggttactgggctttccaaactttggacgatga

SEQ ID NO: 80713 - DNA, 780 bp, Saccharomyces pastorianus
atgttgaaaccaccacatggtgatggtttgcctcaaagaggttatgatgctggtgagaacacttaccaagctccacctgcagaccgtagcaccgttgaagttaaagtttctccaacttcagaccgtctacaactgttgaaaccattcaaaccttgggacggtaaggatgctaaagacatgccaatcttgattaaggccgtcggtaagacaactactgatcatatttctatggctggtccatggttgaaatacagaggtcatttagaaaacatttctaacaactatatgattggtgctattaatgctgaaaacaagaaggctaactgtgttaaaaatgtatatactggtgaatacaaaggtgttccagacactgctagagattacagagaccaaggtatcaagtgggttgttattggtgatgaaaactttggtgaaggttcctctcgtgaacacgctgctttggaaccaagattcttgggcggtttcgctatcatcacaaagtctttcgctcgtatccatgaaactaacttaaaaaaacagggtctattgccattgaacttcaagaacccagctgactatgacaagatcaatcctgatgacagaatcgatattctgggtctagctgaattggctccaggtaagcctgtaacaatgagagttcatccaaagaatggtaagccatgggatgctgtgttgacccatactttcaacgatgagcaaattgaatggttcaaatatggttctgccttaaataaaattaaggccgatgagaagaaataa

SEQ ID NO: 80714 - DNA, 345 bp, Saccharomyces pastorianus
atgaatgccacaggcaaacatttccccaagtattttaggcctccatacggtgcaattgataatagggttagagctatagtaaaacagtttggcctaacggttgtcttgtgggatctcgatacttttgattggaaattaatcactaatgatgatttcagaacagaggaagaaatacttatggacataaatacttggaagggaaaacggaaaggtttgatcttagagcacgatggtgcacgaagaacagttgaggttgctattaaaatcaacgaacttattggtagtgaccaattgacaattgcagaatgtattggtgatacagactacatcgaacgctacgactag

SEQ ID NO: 80715 - DNA, 456 bp, Saccharomyces pastorianus
atgcaaaaggagggacacttaatcggctcacatacctggtctcacgtatatttgccaaatgtatcgaatgaaaaaattatagctcaaattgaatggtccatctgggcgatgaatgctactggcaaccatacccccaaatggttcagacctccatatggcggaatagataatagagtaagagcaataacaaggcaatttggcttacaagccgtcttatgggatcacgatacttttgattggagcctccttctcaatgattctgtcataactgaacaagaaattcttcaaaatgtaataaactggaacaagtcaggaaccggattaatattagaacacgattcaacggaaaaaactgtcgatcttgccattaaaataaataagttgataggtgatgatcaatcaacagtttctcattgtgtcggcggaattgattacataaaagaattcttgtcctaa

SEQ ID NO: 80716 - DNA, 1416 bp, Saccharomyces pastorianus
atgatcgaggcctacgaagctaaaaatactgagttgagaagtaagatagagttattgagcaagaaagtagagcatctgaagaatttatgtacagaaaaggagaaagagcagactacatcgcagaacaaggtagccaaattaaatgaggagatatctcaacttacctacgaaaaatcaaacataacaaaggagcttacttctttaagaacctcttataaacaaaaggaaaaaactgtgagttacttggaggaacaagttaaacaatttagtgagcaaaaggacgtggctgaaaaatccacagaacagctgagaaaagatcatgctaaaatttctaacagattagacttattaaaaaaggaaaatgagacactgcataatgatatcgcaaagaattctaattcctacgaggagtatttgaaagaaaatggtaaattatcggaaagattgaatattttgcaagaaaaatacaataccttgcaaaatgtaaaaagtaattcgaatgaacacatagattctatcaaaagacaatgtgaggaactaaatgtcaagttgaaggaatctacaaaaaaaattttatctttagaagatgaactaaatgaatatgctaatattgttcaagacaaaaccagagaagctaacacattgagaaggttagtttcggacagtcagacagatgattcgagcaaacaaaaagagttggagaatagattggcctatttaacggatgaaaagaataaattggaagcagaattagacttacaaacatccagaaaggccactgaattacaagagtggaagcatacagtaactgagctgaaatcggaaatacacgctttaaagcttcgtgaagagggactaaaatcagaggttgacgcattgaaacatgttaacaatgacatcaaaaggaagactcaagccacttcagatgattccgatcagttggaacagatcacatctaatttaaaactctcattgtctaaggctgatgaaaagaattttgagctacagtctgccaatgagaaacttctgaatttaaataacgaacttaacaagaaatttgatcgattactaaaaaattatcgttcattgtcctctcaattgaatgctttaaaggaaagacaatacagtgacaagtcaggaagagttagtaggtctggttctatcggtactctagctaacgcgaatattgattcctcaccagcgaataactctaatccaactaaattagagaagatacgatcatcaagttcattggagttagactctgagaaaaatgaaaaaattgcatatataaaaaatgttttgttgggatttttggagcacaaggaacaacggaaccaattacttcctgtaatttctatgttgttacaactggacagtactgatgaaaaaagactggttatgtctctgaagtaa

SEQ ID NO: 80717 - DNA, 1257 bp, Saccharomyces pastorianus
atgttcaaacagctgtcacaaattggtaagaatcttaccgatgaattagcgaagggcttagccgatgatatgagccctaccccgtcagaacaacaaatcgaagatgataagagtggcttgccaaaagaaatacaagctaaattaagaaaatttgagaaatatgaacaaaaataccctttgctactctccgcatacaaaaatgaaaaattaaagtcagagaagttagaggctgttgaaaagattttagcggaaaatacacccatatctaatattgacgacgcagtggatacgttgccagcttttttccaggatttaaacaacaaaaataacctattgaatgatgagatcaagagattaactaagcagaactcggaaattccagaaagcgcctctagtgaaactctgaaggataaagaagaggaatttttgaaaaaagagcaaaattataaaaatgacatagacgatctaaaaaaaaaaatggaagctttaaacatagaattggatactgtacaaaaagaaaaaaatgatactgtttcaggtttgagagaaaaaatagttgcactggaaaatatactaaaggaagaaagggaggtcaaaaaacagaaagaagaagtatctatatccgaactgaaggaagaattggctataaagaaccattccctcgaggacagtcgaatgaagataacggaattggagcaaaatttgtcttcgaaaagtactataatggaggaaaagtcctcagagttggcagaactaaatattactttaaaagagaaagagcacaagctgagtgaattggaaaaaaaaatgaaggagttaccgaaggcgatatctcatcaaaatgtaggaaacaataacagaaggaaaaagaatagaaacaagggaaagaaaaataagggaggcataactacgggtgatatcagtgaagaggaaacggtcgataactcaatcaatactgaagaatatgataagcttaaagaaaatttgcaagaattacaagaaaaatataaagattgtgaagattggaagcaaaagtatgaagatatagaagcagaactaaaagatgctaaagaattggaaaactcacagctcgaaaaatcagcaaaggagctggaaacccttaacaccgagttgatcgataccaagaagtcattgaaagaaaaaaattcggagctagaggaggtgagagatatgctgaggactgtagggcatgagcttgtggacgcaaaagatgacattacagagtcttcgaagtaa

SEQ ID NO: 80718 - DNA, 762 bp, Saccharomyces pastorianus
atggaaaatagcatgatgtttatatcgcgttccttgcggagacccgttactgctttgaactgcaatttacaaagcgttagaacagtcatataccttcataagggtccgagaattaatggtttgagacgagatccagagtcgtacttgagaaatcctagcggggtactctttactgaagttaacgcaaaagagtgtcaagacaaagttagatccatactacaattgcccaagtacggaataaatttatcaaacgaactgattttgcagtgtttaacacataagtcgttcgcacacgggtcaaagccatacaacgaaaaactgaatctgctaggagcacagtttttgaaactacagacgtgcattcattcgttaaagaatggttcgccggccaagagttgcgagaacgggcaactttctttgcagttcagcaatctgggaacaaaattcgctaaggaattaacgtccaaaaacacagcatgcacattcgttaaattacataatctagaccctttcatattttggaagatgagagacccaataaaagatggccacataaatggtgaaaccacgatttttgctagtgtcttgaacgcatttattggtgcaattctgtcaacgaatggatctgaaaaagcagctaaatttatccaaggaagtttgctggataaagaagatcttcattccttggttaacattgctaatgaaaatgtagcatctgcaaaggcaaaaatatccgacaaggaaaataaagcatttctgtga

SEQ ID NO: 80719 - DNA, 204 bp, Saccharomyces pastorianus
atgtgctccatggccctgatccattctcgtgtgagacgagtggtcttccttacagagatgcagcgcaccgggagcttaaaattaacgagtggtgacgggtactgcatgaacgataacaaacagctaaactcaacatacgaagcctttcaatggatcggcgaggaatatcctgtggggcaggttgaccgggatgtctgctgctag

SEQ ID NO: 80720 - DNA, 198 bp, Saccharomyces pastorianus
atgcaacggcaggaaaacagtccaatggtgagcgtctttgttgacccatcaagaaagaaggacaaagtggtggcagaagatggcagaaactgcgaaaactcgctacccatcgaccacagtgtaatggtgggcatccgtgcggtaggcgaaagactcaggaggtgtagacgaagacgcaaactcttatctgtgtcttga

SEQ ID NO: 80721 - DNA, 123 bp, Saccharomyces pastorianus
atggttaagaaagttaataatccgctaaaaatcgattatcagaacgggataatagaaaatcggcttctgcaaattagaaatttcaaagatgtaaatacgcccaaactaagtatgtatctatga

SEQ ID NO: 80722 - DNA, 222 bp, Saccharomyces pastorianus
atgcctgcaggtctggtatctgtgttgagaatcgcagatgggttttgggagcatgacaaacttttgcagctaaggatgcttgatagtaatatgaacatacctaatcagattcctcatactactttgcaaagttcgctatctgcgattgtaataaagataatagaaagtaatataggaaaaattgaggcgtctgaacctttcaaaaccttcaagaatacgtaa

SEQ ID NO: 80723 - DNA, 3864 bp, Saccharomyces pastorianus
atggatgttgatgaaccgaatcctattgtgatatcagattctgaggccactgatgaggaaattagtatcatatacgaacccgaattcaatgaaaattatttatgggcagaggaaaacgtccaagaagcaagcagatcacagaaaattgtcactgagaggttgagcctggattccactgctggagaatcttgtactccttccgtagtaactgatacacaagttactacggggcttcggtggtctttgaggaagaggaaggctattcaaaagatgccatacagtttagaacgcataaagcataggcagttgctagagggctatgatatctctagttttgacagcatttcgaatcagttgaccttaccgaagaacgcttctacagtgattcactcaaatgatattttacttacaaagagaactggtaaacccttagatgagcagaaagatgttacaatcgactccattaaacccgaaaacagctcggttcaatctcaaagatatgatagtgatgaagaaataccaaagaaaaggcatcgtacttttaaagacctcgaccaggatatagtatttcaatcaggtgattctacggaagatgaacaagacttggctagtacaaatttacagaatactcaaaatgacgaagtaatatttagaggaagagtattgaatgtaaaaactggttaccgtggggtcctaccaagagttgcttgggaaaagtcgttgcaaaagcagcagtcttcaaaagtcacgaaaagaaaaactcaattattgaaccataagggtgtggctaagaggaaaatgaacagaagcgcccatatggaagatgaagaacagaacttattgaacgatcttattgcacctgatgacgaactggatatcgaggaaaacgctcctccagatatatacttaggaaatcttccagaggatcgtgaggctaacgaaaaggaattaaaggaattgcaagaatattatgagagcaagtatagtgaagacgcacaatcggctggaacttctggttttaatttaaatgaggaataccgcaatgaaccagtgtatgagctggaatatgacggaccggggagctgcatatcacatgtatcttataaagaccagcctattatttatttgaattcacggcattcagatagcggatttagtgagcaatacaatatatctgccgaagataatcaaagtgtaatttccctagatgctgctgaagagcataacgatggtataattgacaagatgttggttaaacctaaaagaattaaagcaaccaatgatgccaactttttgaatacaaaaagtaagagagtgagaagatataagtacaaatatcgaaattcttgtctggccccaagtacaaaagctatcaaagtcggaaaacggtcagcgcataaatctcatttggcagctaataatccagtttcatttgtttctaagaagaatcatgtaattgatgattatttttttgaagaattagaatctcaatccctagaacaggatgacagctcttctctcaagccacagaaaaaaagaaggaagaagaaagcccctatatactcaagtttctccgctgatcttgaatcgagacgaaaaccagttttcaatactgttgtagaggttcccacgaaccgatacgctttcacaaagccaaatgtacgtaatagggacagcattaatcatgacatggaatttgaggaagaagactccaatcaagagcttggaccaataatggtcgtacttgactcaattttactaaaaaaaccttttgagccacctaatttcttcaagatccagttgtcagacaagagtttcttgctatcaaaattgaatcctgcagatatagctacatcgttacagaaaatattcagagtaatcattgataaaggtatcactgatactgaactagttcactttaacgaaagccttattgcttttttggtgcaccttgacatgcctgaactattcgacttaataggtgaatttcatcgtgaatttagatcgaaggtcaatagcttgaggaaaaaagctaaaccaatccatttttttcaaattgcggcatgccaattaatgtttctagaaatatcaagatataacaaaatttcagccgctgcaaaattcgacatggatgtcaaactcttagatcatattgtctctttcttcaaattactttctgtctgttatgattctgttatgaaaaatccaatgcaatatctgtacacaagttattatattctctctgctgtcgttgatgtcatacataaaaaggaagctttgtgggatttatttcaaaagcaccccttttcgcctcatatttcactgttgctggtcaacatatttcctacgaaagtctgccgctggcaggttttgagattagattctgaattccaacccttgagttcggcatttcggttcatcaattattgcattgagacttgtaattggaatgttacaaattctttgattctttctctcgatcgcatattcaaacggagaagattttcggactttgaagaagagtctgatttgtcacaaaacaataagataatttatcctccaacgaatcagcttacgagtcgattaatgtttaacagatatttgcatctactgacgttgtgtgaattgtctagttctgatacacaacgtgtgataccgatgggtgatatttctatgaatgattctctatctgttttgaagaaccgcctcaacctactaattgttctagctacacgttttgatttaaacttagagaagcgcttccaagagctaacacgaccgttatatagtaaggaatatttaaacttgcatacacagaacacagtcaggacgataacaacattgatcatgcaggccagcctttcattcctggaaatcagtcgaatcaaaaatcatccattcagtggaaaatttattgcgtcattatttgataaactagtacttcaacaaccttccatatcgggagtaacagaaaattttttgaaagaattcacaaatttagtctccaaaatgaaaagaaaaagcgtgagtatgctcaaatttctgtatccttcactggtggccatgtctcaagaaaatatattcgagtcgtctttttttttattattacaggtatatttgaagagcttagatgttctgggtccaacttgggtgcaaaattatctctttcagtttataaagagcaaggctcaagaaaatgaaagatggatagaatgctattctcagatcggaaaattcctcgtagattctggtatatttacctggtggactttctttacctataacggcttagatgctgcattacactttcagcttgcatttcactcccttattatcgatttctgtgatacagactcttttgaattactgaaaaaaccgctttattccattgcttctgatttgctgctcatttccaaagatgacgctttctatcactttctttccaatctgttgaagagggcacatatcatagtagcagatttgaaacctgtttccgatgagaatgaactcctgcgatgggcttatattttttctaaagcattgaaaaaaaatgcatatcaagatctattagctgttttcttatccctggcgaaaaaacattacgatgaaggggacatcagtagaaatttcttggcaaaatatctcgaatttcttaacataaattgcttgactgagctaagaaataatcaactcttcatcagtctaagaagggaacgtggtatttcaagtgatgaagacgaaaaatgtgcgttctgggactcattcaatgaaggtgatatactttccaaagctgcatttgttgaaaccggtattgttcaagcctgttgcactgggaatgaaatgatgatatgcgtgacatgttaa

SEQ ID NO: 80724 - DNA, 531 bp, Saccharomyces pastorianus
atgtgtgaattggcctgcgaaagaacctcatcttggttgatggtggatgcatgggagtcattgcaaccttcatacacaagaactgccaaggtcttggatcatttcaatcacgaaatcaacattaagagaggtggtgtagctactgttactggagaaaaaattggtgtgaaaataatgttgctggctggtggtgacctaatagagtcaatgggtgaaccaaacgtttgggcggacgccgatttacatcacattctcggtaattacggttgtttgattgtcgaacgtactggttctgatgtaaggtcttttttgttatcccatgatattatgtatgaacatagaaggaatattcttatcatcaagcaactcatctataatgatatttcttccacgaaagttcgtctatttatcagacgcgccatgtctgtacaatatttgttacctaattcggtcatcaggtatatccaagaacatagactatatgtggaccaaaccgaacctgttaagcaagttcttggaaacaaagaatga

SEQ ID NO: 80725 - DNA, 228 bp, Saccharomyces pastorianus
atggtcttctccatgatttcaaggctccgattgaagtggcaacaaagttcgctcgctccgatatcctacgccctaacgagcaattcagtacttcttccaataatgcttaacatgattgcccaagacaaatcttcaacaacggcgtatcaaattctgtgtcgaagaagaggtcctccaattcagaattttcaaattttttctataccggctgtaacgtacaataagtag

SEQ ID NO: 80726 - DNA, 114 bp, Saccharomyces pastorianus
atgaacgatcgattagttacggaagagcaagagttgtttacaaaattgcgcgagattgtaggttcaagtattcgcttttggaggaacaactgttttatcaagttcaagatgtaa

SEQ ID NO: 80727 - DNA, 315 bp, Saccharomyces pastorianus
atgacattcaatgctgaaaccaaatcgtacgattcaagaggcgtaggcgaaatgaagcttttgaagaaaaaggacgatccttctaaagtgcgcctactttgtaggtctgacggtatgggtaatgtattactaaatgcaactgttgtagactccttcaaatatgagcctttagctcccggaaatgataatctcattaaagctcctactgttgcggctgatgggaaacttgtaacttatatcgtcaagtttaagcagaaggaagaaggccgctcatttacgaaagctattgaagatgctaaaaaagaaatgaaataa

SEQ ID NO: 80728 - DNA, 1131 bp, Saccharomyces pastorianus
atggccaaaagagttgccgatgcgcaaatacagagagaaacgtacgattctaacgagtctgacgatgacgtgactccctccactaaggttgcgtcatctgctgtgatgaatagaagaaaaattgccatgccaaagcgcaggatggcgttcaaaccttttggttctgcaaaatcggatgaaaccaagcaggctagttcctttagcttcctgaaccgggcggacggcactggagaagctcaggttgataatagccctaccacagaaagcaattccagactaaaagcattgaacctccagttcaaggctaaggttgatgacttagttctaggcaagccgttagcggacttgaggccccttttcaccaggtacgaattatacataaagaatatcttagaagctcccgtgaaatctatcgagaatccaacgcagacaaagggaaatgatgctaaacctgccaaagtagaagatgtccaaaaaagttccgattcttcatctgaagatgaggttaaggtggagggacccaagttcacaatagatgctaaaccgcctatttcagattccgttttctcatttggcccaaaaaaagaaaatcgcaagaaagatgaaagtgatagcgaaaacgatatagaaatcaagggccctgaatttaaattttctggaactgtatcaagtgatgtatttaagctgaatccaagcaccgataaaaatgaaaagaaaaccgagactaatgctaaaccattttcattttcttcggccacttcaactactgaacaaacgaagagtaaaaatcccctttcattgacagaagctaccaagaccaatgtggacaacaacagtaaagccgaggcttccttcacttttggaacaaaacatgctgcggattctcaaaataataaaccatcttttgtatttggtcaagcagctgcaaaaccatcgctagaaaagagctcattcacgtttggttcaacaacaattgaaaaaaaaaatgacgaaaactcaacctctaactcaaaacctgaaaagtctagtgatagcaatgattcaaacccatctttttccttttccatacccagtaagaatacacctgatgcatctaagccatcttttaattttggggtcccaaactcttcc

SEQ ID NO: 80729 - DNA, 2628 bp, Saccharomyces pastorianus
atggaaaggttttctatttcagaaggaaaaaagagaaaacgaggaaatggcaaacatttaagccgtaaagaaaagagaaagatggaacgggccgacaagaaacgtaaaattatatcaactagagaaatcaattccagccggctaaaatcagcaccaacgtccgaaaagaggagtgctaatgcaggtgtgaaaaacgtaggcaagcaggctaacggtaaaaatccgatttcttcagatgaatcagaaagtaatgaaaactgggatagtgacgaagtgcttactgatgaagtagcagaagaaagcggtgagcaggcaatgtctgcggaagaaacaatgaaaaaactagaatcattgaaacggaaagcaaagggtatacaaggagctgaaaactcgggagaaataaaaggtaactcatatgaaaagaaacatattcgtaacagagatacaaatgagaattttgtgagttatccgctggccccttcagacagatcagcgtttgaaagggacgagatggacatgcaatattacgcaaaaaagttgggcttgaaaggagaaaggaaggctatacatgcaaaagatgaatttgatgctattggtggacttcttgaaggtttggaatactttgaaaattatggcaaaagtgacgaagagtatggagattttgccacagaaactaattctatgagaaaagatgatgaagcaagcgagaaagcattttcctcggatgatgatctttcagcttctgattttgaagactcagatgggcttagtgaatctgataacgacagcgttgcggactcggatgataattatagaagagaaaaggaaaatccctatgtagctcccacacaatctgtagagagctatgttcccccatcactgagaaagaaattggatgatagtgaaaacaatagtactttgtctgaaattagcaagaaggtcaactcctctttgaataagctttcagactccaatattactattattatcactgatttaaacagattgtatgattccctgcctaggcagtacgttacagaatcgttaacgaaagggatattgaatattataagccaaaatcagaagttgttggacggatttataatgaattatgctgctcttgcgtatacattatcaaaactaagaggtattgaggtgggtgcttttttcattcaaaaaacggtagaggcatttctgcatcattacgaagaggaaatggaaaatatattaaaggatcagcagagcaaaatttcctctaaaatatgcatcaatattgcaaccttactatcgtattgttataattttggatttgtttcgtgtcgcttaatctatgacattattcgaatatttgtagcagatcctaatgaattcactactgagttacttttacgaattatatcgatttcaggacaactgatccggggtgatgatccatccgccctgagagatatacgatcagaactgttgaagaacgccaagaatttaaaagagcagagcccaagattgagatttttaatggataccatgtctgacttgaaaaacaacaggttaaagccttctattttggcgactgatcatcatccattaaagaaaaacttgcaaagcattttgaattcttcttcttcttgggagcctttacaggtttctctggaagacattaaaaacattgattccaaggggaaatggtggctggttggtgcttcttggcgaggaaacatggaaaatgcttttgaagtttcgatcaataatgaaaatgatgccagcaagtccaagaaatctaaaatttcaatcgaggatgatcttcttgatgatattccagattggaatattatcgccagacaacagcgtatgaatactgacattcgaagggctatatttataagtattatgtctgcacaagattacctggatgcatttagtaaacttgaaaagttaagcttgaaaaataagcaagttcttgaaattccaagaattgttttacattgtcttttggctgatagtggatccaatggttataatcattactacgcattggtcgcgaacaaaatatgtgaaaggtatagccatttatcgaagtcgtttcaattcctattctgggatgtgataaaaaaatttgaagacaaagaattcgattctgaaagcgatactgacgaagaagatgatttagatgataaagaaaaactgcttcgcatctcaaatcaggggagattttttggatcgttgcttgctaatgacattttgaaattagatgttttcaagcatgttccatttatgggtggattaaacacagaagggatgttatttatggagatattgctatttcagttatttttaactgtagctaaaaaaagtgagaagaaactcaagatggatgaaagtggaaataagcgtataatctactccgatgattatttgcgcgatgttttaacgaagaacgttaaatcggaaaatatgctattcattctcaaaggtttgaagtggtttattaacaagaaatttagataccataatttccttgcaggaaagaaaggagataaagcttttgatagggatgaaagaagattggcttgggcttcaaaagctgccaaatctattatagacaaagaactggaaaatatagattcgtag

SEQ ID NO: 80730 - DNA, 849 bp, Saccharomyces pastorianus
atgtcgtttctggatgaaattgaatccaaattacataagcaaacatcatcgaatgcttttaacgcaccacccccccatacggatgctatggcgcctcctttgcctcctagtgcacctcctcctcctataacatcgctaccgactccaactgcatcaggtgatgaccacaccaatgataagagtgagactgtgttagggatgaaaaaagcaaaggcccctgcactgcctggacacgttccacctccaccagttccaccagttttatcagatgatagcaagaataatgtccccgccgcttctttattacacgatgttcttccctcctcgaatctcgaaaaacctccttctcctcctgttgcagctgctccgctattgccaacatttagtgcaccaagtctgcctcagcaatccgtgtctacatcaataccatcacctcctcctgttgcgcctacactttccgttcgtaccgaaactgaatcaatttcgaagaaccccactaagtcgccacccccaccaccaagtccatctacgatggataccggtacctctaatagccccagtaaaaaccttaaacaacggttattttctacaggtggatcgacgctgcaacacaagcataatacgcatacaaatcaaccagatgttgatgtaggtaggtatacgatagggggatcgaattctatcgttggggccaaatctggaaatgaaagaattgttatagatgattcaagatttaaatggactaatgtgtcacaaatgcctaagccacgtccctttcaaaataaaacaaaactgtatccaagtggaaagggtagtagtgtgccattggacttaacattatttacgtga

SEQ ID NO: 80731 - DNA, 294 bp, Saccharomyces pastorianus
atgagctatgcgtcgactaacagagtaaaagcaaccccggttcccccaaatatagcaccaccgttaccaaatactacatcagttcctcctaacaaagcatcgtcaatggcccgggccaccacctcctcctcccccaccacctggtgctttttcaacatcctctgccttgtcagcatcatctattcctttagcaccaccaccacctcctcctcctccttcggttgcaacgtcagtaccatcggctcctcctcctcctccaacactcacgacaaacaaaccctcagcgtccagtaa

SEQ ID NO: 80732 - DNA, 1053 bp, Saccharomyces pastorianus
atgaagattacaaatctattccgattctttttcagcttcacgcataagatacataaccggaatacctttagacatcctgcaaacagtctaataaatacgtataataagtttgaaatgggaggcattcgtgaaaagaaagctgaatactttgctaaattaagagaatacttggaagaatacaagtctttgttcgttgttggtgttgacaatgtttcttcccaacaaatgcacgaagtcagaaaggaattgagaggcagagctgtcgtcttgatgggtaagaacaccatggttagaagagccatcagaggtttcttatccgacttgccagacttcgaaaagttgttgccttttgtcaaaggtaacgttggtttcgttttcactaacgaaccattgactgaaatcaagaacgttattgtctctaacagagttgctgctccagccagagctggtgccgttgctccagaagacatctgggttagagccgtcaacactggtatggaaccaggtaagacttctttcttccaagctttgggtgtcccaaccaagattgccagaggtaccattgaaattgtttctgatgtcaaggtcgttgacgccggtaacaaggtcggtcaatctgaagcttccttgttgaacttgttgaacatctctccattcactttcggtttgactgttgttcaagtttacgacaacggtcaagtgttcccatcttctatcttggatatcaccgatgaagaattggtttctcacttcgtttccgctgtcagcaccattgcttctatctctttggctattggttacccaaccttgccatctgtcggtcacactttgatcaacaactacaaggacttgttagctgttgccattgctgcttcctaccactaccctgaaattgaagatttggttgacagaattgaaaacccagaaaagtacgctgctgctgctccagctgctacctccgctgcttccggtgacgctgctccagctgaagaagctgctgctgaagaagaagaagaatctgatgacgacatgggtttcggtttattcgattaa

SEQ ID NO: 80733 - DNA, 990 bp, Saccharomyces pastorianus
atgctaaatactgcagatgaagacgtgatagaatttagttttgacgataatgtcccttatgctgagttattatctggtgccacccttgaaaaatgttcgttgactctaaatgaaataaacaaaaaactattcaatacgctctatgactttcgagtaagcaaagataatcccgaagaaaatttggtagaactaatacttccgaactgcgtggtgttattaaacttttttgaagacattgaactcttggccgactcttctgatgaggctttcgaaaaatctactttcattaacacaattgagttcattgtgcacgatatttgggtcgaaacgttgataaagaacataaacttattacaaatgtttgatgcagatttgaaatgttacaatgacaagtacataatttgcaagctaaagggtcagtatccctccacaaatatagtggacataatgagccgtttgaagcatttttccaattctattttggaaactttcaaattcggaatcgagctaaaagaacaagatcaatgccacaatagaaacactattatcaactacgttcttttcagtagagtattttcaacgattgttttagagattcaaaaatgctttatcttgatcgttaaattcatgtattctgtcaattttttagaaaaattttccgatgaagtatttttgtcatttattgaaattctcataaaaattgtctttgagcaccagattccgcagttatttttgggaattgatgaaattattcaactctggttaaagaacaatgaaggaaaacggcaacaactcttgagcgcttggtgcaacggaactgttcaagatatgaagcaaagccaacaaagagagtcctcaaacgcagaatctgaatcaatcacttcaagtacagaagaggacgaagaaggcctccaattcaataaatgggatgtgattgaaccatttattgataatatcaaggctttgaatcaatcaaaatcccatatgtga

SEQ ID NO: 80734 - DNA, 1191 bp, Saccharomyces pastorianus
  modified_base (190)..(232): a, c, g, t, unknown, or other
atggccgcgatagtaggaacggtcgcagaaggtatcgcgtcgcaatctcagttgagtgccaaggaaagggccctctccactgtacgtcgtagacatgtttgtataaaagggctgcaaggtgtggtctttggcaagcgattacgctgcaatgttgggggcaggaaacggtcgggcggtcggcttgtagtgnnnnnnnnnnnnnnnnnnnnnnnnnnnnnnnnnnnnnnnnnnngtgtagaggttcgttcctcttgctctgaaagtgttgaaaagataacgcaacagctggacggcatgtcaaccaacgcaaaagagtctgccggtaagaatatcaagtatccatggtggtacggaggtgcagcgggtatctttgctaccatggtgacacatcctcttgacttggccaaggtcagactgcaggcggctcctatgcccaagcccacactcttcaggatgttggagagtatcttggcgaatgaaggtttggtggggttatattccggcctgagcgctgctgtgttgaggcaatgtacatacacgacggtgagattcggtgcatacgacttgttgaaagagaatgtgatcccacgcgagcaattgactaacatggcgtatcttttaccttgctccatgttcagtggtgccattggggggcttgcagggaattttgcagatgttgtaaatatcagaatgcaaaacgactctgctttggaggcagcgaagaggagaaactacaaaaacgctatcgatggtgtgtacaagatatatcgctacgagggtggactgaaaaccttgtttaccggttggaagcctaacatggttaggggcatactgatgacggcaagtcaggtcgttacgtatgacgtgtttaagaactacttggtcacaaaattagatttcgacgcatccaagaactatacacacttgacagcgtccctgttggctggcctggtggccaccactgtgtgctctccagcagacgtcatgaagacacgtatcatgaacggcagcggagaccatcaaccggctttgaagatccttgccgacgctgtccgcaaagagggcccatctttcatgttccgggggtggttgccaagtttcactagactgggtccattcacaatgttaattttctttgcaattgagcaattgaaaaaacatagggttggcatgccaaaggaagacaagtag

SEQ ID NO: 80735 - DNA, 594 bp, Saccharomyces pastorianus
atgtggtctaacctgaaaccattcccttctcaaagcaacaaaatatccactccagtgaccgaccataggagaagacggtcatccagcgtaatatcacatgtggaacaggaaacctttgaagacgaaaatgaccagcagatgcttcccaacatgaacgctacgtgggtcgaccagcgaggcgcgtggttgattcatatcgtcgtaatagtactcttgaggctcttctactccttgttcgggtcgacgcccaaatggacgtggactttaacaaacatgacctacatcatcggattctatatcatgttccaccttgtcaaaggtacgcccttcgactttaacggtggtgcgtacgacaacctgaccatgtgggagcagattaacgatgagactttgtacacacccactagaaaatttctgctcattgtacccattgtgttgttcctgattagcaaccagtactaccgcaacgacatgacactattcctctccaacctcgccgtgacggtgcttattggtgtcgttcctaagctgggaattacgcatagactaagaatatccatccctggtattacgggccgtgctcaaattagttag

SEQ ID NO: 80736 - DNA, 1719 bp, Saccharomyces pastorianus
atgattgctaatccaattagtcttcaagacataaataaaaaggtaaagactcgtcgttataaaacgttccaggagttccagaatgattttaatcttatgttaaccaactttagaatttcgcacagaggtgatcctgaaagcataaaaatttcaaatatcttagaaaagacctttactagtctggcaagattcgaactatccaaacctgatagaagtttcattccagaaggcgagctaagataccctctagatgaagtcattgtaaataatatatcataccacgtgggagattgggcacttcttcgaaatcaaaatgatcctcaaaaacctatagtgggccaaatattcaggctatggaagacaccagatgggaaacaatggttaaacgcttgttggtattacagacccgaacaaactgtgcatagagtggatagattgttttacaaaaacgaagttatgaaaacaggtcagtaccgtgatcatttagtgtcaaacttagttgggaaatgctatgtgattcactttactagatatcaacgtggtaatcccgatatgaaattggagggtcccttgttcgtttgcgaattccgttataatgaatccgataaaatttttaacaagattagaacctggaaggcttgcttaccagaggaaattcgtgatttggacgaagctaccattccggtaaatggtagaaagttcttcaaatatccttcccccataagacatctactaccagctaatgcaacgccgcatgatcgcgttcctgaaccaacgatgggatccccggacgcgccaccattggtcggtgccgtttatatgagacctaaaatgcagcgtgacgatttgggggaatatgcaacctctgatgactgtcccaggtatattatcagacccaacgattctcccgaagagggacaagtggatatagaaacaggtacgatcaccacaaacacgccaacagcaaatgctcttcctaaaacaggatactcaagtagtaaactatccagtttaagatataacaggtcatctatgtctttagaaaaccaaaatgctattggccagcaacaaataccactgtcaagagttggttcccctggcgcgggaggcccgcttactgtacaaggtttaaagcaacaccaattgcaaaggttacaacagcagcaacatcaataccaacaacagaaaagatcccaagcatcacgttataatatcccaacaataatcgatgatttaacatcgcaggcatcaagaggtaatttgggtaatataatgatcgatgcagcctcctcgtttgtcttacctatctctataaccaaaaacgtagatgttttgcagcgtactgatctgcacagccaaaccaagagatctggaagagaagagatgtttccatggaaaaaaacaaagggtgaaatattatggttcagaggacctagtgtgatagtaaatgaacgaataataaattcaggtgacccacacctaagcctgccactgaataggtggtttaccactaacaagaaaagaaaactagaatacgaagaagttgaagaaaccatggaagatgtgactggaaaggacaaagatgatgatggcttagaaccggatgttgaaaatgagaaagagtccttgccaggcccatttgtccttggattaagaccctcggctaagttcacggcgcacagactctctatgctgcggcctccttcgtcgtcttcatga

SEQ ID NO: 80737 - DNA, 639 bp, Saccharomyces pastorianus
atgaacgatgttgtccagattccatggaatgccaagacttacaatacaagagattcaggaatttataaatacgccttagtccttgagaaatatttaaaggacacaatctatccaaatttaaaagaaaaatatcctcaattagtgtatcctgatttgggtcctctacccgatgaaccaggttatgaagagtttcaacagaaattaagagaaaaagctgaggaagtagcgagagctaatgcagccagagccgagtcgagctcttcaatgaatccaacagaagcagccagaagattaagaaagactcgtacttccgtcaaaagagaatcagaaccaggaaccgatacaaataatgatgaggactatgaggcgacggatatggatatcgataaccctaaggatgctgattttcctgatttgattaagaaagccactgtatcaatactaatccatatactcgggaaaccattaagagacaacaggtccactactccatgtcactcaggcacccctcagccgttaggcccaaggcatagacagctatccagaactcaggtaaagcgtgggagacccccaatcatcgacttaccgtatattcaaagaatgaagaatgttatgaaagtactaaataagaggtgctag

SEQ ID NO: 80738 - DNA, 312 bp, Saccharomyces pastorianus
atgatgcctgatgacaattcaaactcgtccactcaaaactcaagcgcattatacaaggacctgaggaaagaatatgaatctcttttcactttaaaggaagattctgggttagagatttcaccaatattcaatgtccttccacctaaaaaggattatccggactactacgcagtgatcaagaaccctgtatctttcaatactgtaataaagcgtattccgacattatacagatgctcaacagtttatgaacgatgttgtccagattccatggaatgccaagacttacaatacaagagattcaggaatttataa

SEQ ID NO: 80739 - DNA, 825 bp, Saccharomyces pastorianus
atgggtgatagatctattcaagactctgaaaccgtattattaaaggcggtagcacccgtcattgcaagaaaaattccgtgggcaatggtatggggaaatcacgacgacgagggaagcttaacgcgctggcagttatccgaaatagcttcagtactaccatattcccttttcaagtttagtccccatgatacacacgataatacgtttggcgttggtaattatatttatcagattttttcgaacaatgatacagaagtcccagtaggtacactttattttctggactcacataaatattctacggttggtaaaatttatcctggatatgattggattaaggaatcacagtggaaatacattgaagattatcatgatgtgaacttgaagttcaaaacaggtctttcaatggcattttttcacatcccactgccagaatacttgaatattgaatccaagacacatcccggagagaaaaatcccctcattggaatgtacaaagaaggtgttactgcacctaagtataattctgaggggataacaactttggataggttaagtgtggatgtcgtcagttgcggacatgaccattgtaacgattactgtcttcgagatgactctacgccgaacaaaatctggctatgctatggcggtggaggtggagaaggtggttatgctggctatggaggtacagaaagacgtatccgtatttatgaaattaatgtaaatgagaacaatatacacacatggaaaagattaaatggcagtccaaaagagatttttgattttcagtctatgttggacggtaattctccagaatctgtttaa

SEQ ID NO: 80740 - DNA, 2217 bp, Saccharomyces pastorianus
atgcataaagagagaccacttaataaagctagtatgataagatcaccggtagacgaaatatacatggaacagacacaaacagcagagggcactgacttactaattggtgacgaaaagaccaacgatttaccttttgtgcagttatttctggaggaaataggatgcactcaatacctggatagctttattcagtgcaaccttgtcacagaagaagaaattaagtatctcgacaaggatatcctcattgctttgggtgtaaacaaaataggagacagactcaaaattttaaggaagtcaaaatcgttccagagagataaacggattgaacaggtgaatagattgaaaaacctgatggaaaaagtaagctctctatccactgctacgctatcgatgaattcagaattgattcctgaaaagcactgtgttatatttatcttaaacgatggttccgctaagaaagttaatgtaaatggttgctttaatgcagattctattaagaaaaggctaatcagaagattgccacatgaattattagccacaaactccaatggagaagtaactaaaatggtccaagattatgatgtgtttgtcttagattataccaagaacgtactgcatttgctatatgacgtggaattagtcactatttgccacgcaaatgatcgtgttgagaaaaataggctaatttttgtttccaaagaccaaacaccaagtgataaagctatatccacatccaaaaaactatatctaagaacgttgagtgcattgagccaggttgggccatcctcgtcaaatttgttggcacagaacaaggggatttcgcataacaatgctgaagggaaactccggatcgacaacacagaaaaggacagaattagacagatttttaatcagaggcctcctagcgaatttatttctaccaatttggccggatattttcctcatacagacatgaagcggttgcaaaagacgatgagagagtcatttcgccattcagcaaggctaagcattgctcaaagaagacctttaagtgcagaatcaaataatatcggtgacatactattgaaacactcaaacgctgttgatatggccctattacaaggattagatcagacaagattaagcagtaaacttgacacaactaaaattccgaagcttgcccataaaaggccagaagataatgatgccatatctaaccagttagaactattaagtgtagagtctggtgaagaagaagatcacgatttctttggggaggacagtgacattgtttcattaccgacgaaaattgccacgcccaagaattggttaaaaggtgcttgcattggatcaggcagttttgggagtgtttacttgggcatgaatgctcacactggtgaactaatggcagtaaagcaagtggagataaaaaataataacattggtgttcccacagacaacaataaacaagccaattctgatgagaataatgagcaggaggaacaacaagagaaaatagaagatgttggggcggtaagtcatccaaaaaccaatcaaaatattcacagaaagatggttgatgctttacagcatgaaatgaatttattgaaggagttacatcatgagaacattgttacttattatggtgcttctcaagaaggcggaaatttaaatatttttcttgaatacgttcctgggggttcggtttcctccatgctgaataattacggaccatttgaggaatcactgattactaatttcactaggcaaatactgattggggttgcgtatttgcataagaagaacattattcacagagatatcaagggtgcaaatattttgattgatatcaaaggttgcgtaaaaattactgattttggtatttcaaaaaaattatcacctttgaataaaaaacaaaataagagagcttctttgcaaggttccgtattctggatgtcaccagaggtggtcaaacagaccgctactactgctaaagcggatatatggtctacaggatgtgttgtcattgaaatgtttaccggtaagcatcctttcccagatttttctcaaatgcaagcgatcttcaaaataggcacaaacacgacccccgagataccttcctgggctacgtcagaaggaaagaatttcttaagaaaggcatttgagttggattatcaatacaggcctagtgcccttgaattgctgcagcatccatggctggatgcacacataatttga

SEQ ID NO: 80741 - DNA, 1242 bp, Saccharomyces pastorianus
atggcctcaagggatgctgaaatgatatatttaagattatctgccattgatacgtcttttgatgacttactagatgctagagaattcatattaaatggaatatgttccgatctactacaaaagtataaaaaaattgaagagtttttgaaattacgaccggtgactagggtttccaagttaatctcaatcagtactgactatctggactgcttcacacaacctcatgattcagtgggtcaaacaaatgatagggccacaggaagggagctacatagagaggatttcatgttactaagagtatattcccgagaaggacgaggttataaaactattattctagcaataatacaggctatcactaagagatataacgttgattcatatcttgctcgagatcatttggtggtgtctgaaccagactttccagatggacgggcatttgttaccgtaaatgaggatttccagccatacatttttgataaagaggaccttttgagcgtttggtcgaacaacttccataacgcagaaaattttgaaagtacagttttaccagcattattagaaccaatatcgatacaacatcttctgacggagttctttcgagaactgctgcgatgcaagcccaggccatttgagggatatccaaacagagcacacggattacgcgatatgtttccatacggaaaagtggaagttcccagagatgtgacgatgtattttgcatttatatacgatcttttcgatggcatgtttgaatctggaatgacaagtttacggggccaaatgttgagagatttactgaactacgttaacgctaataattttggtgatttgaatatcatcattggacaaaatgctcttaaggaaccaaatgactgctggtccaacaagagggattacgttcttcttgatgacaataataagattggatatttctatacggatattgaaactgaggatactttatgtgccttaaaccaatatgaagtggacggcaaagtttttataacaacaatagatatcttgggtgatataagagtacgcctggctgaaggactaacgccttttcagggagataatgataagttgtgggagagcttttcttccgttattccacgaactgactggggactttttttcaaaggctatgacaaagaaaggcgtagaatgcaattaaacccttacatagaggaaaagctttccaatctagcgaatgatgaacaacctttacataatttatag

SEQ ID NO: 80742 - DNA, 243 bp, Saccharomyces pastorianus
atgataagtgatactgagaatttatttaaaagatatgaaaaactgatttctagcgaaaaagagtattctaatatcgtagaggacatcaaagctctgagacaagctataaagaattttaaggctaacgaaaatgacatgtcaattgatgtaaacggaataaaaaaagctacggatgcgctacagggtagggcattaaaattattccaaagcgcaacaaaaaaccagcagaatcaaggtaaataa

SEQ ID NO: 80743 - DNA, 375 bp, Saccharomyces pastorianus
atgcttaaatctggtagactcaactttctcaagttgaatatcaattcacgattactatactcaacgatccctcaactggctaagaaggtcattggtatcgacctgggtaccacgaatagtgctgttgcatatatccgtgattctaacgacaaaaaatcagctacaatcatagaaaatgatgaaggacaacgaaccacaccatctatagttgcctttgatgtcaaaagctcgccacagaataaagatcaaatgaaaactcttgtagggatggcagctaaaaggcaaaatgctattaattctgaaaacactttctttgctacaaagagacttattggccgtgcattcacgacaaggaagttcagggggatcctctag

SEQ ID NO: 80744 - DNA, 1065 bp, Saccharomyces pastorianus
atggctgttatgccatataagattgtcaaatgtgagtcaaatgggcaggcctatctcagcacgtctaatggtctcattcaatcaccaagccagatagcatctatattactgaaatacctgaaacaaacttcagaagaatacttaggcgaaaaggttaatttggcagttattacagttccagcatattttaatgattctcaaaggcaagccacaaaagatgccggcaagttagctggcctaaatgttttgagagttattaacgaaccaactgcggccgccttaagctttggaattgatgataagaggaataatggattaattgcagtttacgatttgggtggtggtacatttgacatatccatcttggacattgaagatggcgtgtttgaggttcgtgctactaatggtgacacgcatttaggtggagaagattttgacaacgtcattgtaaactatattatagataccttcattcatgaaaaccctgaaattacacgggaagaaattacgaagaacagggagacaatgcaaaggttaaaagatgtttctgaaagagctaagatagatttatcccatgtgaagaaaacttttatcgaacttccatttgtatacaaaagcaaacatctacgagtgccaatgacagaggaagagctggataatatgactttgtcattaatcaacaggactatcccacctgtgaagcaagcattgaaagatgccgatatcgaaccggaggatatagatgaagtaatccttgttggtggtatgacccgtatgccaaagattagatctgttgtaaaagatctttttggtaagtctccaaattctagtgttaacccagatgaaacagttgctttaggagcagctattcaaggtggtattctatccggtgaaataaagaatgtcttacttttggatgtgacaccattgacattagggattgaaacatttggaggagcgttctcacccttgatacctagaaatacgacagttccagtaaaaaaaacagagatatttagtactggtgttgatgggcaaacgggtgttgatatcaaagttttttag

SEQ ID NO: 80745 - DNA, 375 bp, Saccharomyces pastorianus
atgaacaactatataagacaaagggagaatagtaacttttgtgattccaattctgatatctcgcaaaggtccgttagccaaagtaaactacatttccaggaactaattaatcattttaaggccgtttcagaagaagatgaatattcatcagatatgataaggcttgaccatggtgctaacaataaatcacttctgcttggaagttttttggacggtattgacgaagataaacaagaaattgtcacaccaatctcgcccatgaatgaagctattaacgaggagatggaatctcccaacgatagtagttctgtcatattaaaagatagtggcagtctgccattcaaccgcaatgtatccgataaattaaaaaaataa

SEQ ID NO: 80746 - DNA, 1185 bp, Saccharomyces pastorianus
atgtctgaaaaacatacggcaaagacagtagcgtttgtgacaagaagtaatgcccgactcccacctacgttcaatagtcattggcaagaatttaataaaatcgataatctggatttgtatttttactcttttggaaaagttatatatatggtgcaagttcaaatagagctagggaaatcttcatcttggtttaagccattccataaactgataagggaaatcgagacgttcgaatttatacctgagccaaaagatcttattatagaacctgatgaagatgacaatgaagaacttaatgccttcagtaacaatagtagaggaaatagtatggtcaccaacaatgaatttttcaatagttcaaatttaaaggtgccatcaaaggacgtcaaagtcgttaatggagtcggatatataaaaagtgacaggaacttttctcaagctaattctatattgatagaaaacggcgacattagatcgagaccggtatcatcagtcacatcaacaagacaatctactcgcctagtaaatggtatgaaagttttcccatctacttataaaatggggttgcctgatggggaaagcaatatgagaatagaggttagaagtcgagatttgaagcaaatatacaggaaagactacttgtttaggtctggcagcctaaattttgacaaggtctatgtagtcatggaggggaatatagcaagtttgagcaaaatgcaaattaccccacttaaactacaactgaacttgctagagactacaacatatttatctcagggaatagcgaacggcaattactcttctttgaagctaatcgagattgatttgaatcagctcaaatccaataaacctcttttggacttaaacgaaatacgagaaaattttgatggttctatgtttgaatgtgaattacggttaaaggatcaccccattttaagaaagttggtatttaatgaagaagactatagacatcgcggcaataggttgtatagtttcaagacatgcacgataaaaagaatattcagtttacagctactgatagaatggggaatcaatggaattaggaagcaatctgaagtaaacattgatcctgttcagatcttttgtcaagttagagagcacgttgaagctgaagctctgcccagatatgtaccgccaccgacatatactgaaatggcgagttaa

SEQ ID NO: 80747 - DNA, 1326 bp, Saccharomyces pastorianus
atgccggattctatttttgaacagccctttgtttactgtggtgtttgccacagaagaacatcgcatggagatccattgaggctgacctcatgtgctcatatcctctgttcgcagcattctccattaacatcaaaggtgtgtcctatatgccgttcgagcgatatctccatcattaaccttgtggaatctaaacagctgcctaccgacattaggattttttttgagccactgcccccacttttggagtcgttatataatgtttcccaattccaactgaatgggctttcgaaacagtgtcaatactatcaaaatcattgtttaaagttgagagaaaaatgtgcaagacaacagcagctgctatatcaggccaaaatagagttggattctatggcgattcttaagaaaagaatacaggaattagagtcagttttgaatcataacaatgtttcttcgatgtcagttggtgtgctaccaacaagaaatagccatcaaaatcattaccagccccctccaaccgttgatctgacagttgatgataatagtttagaagaattcgaagccaaatcctttattaaaaagttgaaaaaaaactcttctttgagaaattcttcaaaaaataacaatggaactgtcactccctctacaagtggtcgtgtaaataaaaaccagcctctctttatggagacattgaataatcctaatagaaatagcattcctcctcctggaatgaacccaaacgcaaatagtaatctacctaatatttcgactattgcagaatcaaccaatctgaacagattttcgttctctcctgtgcgtgttgcaaaaggcttcgatggaaagttgccaaatcttgacatcctcacgaataatggctctgtatcttccaaaaatatatcaagattatcttcagcttctctccaaccctcttcgcctctatcttcatcatcaaataggcttattttaccaaatagtaacctcaaagaattgcatcattcaaatacacctttaacaagtacctcgacgcagtttccctcagctttagaaaaattaaaaataacaaggaagagaaataatactatcagcggttcgaatagaataacacacaacttgagctcacacgtaagaagcagtggtcttgccttttcatcttcatcgaactcattgcaacaaagtaaactgccgaaatcaaatatactaaagcggtccaattcaactcagcaactgactaatacacatttgaagagtgataatcatcagccacctcgctcaagtaatactgtgttgggtagtagcaagaaaaacaataagtttagaaggattaggtaa

SEQ ID NO: 80748 - DNA, 312 bp, Saccharomyces pastorianus
atgctttgtgttttcaatacgcatcagattccattaactcaggatgaagctgagtttttggacagaaaaaggtttgccatgatgaatgtggtgtatgagtgggcccgtggtttatcattcaaagaaatcatggaaatgagccccgaggctgaaggtactgtagtcagagttatcacttggctagacgaaatttgccgcgaagttaagactgcctctattattattggtaattccacattacatatgaagatgagcagggctcaagagttgattaagagagatattgttttcgccgcaagtttgtatttatag

SEQ ID NO: 80749 - DNA, 636 bp, Saccharomyces pastorianus
atgccaaagaaactttacaacctggaacatgaaaaacaaatcaaagtattacaagaggaattacaaaccatagagtacaaaagttgtgaaatctgtgataatgatatcgaaaagtttttggaattgatgctggcatataaggaggcaacagtcaacctaatgcaagaaatggttaaatcgccttcgatattgcatatcttgaaagagggcagactcgttgcttttagggaccccaatgattgcttgaaattaggatttgtatttaaagtttctctgaaggatgctgtttgtgtcattatgacgttcacaaaaccatacaaactcccaaatggtgagccaaatcatttaatatactttccaaaagcggatggatacagaagaaggaacttccctaaattccagaagactgatttttatatggaagaagttcctgtgacggctattgaagtgatcactaaacgcaagtttgccgcacccttgggaaaagtgattaaaaaggatgttgccgctttgaacgagtttaacgctgaaacaaataacattttggacggcaaaacgctaaaagaagcaattaacattgaaaagcaaggtttaaaaattcaccaaatattgttaccgtacaaatataagggatga

SEQ ID NO: 80750 - DNA, 612 bp, Saccharomyces pastorianus
atggttgttttcgtatttagtaaaaagaggtgcgaggaatatgctgactggttggagggaattaacttctgcaacaataaggaaaaatcacaaatccacatgtttattgagaagtcgattactcgtttgaaaaaagaggatagagatttgcctcaaattcttaaaaccagatcattacttgaacgtggtatagctgttcatcatggggggctattgcccattgtcaaggagttgatcgaaatattattttccaagggttttatcaaagttttatttgcaacagaaacttttgccatgggtttgaaccttcccacaagaacagttatctttagcagcatccgtaaacatgatggtaatggattaagagaactgactccaggtgagtttacccaaatggctggtagagctggtagaaggggcttggattccactggtacagtcattgtgatggcatataatagtcctttatctattgctacgttcaaagaagtaacgatgggtgttccgacgaggttgcagtctcagtttagattaacatacaatatgatattaaatcttttaagaattgaggcgttgagagttgaagaaatgatcaagtattcttttagttga

SEQ ID NO: 80751 - DNA, 1863 bp, Saccharomyces pastorianus
atgtctgagggattcagtagcagttccatacaggaattatatcaatcgttaaaagaaatcactaacaacgcagacgtagagcttttcgaagatcgcattactaaattagattttgagagcaccgatgaaccaaagcatgcaaatgatatcataaaggatagatttttgagaccttctaatgctcttccttggagcttgttggacatggtccaagacgttccacatacgtcttctccagaagattgctctggtaaactagattacaaggaattgctgaaagtcccggacccaattaatagaacatcataccagtttaaaagaactgggttagaaggtaaaatttcaggctacaaagaagaggttggtttgaaggaagttgcaaatgccaatgcatcaaattcactgtcgattacgagaagtatcaaccataaccaaaactcagtaaggggttctacagcgcaattgcctttcacaccaggcggaattcccatgaaatctgtcaagacaggttcagaacaaaatggatcttctacaatggccaacgctactaaattgttacacaaggatggtcaaggtttattcgatattccagagggtatgaatagaggcattaagccgatggattctccagctgaaaatgaggatcaaaacggacagttcaaagaattgaaacagctaaatgagatagataatgaattagacataaggattgaggcgaacgaggcaaagttaaaagaggaggaaaaatctgccaagtcaatttctgaagaaattatggaggaagccactgaagaaacgactgccgataatgctgatgatgccgaaatcgatgaactattaccaattggaatagactttggcagaactaaaccagtttcgaaaagtgttcctgttaaaaaggaatgggcccatgttgttgatttgaaccataagatcgaaaatttcgatgagttgattccaaaccccgctagatcgtggccttttgaattggatacatttcaaaaggaagccgtctatcatctcgaacaaggtgattccgtatttgttgccgcccacacatctgctggtaaaactgttgttgcagaatacgcaattgccatggcacatagaaacatgactaaaactatatatacatcacccattaaagccttatccaatcaaaaattccgagactttaaagaaacttttgacgatgttaatattgggttgattactggtgatgtgcaaattaatccggatgctaactgtttgattatgacgaccgaaattttaagatcaatgctttatagaggtgccgatttgatcagagatgtagagtttgtcattttcgatgaagttcactacgttaatgatcaagaccgtggtgttgtctgggaagaagttattattatgcttccacagcatgtcaagtttatcttattatctgccaccgttcctaacacttatgagtttgctaattggattggaagaactaagcaaaaaaatatttatgtcatttccacaccaaaaagacccgttccattggaaataaatatatgggctaaaaaggaactgataccggttattaatcaaaattcagaatttttagaagctaatttcaggaaacataaagagattctaaatggggagagtgcaaaaggggctccttcaaaaactgacaacgggagaggtggatccacagcaagagggggccgtggtggatccaatactcgaggtggaagaggaggccgtggtaattcaacacgtggaggtgccaaccgtggaggttcaagaggtgctggcgcaattggctccaacagcgtaagttttacactcaagatggtccttcgaaaaaaacatggcccgaaattgtcaattacctaa

SEQ ID NO: 80752 - DNA, 1689 bp, Saccharomyces pastorianus
atggaggttccaaaggaacctgcccctgctcctcctccagagcccgatatgaataatctccctcagaatccaataccaaagcaccagcagaaacatgcattgcttgcgattaaagctgtcaaacgcttgaaggatgcgagaccctttctacaacctgttgacccagtgaaattggatattcccttttactttaactacataaagaggccaatggacttgtctactatagagaggaagttgaacgtaggcgcttatgaagttccggagcaaatcacggaggatttcaatctcatggttaacaacagtattaaattcaacggtccaaatgcgggcatatcacaaatggcaagaaacatacaagcttctttcgagaaacatatgctaaatatgcctgctaaggatgctccacctgtaatagccaagggacggcggtctagtgcccaagaggatgccccaattgtaattagacgagcccaaactcataatgggaggccgaaaaggactatacatccgccgaaatcaaaggatatttatccttatgaatcgaagaaaccgaaatccaaaagactacaacaagcaatgaaattttgtcagagtgtgctaaaggaattgatggccaagaagcacgcctcttataactacccatttttggaaccagtagacccagtttctatgaatttgccgacttatttcgattatgttaaagagccaatggatttaggcacaatcgccaagaaattaaatgactggcagtatcaaacaatggaggattttgagagagacgtgaggttggtctttaaaaactgctacacgttcaatccggatggcacgatcgttaatatgatgggtcatcgtctagaggaagttttcaattccaaatgggcggataggcctaatttggatgactacgattccgatgaagattcgaggacccaaggcgactacgacgattatgaatctgagtattcagagtctgacatcgatgaaactataattacaaatccagccatccagtatttggaagaacaacttgctcggatgaaagtggagttgcaacaattaaaaaagcaagaactggaaaaaataagaaaagagaggcgcttagcacgtggatcaaagaaacgcggcaaaagatcgaagggaaggagtgggtctaagaacgcttcttcgaaaggaaggcgagataaaaagaataaattgaaaacagtagtgacatatgatatgaaacgtatcattacagagaggatcaatgatttaccaacttccaaattagaaagagcaatcgacataataaaaaaatccatgcccaatatttctgaagacgatgaagtagaacttgacctcgacactttagataatcacaccatcttaacattgtacaacactttctttagacaatatgaaagctcatccggtgcttctaacggtttggacggtacttcaggtgttacgcgagatgcttcgtccttgtcgcctacaagtgcgggaagcagaaagagaagatctaaggcattaagccaagaggagcagagtaggcagatagaaaagataaaaaataaactagctatcttagacagtgcttcacctctgagccaaaacggctccccaggccaaattcaaagcgctgcacacaacgggttttcctcatcttcagatgacgatgttagcagcgaaagtgaagaagagtga

SEQ ID NO: 80753 - DNA, 351 bp, Saccharomyces pastorianus
atgaccgatatcacacccgtacagaacgatgtggatgtcaatggtaataatgtcaatgacgacgtttccagtaatctaaagaggcctatagatcaaggggatccttcgaatggactcgcagaagaagaaaaccccgccaataaccagttgcatctcaaaaaggctagactggatggagatgctctaacatcagcgcctgctggacttgcagagaacggtattgaaggcgccaccctggcggctaacggggaaaatgggtataacgccaccggaagtggcgcagaagacgaacagcaggggttgaagaaggaagaaggaggacaagggtaccaaacaagaggatttagatga

SEQ ID NO: 80754 - DNA, 1275 bp, Saccharomyces pastorianus
atgacctgcagaataacatggccgctcatactcataatgcaggtcataagactaatactatgcaggctcatgagcagcaatgcaactaaaaacaccgccattaataatatgcatgccaatcttcagagcaacatggattccaactccacaatacgacaatctcagcatcctcaccatcagcagaatataatacaacaacagttgcaatcgaattctgtaaatcatacatcaggggctgtacccacaccgagtgtaatgggttcagcaactgcgtcgtctacaactgcaaatccaaatgtgatatctataacgggtgcccccaactcgggcttatctatggctaatcactctcaacaactacatctgaatggtaatctagtcgatgccgtttcaacgaatgatgtgtttttaagaacgagcaattctccatcaagacacgttccgcacaataaacaaattaacagtaacagtaatagtggtatcaatatcaacaataatacctcacacaattctaatattaacatgggtagtaaaaacgccatggtgaatcgtccacatacttttaataactattccttgaacaaaacgtccaggaatcctattcaacatcaatcaagaaaaattgatcctcatcaaaccgatttatcacctctggtacttgtccaagatatagatttaagttttatggatgatgatattttgggccctagtaaccacaattccatgaactctgtcgtaaatccaactacaggttctcacaactacaatacttttcattcttccgtacacgcaaaatcttctcaaaacatggtcgaggatcaagacattgatgacattgatgatgacgatgatgttgatgatgacgatgacgatgacgatgacgatgacacagaaaatggctccagttccaatggaaaatcagttcataacaacaattacaagatgcctcagcaagcttatatagacgatcctgcgagaaggctctatgtaatggatcatgaggaacaaaaaccctttaagtgtccagttattggttgtgaaaagacttataaaaaccaaaacggtttgaagtaccatagattgcacggacatcagaatcaaaaattacacgaaaaccctgacggtacatttagcgtaatagatccagattcgaccgattcttttggtgatggaatgggctctgcaaaggataaaccataccgttgtgaagtttgtggtaagagatataagaacttgaacggtttaaaatatcacaggggccactccactcactaa

SEQ ID NO: 80755 - DNA, 168 bp, Saccharomyces pastorianus
atgtcaccaataccgatgaactctgctggtgacactagttcatcagttcgtatgacttataatacctcttctgccaactatgacctgcagaataacatggccgctcatactcataatgcaggtcataagactaatactatgcaggctcatgagcagcaatgcaactaa

SEQ ID NO: 80756 - DNA, 570 bp, Saccharomyces pastorianus
atgcgtgacaacatggaatacaagctcgatctaaacctacagctttattgccagagcaaaactgaccatttaaatttagacaatttgttaattgatgtttacagaggtccaggcccgctattgggtgctcctggaggaagtaacagcaaagatgaaaaaatctttcacacttctagacctattgtctgcctcgcactgacggattccatgtcgcctcaggagatcgaacaactaggcccatcacgtctagacgtttacgatgaagaatggctaaatacaataagaatagaggacaaaatatcgttagagtcttcatatgaaacaatctcggtgttcttgaaaacggagattgcccaaagaaatctaataatacatccagaaagtgggattaagtttaggatgaattttgagcagggattaagaaacttgatgcttcgaaaaagatttttatcttatattattggcatttcaattttccattgcataatatgtgtacttttttttatcacaggttgcactgcattcatttttgttagaaagggtcaggaaaaatccaagaaacatagctga

SEQ ID NO: 80757 - DNA, 237 bp, Saccharomyces pastorianus
atgaaaatcaatgtatcccgtccattacagtttttacaatggagttcatatattgttgttgcatttctgatacaattgctaatcattcttcctttatcgatcttaatatatcacgatttttacctaagactattacctgccgattcctctaacgtagtcccccttaatacgttcaacattttaaatggcgtacaatttggtacaaaatcttccaatctattaaaagcattccggtag

SEQ ID NO: 80758 - DNA, 213 bp, Saccharomyces pastorianus
atgggtactgaagatgtccgtctagccccagaattgaaccaagctatctggaaaagaggtgttaagggtgttgaatacagattgagattgagaatctccagaaagagaaacgaagaagaagatgccaagaacccattgttttcctacgtcgaaccagttttggttgcctctgctaagggtctacaaaccgttgtcgttgaagaagatgcttaa

SEQ ID NO: 80759 - DNA, 213 bp, Saccharomyces pastorianus
atggagaatgtacaggtgaagaagttattgcgacttcatgacgactcatttaaaaataagtgtgtttctcctattaactatatgttggaaaagtacactccgtatatggggcataccgaagcattacaaaaggaagcagagcttgtggatagggatctccgaatccttgaaatgacgtaccaactgatagaaaagaatcgcaactcgaaataa

SEQ ID NO: 80760 - DNA, 2478 bp, Saccharomyces pastorianus
atgcaaatgtcggaacatttgtgcatattcggagattatctttgcgcttccaccgacgacaattccatctttatatacaagaagtccgatccgcaagataaatatccatcagaattctacactaaacttaccgttactgaaattcaaggtggcgaaattgtgtctttacaacatttggcaacttatttgaataaattaactgtcgttaccaaatctaacgttttactttttaacgtcagaaccgggaagcttgtattcacatcaaacgaatttccagaccaaatcacaactgctgaacccactccagtcctggatattattgctctaggtaccgtgaccggtgaggttattatgtttaatatgagaaaaggtaaaaggatccgcacaattaagattccgcaatcaagaatctcctcattgagtttcagaaccgacggttcttctcatttgagtgtgggaacgagcagtggtgatctaatattttatgatttagatcgccgttcaagaatacacgttttgaagaacattcatagagaatcgtacggtggtgtcactcaggctacttttttaaatggtcaacccattattgttacatcaggtggtgacaattccctgaaggagtacgttttcgatccgtcattatctcaaggaagcggtgatgtagttgttcaaccgccaagatatctacgttccagagggggtcattctcaaccaccttcatacattgcgtttgctgattcgcaatcacacttcatgctatcagcatccaaagatagatcattatggagcttttctctgcgtaaagatgcacagtcgcaagaaatgtcacaaaggttacacaagaaacaagatggcggcagggtaggtggtagtacaattaagtctaaatttcctgaaatagtggctcttgcaattgaaaatgccagaataggtgaatgggaaaacattatcactgcacataaagatgaaaagtttgcaagaacctgggatatgcgaaataaaagagttggcaggtggacttttgatactactgatgatggatttgttaaatctgtggccatgtcgcaatgtggtaattttggattcatcggttcttctaacggctctatcaccatctataatatgcaaagtggtatactccgtaaaaaatacaaattgcacaaaagagcagtcaccggtatatccttagatggtatgaatcgtaaaatggtttcttgtggactagacggtattgttggtttttatgactttaacaagtcaaccttgttgggaaaattgaaattggatgcacctattaccgcaatggtttatcatcgttcttccgatctatttgcattggctttagacgacttatcaattgttgttattgacgcacttactcaaagagttgttcgtcaattatggggtcatagtaatagaataactgcatttgatttctcacctgagggccgttggattgtttccgcttctctagattccaccattagaacgtgggatcttccaaccggaggatgtatcgatggtatcatagtagataatgtcgctacgaatgtaaagttttctccgaatggtgacttgcttgccactacccatgttactggtaatggtatatgcatctggacgaacagagcacaatttaagacagtatcgacaagaaccatcgatgagtctgaatttgcaagaatggcgttacctagcacatctgttcgagggaacgactcgatgttatcaggggctttagaaagcaatggaggagaagacctaaatgatattgatttcaacacttatacatcattggaacagattgataaggagctgttgactttatcaataggacctagaagtaaaatgaacacattgcttcatttagatgttatcagaaaacgttctaagccaaaggaagctccaaagaaatcagaaaagcttccatttttcttgcaactatctggggaaaaggttggggatgaagcctctgtcagagaaggcatagcacatgaaacaccagaagaaatccatcgcagagatcaagaagcacaaaagaagttagatgcagaagagcaaatgaataaattcaaagttacaggaagattagggtttgaatcacatttcacaaagcaattacgagagggctcacaatccaaggactattcatcattgctggccactctaataaatttctcacctgctgcagtggatttggagataagatcattgaattcctttgagccatttgatgaaattgtgtggtttatcgacgcgttaacacaggggttgaagagcaataaaaatttcgaactttatgaaacgtttatgagcttactgtttaaggcacacggtgatgttattcatgctaacaacaagaatcaagatattgcctctgctcttcaaaattgggaggatgtacataagaaggaagacagattagatgatcttgtgaagttttgcatgggagtggcagcttttgtgaccaccgcgtga

SEQ ID NO: 80761 - DNA, 804 bp, Saccharomyces pastorianus
atgaggaaaggggctagttctcacgaatacaacaatgaggtgccatttattgagactaaattgagcagaattggcatatcaagcttggaaaaatctagagaaaaccagcttttgaacaatgacattctctttaacaatgcgttgaccgacctaaacaagctaatgtcgctggctaccagcatcgaaagactataccaaaatagcaacataacgatgaaaaacacgacattgaacttacaggatgaagcaaccgtgaatgaaccgaaaacgagaagaccgctattgatccttgatagagagaagttcctaaataaagagctggttctggatgagattgggagagaaatttacgagttcacgttgtccgagtttaaagatttgaacagtgataccaactatatgatcataactctggtagatctatatgcaatgtacaacaaatctatgcgtataggtacaggcctcatatctcccatggaaatgagagaagcatgcgaaagattcgagcatttaggtctaaatgaattgaagttagtgaaagttaacaaaagaatattatgtgtaacgagcgaaaaattcgacgttgtaaaagaaaagctagtagatctgatcggtgataatcctggttctgatctcttgagattgacacagattttgagttccaataattcaaaatcaaactggacactaggtatccttatggaggtattacaaaattgtgtcgatgaaggcgatttactgatagacaagcaactgagtgggatttactactataaaaactcttattggccctcgcatatataa

SEQ ID NO: 80762 - DNA, 513 bp, Saccharomyces pastorianus
atgatggcacacttgaggcatccacatttgaatagcttaccattcaaaagtgctacagactccaagaaacgcccctccatagaatctctcactgaagaagcaaaaaaggatatcgccacttgcaaagctataccggtcaatttttttcaaatatcacaatctagattttttgccttagtttatgatgaagccgtagtgaaaataaactgctacggtgagatgtctgattggagaaaggatattctcttacttgatttttgttgtaccggcgcgagcttccatggtaatcatttgattctcgttggcgacaatttgatacagatttacgacttaaaaaatgttgagcagagcctaggcgaattggttcccgtccagatcataaaaggaaagaagataaagctggctagttcagaaaggagagagaaaacaattcttgtgttaagtcatccaaatatacttaatagacaattattagtcgcgtgcaatcctgtagcaatggcagatcatcaataa

SEQ ID NO: 80763 - DNA, 3210 bp, Saccharomyces pastorianus
atgtatcgatataatagaagttccccctttgaacgaacaccagaaaaacgagtaagccgtcaagaaagccaacgaaagagcatcgaattgccaaaactgccaccattgaatacgaggaactcctttttggatgattctgataacggaacagataatatctcaattggctggacaccaatcagtgacacccagcaattccgaagcccggtccctcaggcttttacctttacatcaaaacatagtgcaaggggaaacggtactagctcttcagaatccacacccaaatcgacaaagtatgtcaaagaaagacgaccaccaccaccgccaccccttttgtattccactgaatcaatacggatagactcacccatggtatctcccagttctcagtcccgggaaagatcacctaataaactatcctttataggaaactcagaggaacgacatcacatggaatacatatctaaccattccaggatcttaaaatcaccatttgcgaacggatttagtccaaattcccctaaatctccaagagatagtagcaaacagcaggctcacttctctgatgaatcagatctacggtgtcatgaaagagaaaaagctttacccccaattcctttcactactactcttctgctatctccttttgatgatgaagactcagaattttttacgaaaccaccaccgcctctatcaacatctagaaacgtaagtgggaatagccgagtatcagaagccctagaaagtgtttattctgactcagattatacttttaataactcaaatgccaggcaaagtagttttaactctttactgggagccaagccattagaattagcaccaagcattactgcaccgacacaaccattttcaattcaatctatcgatgagcacaagctttatcaatgtgataatgtttacaaactttctgctatttatgagtggattttgaaagtttattttgaatggtttaatgaatgtgtcttcacgaaaatcgatcttttccaaattgttcaattacttttagagtttcaaatgcctacaaatttcgatcaagatacgatagactcaaatgtggataatattatggcttcgtttatttcccagaaagcagtaagattcgatatcattaacgatgaagaggtagccgtagttgtgggagggctggatattactggtgttttcaccgaactactaccgtgctattcattcatcgataatacttatggatctacaaactccctgatttgttattccaacgtttgcacacatggccaaagctctggcttcagaaaagaaataaaactttccgaaatcataaataaatcagttggactttggacagaatactggcacttgactccagatgatttagcagaaattaatccccgtgaagtacaaagacaaagctttatatttgacttaattattttagaagaaagatccttaaacatggctactgccgcggtagaaatctatgggaaacggtttgacaaatccctacttccagatgagcctgagttcaaggcattggtatttgatatcttcgaacctctaatacaattacataccgaatttcttttgacgccaatattttggaaattaaaaacgagaggtaagtttattgatggcgttggaaaaatctattcaaaatggtgtggtgaagccaagaatatatatttgaactacgcgaaagctatggcaacggtacacgaaatcataatgtgggagaagaaatacaagacaaaatttgtaacatggcttaaggagattgataactcggttgaaattacaagatcgaagatgtatcatgatgttatattctttggggggtttttcaaatctttacaaaacatgcccgtaactctgcgctcaattttgaagaacacggatccttccatggaggattatgaatacctgaaaatagtaattaaggaagtagaaaagttgaactttgaagttaatcaggtacatggattggcaattgaccataggaaactagtaaggttttcgaaacaattagtattaagtactaatagtagtaatgcaacaagctatgtgaacgtcggtggtagtactaacgcaaatgacgatgatgcaattcaggataaactagctcttggtttaacttatccggaaaggaagttagtactatctggcactgtttataaaaagagggatttatggctggacccaaccccagtgtatatcgcattattggacaattgcttactgattacagaggaaataagtaaaggagaaactcaaaaatataagcttattgaaagacctatcccaatagattatttaagtctcgagaaaaggaaaattccaggaacaagtaaacagcctctgagaaactactctcagaaagaacataaatccccaatgcataatttttcgacaccgattagctccatgagacctctgcttaaaagttctggaaatcacatgtcaacagcgtatggagatagaaagactagtaatactgaaatttctaacgcgaatccaaacacagacgagttctcatttaagatcagaaatacagccacaggtgaatcgttcaaattttttacagaaagtgcagaagtactcaaccaatggattgatgctatcatggaatcttttaaaagaaatgcagaaaatcatgatttaaatgcctttgaatttacagtgttgagctctgagttcgcatacttcgacaaggatgcaccggtgaatctacctgtagctccggaaggatcagaaattgatgtagcactcaaagcttacgctcaaaaagcaaacaaagattcatgttcatggagtaagacaacacggattctttgttgtgaagatgttaaattcgagggcagaatttacctatttgtggctacaacagacggtatctatgtgaaatatagagacgattatggtagtggtttcgttaaaatattagaattaaacgacgtcaaaagaatggaagccaatgttaagttggggctcttgtttgtattggataacagaaagttgtgctattttaatatctcaacggtagtgagccgttacctagcgcaaggaaacactctagatgaaaactgcattgtgggaacagtaatcagagataaggtgagattcttcaaaattgctgatgattttggtaactcaaaacatttattttttgaaagaaaggggaagatagttatattaacaccagaatttgatcattga

SEQ ID NO: 80764 - DNA, 501 bp, Saccharomyces pastorianus
atggaacgggataatcttgataagatttttaagataaacacatttgcaccacttcagttcattcaagaactggcccctagtagacactcaactagacagtgttatattgtcaatatcgcaagcattttgggcatattgacgccggccaaagtagcagcttatgcggcgagcaaagcagcattgatagcctttcatcagtcgtacagttttgaattgcaaaacgaaggcgtaagaaatatcagaacactattagtgaccccagggcaactgaatacggaaatgtttgcaggattcaagcctcctcgccagttctttgcccctgtaatagacattactactctagctgccaagatagtccgttattgtgagctgggtcagaggggacaactaaatgaacccttttattgtagttttgctcatcttttgatgtgcgtaccttattcgctacaacgcattgtaagaagcttctctcgcatagattgctgcctcccggacgagtag

SEQ ID NO: 80765 - DNA, 93 bp, Saccharomyces pastorianus
atgaatatagactgtttgtgtcgttgggtagttctgccactgctgcgctatccacttctggtagctcttgtattgagatggtatgtaaagtag

SEQ ID NO: 80766 - DNA, 141 bp, Saccharomyces pastorianus
atgattgtaaaccctcatccgccaccacgatcttcagcattcaaaggacctggtattgggcccacaggcacacgcaacagttcgagacggaatgcttcatctagcccatttatccccaaaaaaagtaagcctagatcatga

SEQ ID NO: 80767 - DNA, 1650 bp, Saccharomyces pastorianus
  modified_base (37)..(62): a, c, g, t, unknown, or other
atgaattccaacaatcctgataataataatagcaacnnnnnnnnnnnnnnnnnnnnnnnnnnggataaggatattgcccccaatagcgatgttcagctagctaccgtctataccaaggcaaagtcttacattcctcagattgaacaagtttatcaaggcacaaatccaaatattcaagaggcaaaattattaggggagttattacaagttctagcagaagttcccaagggtacgcatttattttgcgaccccatacttgaaccaatatcaattttttccttaaccattttctcattcaatgaagaagctacggccacatggctgaagaatcattttaatccaattctctctgtttgtgataaatgcattctaaattttgcaagagggaagtgcaaaatgttacaacattttgccattcaaagacatgtgccgcatgaacatgtagccaagtttaatgacatcgtatgccaatggagggtggaggctgtttttcctattcttagaaatatttccgttaacgataatacgggaattaacattacaaatgaaattgaaactgcaatgtacgagtgtctctgtaatccgcatatgttgaggcttaacaagcaacttaaggctactttcgaagcaatcttcaaatttttctacgatacaaagcatcgtttgttggacgttacgaatccattaagcataaaaacctttatatcaggtgtcatattttgctggtgtgaaggttcaaaagaggaaaacgagtggtcacgagcttttctaaaggatttatactcaaaaaatttccatataaatctttctagcctgacaccggatattattgaggaagtttatatccatattttattcttacagaatccggcaaactggacagagattgtggtatctcaattctggtcgagattactaccggttttcaatttatttgataaagacgtcttcatagagtactttcaggtcccaaaaaatgtggagtctttaaaaaaaacattcaaatttccgttagagccaattttcaaaatgtggtacaatcacttaagcaaatcatatcatgataagccactagactttttgttaagaggactaacaatgttcttgaataaatttggctccgagttttggtccaaaattgaacccttcacattccatagcattttggatataattttcaatagagattcattcccaatcaaactaatcaaaattcaagacaatccaattgttgagcatcaaacagaagtttactttcaacttaccggttctgtaaccgatttactttcttggaccttaccattttatcatgcactgtcaccatccaaaagaattcaaatggttagaaaggtctcaatggcgttcctgcgtataatagccaattatccatccttaaaatccattcccaaagcatgtttaatgaattcagcaactgccttgttgagagcagtgttgactattaaggaaaatgaaagggcaatgctttataagaatgatgaatttgagacagtactattgactaaaacagattctagagctttgctcaacaatcctttgatccaagacataataattagatcagcttcgaatcctaacgacttttatcctgggctaggtgctgcttctgcatcggtgccacatccacgatga

SEQ ID NO: 80768 - DNA, 3669 bp, Saccharomyces pastorianus
atgatggtattggcagaatgtatcgattttgatatactgttattatgtcatcgaacgtttaagctttattcaggtaaaccaattagcgaaattccaatttcaaccaacgtcttggaaaatgttacaaataaaattgacctgagatcttttcatgacggtccattgctggccaaacagctgctagtatctttaaaaaacattaatggtcttttgatagtaccgtcaaatactgccgtagctgaggcacacaatgcattgaatcagaagtttttgctgctatcaacgagattaatggaaaaatttgcggatattttgcccggtcaactgtctaaaatccttgcggatgaagatgcatcgcagggtttttggtcctgcatattctcctctgataaacacttgtatcaagcagctactaatattttatacaatacatttgacgttgagggtagactggaaggtatcttagcgattctgaatagtaatttgaccgttaacttgaagaatataaacgtgatgctacaaaggttaatcaattgtgaattctatgagccttgcccccgtgctgttcgtgttttgatggacgtagtgagtgcatttgtagacccgatttctggtgtgtttgctaatttccaaactttgaagagccaaaataccgaaaaggaatttttaaaattctgggaatcatgttggttattcttggatacgatttataagtttactttgaaatgggcttctaaatatgactattctgaactggaaaatttcaccaaagatactttagacctaagtcgctctttggtggactcctttagagaattttcagatattcttcatgaccaaacgaaaaatttacttctcaacgttttagaaacctttaagaatatgttgtattggctgagattgagcgacgaagtacttttggaatcttgtgttagattaattataagcacgtctgatttagcacatgaaaagcatgtgaaagtggatgattccctggtagaaatgatggccaagtacgcctcgaaggcaaagagattttcaaataagttgacggagcaacaggcgagtgagattctacaaaaggctaaaatattcaataaagcactcacggaagaggtcgctacagaagctgaaaactacagaaaagaaaaggaattatcaagacttggaaaggtgatcgacttaacggattctgtgccggcgtcaccatccctctcgccctctctgtcttcaaccattgctagttcttctgctgaatccagggcagactatttacaaagaaaagctttatcttcttcaataactgggagaccaagagtagctcagcctaaaataacatcttttggtacgttccaatcatcagctaatgctaaactgcatcgtacaaaacctgttaagcctttatccaaaatggaattagctaggatgcaattattaaacaacagagttgttcatccacctagtgcgccagctttccatacgaagagtaggggtttgtctaacaaaaacgacgatagcagtagtgaggagagtgacaacgatatagaaagcgctcgggagctttttgctattgctaaggcaaaaggcaaaggaatacaaactgtcgatattaatggtaaggttgtcaagagacaaactgcggctgaattggctaaacaggagttggaacatatgagaaagagattaaatgttgatatgaaccctctatatgaaatcatattgcaatgggattacaccagaaatagtgaatatcctgatgatgagcctattggtaattattctgacgtaaaggatttcttcaactctcctgctgactaccaaaaagtcatgaagcctttactacttctagaatcttggcaaggtctatgttcttcacgtgatagagaggactataaacctttcagtattattgtaggaaatcgaactgctgtgtcagatttctatgatgtgtatgcctctgtcgctaaacaagtcatacaggattgtggtatttctgaatctgacttaattgtaatggcttatttacccgattttcgaccagacaaaaggttgtccagtgatgatttcaagaaagcacaacatacatgtttagcaaaggtgagaacattgaaaaataccaaaggtggtaatgttgatgtcacattacgaattcatagaaatcattctttcagtaaatttttgacactaagatcagagatatattgtgtgaaagttatgcaaatgacgactattgaaagagagtattcaacactggaagggctggaatactatgacttagttggccaaattctacaggctaaaccatcgcctcccgtaaatgtggatgcggcagaaattgaaacagttaagaaaagctataagctcaatacgtcgcaggctgaggccatcgttaattcggtatctaaggaaggtttttctttaattcagggtccacctggtacgggtaaaacaaagactatattgggtattattggttactttctgtctacaaagaatgcctcatcttcaaatgtcatcaaagtgccactagaaaagaactcatcgaatactgaacaactgttaaaaaagcaaaaaattctaatctgtgcccccagtaatgccgctgtggacgaaatctgcctcagactgaagagtggagtgtatgacaagcaggggcatcaatttaaacctcaattggtccgtgtaggtaggtcagacgttgtaaacgttgcaattaaggaccttactttagaagaacttgtggataaaaggataggtgaaaggaattacgaaatcagaacagatccggaactagaacgtaaatttaataatgctgtgactaaaagaagagaattgagaggaaaattagactctgagagtggtaatccagaaagtccaatgtcaaccgaagatatcagtaaattacaacttaagattagggagctaagtaaaataatcaatgaacttggccgtgatagggacgaaatgcgtgagaagaattccgtaaattataggaatagggatttggatagaaggaatgcacaggcccatatcttggcggttagtgacatcatatgttcgactttatctggttcagcccatgatgtactcgcaacaatgggtattaaatttgatacggtcattatagatgaagcatgtcaatgtaccgaactttcttcaattattcctctcaggtatggagggaagcgttgtattatggttggtgatcctaaccaactaccaccaactgttctttcaggtgcagcaagcaattttaaatacaaccagtcactgttcgttagaatggagaaaaatagctccccgtacttgctggatgttcaataccgtatgcatccttccatcagtaaattcccctcttctgaattttatcagggacgactaaaagacggccctggtatggatatcttgaacaaaagaccctggcaccagcttgagccattagctccctacaaattttttgacatcattagtggtaggcaagaacaaaatgcgaagactatgtcttatacaaatatggaggaaatacgtgttgccattgagttagttgactaccttttcagaaaattcgataataaaattgatttcacgggaaaaatcggtataatttcaccttatagagagcaaatgcaaaaaatgcgtaaagagttgcccgctattttggaggcatga

SEQ ID NO: 80769 - DNA, 1290 bp, Saccharomyces pastorianus
atgatcaacaaatcaatcgatttcaatacaatcgacggtttccaaggtcaagaaaaagaaatcatcttgatatcgtgtgtccgtgccgatgatacgaaatctagtgtcggtttcttaaaggactttcgtcgtatgaatgtggctctgactagagccaagacaagtatttgggttttgggacatcaaaggtctctggctaaaagcaagttatggagagatttgattgaagatgcaaaagatagaagttgtcttgcatatgcttgctcgggtttcctggatcccagaaataatagagctcaaagtattttaagaaagttcaatgtacccgtaccatcagagcaagaagatgattataagctacccatggaatatattacgcaaggccccgatgaggtaaaatccaataaggacacaaagaagagaagagttgtcgatgaaggtgaagaggcagataaagctgtaaagaaaaagaagaaagagaagaagaaggaaaagaaaaagtccaaggcagatgataagaaaaagaataacaagaaggcagaatcgcccagcacctcatctggtacaaagaaaaagtcatccatttttggtggaatgagtgtaccgagtgccgtagttcctaaaacttttcctgatgtggacagcaacaaaaaggcagcagcagttgttggtaaaaagaaaaataacaaacacgtttgtttttcggatgatgttagtttcataccaagaaatgacgaacctgaaattaaagtgaccagaagtttatcctctgtattgaaggaaaagcagttaggtttgaaggagacgagaacaatttctccgcctgaaatcagtaataatgaggatgatgatgacgaagatgattatacgccgtcaatctccgattcttcattaatgaaaagtgaagcaaatggtcgtaacaacagggtggcttctcataaccaaaatttcagtgctagtatatacgacgatccacaagtttcgcaagcaaagcagacgcaggtacctgctgctattacaaaacacagaagttcaaatagtgttttatccggtggttcttcgaggatcctgactgcttccgattacggtgaacccaatcaaaatggacagaatggagcaaataggacccactctcaacatgtgggtaatgcgaatcaatactcaacggctcctgtgggtacaggcgaactgcatgaaactctgcccgcccatccgcaagacagctatcctgctgaggcagaagatccatatgatttaaaccctcatccgcaaccacaatcttcagcattc

SEQ ID NO: 80770 - DNA, 150 bp, Saccharomyces pastorianus
atgtataaatcctttaatgtttttaaatcaagaggcattattataaaagaacgaagcaaagcctttaatatttgctttattaaaggtactattcaaagaaaagtttttttagattcttttttttttcacgtattagctcagctgccataa

SEQ ID NO: 80771 - DNA, 132 bp, Saccharomyces pastorianus
atgctgtctcatcaatatattgtgtgctcattgttccgtaaggattatcactataaaaattttccgcagatttcttttggactccacctttcttcctgttgtaataaatacaaactatttgaatcaatttga

SEQ ID NO: 80772 - DNA, 726 bp, Saccharomyces pastorianus
atgaatatcaaattgattcaaatagtttgtatttattacaacaggaagaaaggtggagtccaaaagaaatctgcggaaaatttttatagtgataatccttacggaacaatgagcacacaatatattgatgagacagcatttgttcaggctgagcaaggcaaaaccaatctaatgttctctgacgaaaagcaacaggcacgttttgagctcggtgtttccatggttatttataagtgggatgcgttggatgttgccgtagaaaacagttggggtggtccagactcagctgagaagagagactggattacagggattgtagtagaccttttcaaaaatgaaaaagttgttgacgccgctttgatcgaagaaacgttactttatgcaatgatagatgaatttgaaactaatgttgaagacgactcggctttaccgattgccgtagaggtcatcaacatatataacgactgtttcaatttaaattataataaggtagaaaaattgtatttggaatggcaagaaaagcagagaactaaaaaatcaaaaagagttgtgcatattgagggtgatgatgatgaagacgatgaagatgaagaggactatgatgacgaagatgaagatgaagagatggacgaggttgtacctgacttagtatcgtctaaacctgaaccaattgttgacgaagacggttttgaattggttcaaccaaagggaagaagaaagcactag

SEQ ID NO: 80773 - DNA, 114 bp, Saccharomyces pastorianus
atgaaaaattttgaaatagatatagatgaatatcaaattgattcaaatagtttgtatttattacaacaggaagaaaggtggagtccaaaagaaatctgcggaaaatttttatag

SEQ ID NO: 80774 - DNA, 3120 bp, Saccharomyces pastorianus
atgcatcatcagtggcatcttttagccaatagactgcttcttttacgtcttttggcagctttattttcttcggacttgtacacgagcggcggtaaacaggacataaacatgtttcttgtctactggtgtactcaaatgcctaaggacaaaagcattcaattcacttcctcgctattaaattgcacgatgcggtttatacttaacagtaataaagacttccagagcttgaaggctaattttttcagctccgacgccaccgcaagtaattggcagacgctttattttcaatttgtgcagtcttgtctgcacgttttaaatctctccatgtcatataaggcccaagacaatgtcattaccattttcctcacccaattacagcgagagtacgatttaaaattaattctttctagtttcattaaaattttcaaataccccatcgatctcgccatagaacaagaatcaaacatttttaacttcacaaacaataaacatattgatgccagcagaaggagagccgtgtcaacgagctctcacgataacagttcatcttcgcatgcttcgttgcctagttcatcatcggcggcataccatacgaaaccgcaaacaaagccacaattaccagagattcatcctttgttgatacctatgactattctcatgacaaacttgattgattgcaataagtgtttccaaaattattttgcagacaagtttgcaagtagattcatcattttttccatctactatttaaagtattatgattattcatcgttgtcgtcgtcttcatcaacaacacgctcgaattcttccaccacgagcaatggcacatctaacgatacgagcgacgagcgttctattgtggaactgaacgaaaatagcgtttcacagatcttgttacctttactcaatcatcttctgctgattttgacttcgaaaaaacttgttctcttcaaaatgctccagactttcaaccttaattattatacaaataatttgccaaatttttacaaactctccaacatcaacggcgatattaataatttgacgttcagagattttacaatcatacaattatcgaatttgattttagacaacattaaattcaatttacaaccgaatccgattttttatgaattgatttacaatctgctgccaattaatgacgaaattttgaccagttctcacaaaaatgatgattcacatgacgatttaattctattatcagcaaagaagaagtccgcatcaccaagtgcagccacctctagtcatacatcctcgtccaaactatcctacaatgctgcaatgtccctactttacgttctttctaagtcatcaaataaggtttatctgacaacttacgctacacctgtcttcaagacaaaagatataccgtatatgatctcaccgggtttcaaaatggatttgttggcgttattattaaggtcaatcacaatatttttcaccttatattttgacgatgcggaaaatctactctttgcaatggtgagacatcagtccatcactcaccaaataaatgactctataaattctatatccaaggccttagacatgaatccaaatttaaattcgcatatcatgaccttgaagcaaatgggattcaaccggaaagttcaatggaaggatttctatcaatttgaagagataacaggtttgcctcaagtcaatctttattcttcagcaaaccaacaacatcaaaatcagcaacaaggccaaaatgacaatcgaggccaaaaccaaaatgaggacccaggtcaagaaaacgaatctccaactccttatttgcttttcaatcctgcgtcattagaaaatgaaacatctgggacagtcaagcatttttcaagtacgaatcatgataagaactaccaagtcattgcattcattgatttcaagtcagattcaaatctgaatttgcaacatcaattagggtattggccacatagacctcaatggcctacaccactaacgtttactcacaaatgtaaaaatcccaaatatgaaaattttaatgaagtttggtccggtacagtttatttacaaattcttttgcgggttattaagcaaattttgtcgaaggttcctgaaattccgagaattaaatcggtgcaatatttcgaaactttatcgaaactttcggctcttagatctgatatattgaccacaattcatccccggttaccactggatgttcgacgattgacaacttttcagcctttgtctatgcatactaatgataagctgttgatgtggttccacattgccacatgggcaaatattttcacgcagacgtcgtttaaatacgaggaaactttttcgcatgaattgaggcaatttgaatctcttttggatattagtattgacgaatgtgaaagcaataccatttcaaagcctacaacagatcgtttgggatacatacgaagatcaagaggtcaatcttctgtaagcttagaaagaacaataagcgctggctcaggcgtaagtaccccaacaatggcattaaatagaacaaaaagtaacggaagtggcaacttgatgaattatttttttcagaacacagcgcaaaatcactttcagcatttaagatcgtcttcgtcttcgtcctccattactttagagaagactacttctaatagttcttcaataagaactagaccaaattctcatcatgttgctcctgagactaataacaataattccactaatggtaatagcaacaacagtagtaacggcggattttcatttttcaaatggaaatggggtggaaataacagtaatggtggcagtgatgataccaaggctagtcaaagagatccaaatgtcaacacgtcaatcattacagataatttgaatagttatatgtttgaagaagaaattagtcccggcgttgtaaacaacataattgaaaataacatttgggttggaaccgacatccgactatttaagatcgcaaacttcagaaaagaatctttttcatttctggaaatgacatcttcttttttcaagaaatttaaattcattaatagcgataatgacaattataataataacgaatttgatgataatacacagttaagatatacctctagagggttgtatagatag

SEQ ID NO: 80775 - DNA, 678 bp, Saccharomyces pastorianus
atgggaaatactgactccaaatccagttcgatcctgctgaaccactgcatcgctctggttcgaccggaggacgcatctgcgtcctccccttcacgtacgtcgtcgccctcgccctccctttcagttgatgctgatccgttgagtttaaacctgtcaatttttaagctggattctgggcctgacgttgaagcgttgttcagcgacaaaccaaatgtcccgctagataccgtcttcaacgatttttacttggacttcatatcagtggacgtgcaggacttcagcattaactctagttttaaaaaaatcctgcacattatctctagtttgaacccacccaacttcaacaacttgattgtcttcctttcgctctacattattctttccgcgaactccttgcccgcttcccgtacgggacttcattcttcgcggcttatcaacgccataaagaccctttccatcctcatacctatttattttgaccgggtcaagtctagcacgcaggaccactacgatgtcttttgggccacgcaacatgaaattgagggtcttcccttgcaaaacatcccactgggagaaagactactgttggcgatcttgaaactggctttccaagataatttcacaactgccgtgaccgcccacccaagcgaattcgtgggaaatcggcatcttgactaa

SEQ ID NO: 80776 - DNA, 288 bp, Saccharomyces pastorianus
gcaatcggcgtcgatcaagttctggggcaacttaaactacagcgtgttcatgactccaacgacctcatatccgaaatatcacatgaaccgatcacagacgtgggcgagtcgttcatcttattcactttcgaattcgaacctcatgccgttcaagaggcttgtgtcggcctccaagacctgagaaagtccccagataataaagtccctaaattagacgaactccccaccgtgagaaaatacttgaaacagctaattcatgcaagctccgtggagcaagcaactgcatga

SEQ ID NO: 80777 - DNA, 312 bp, Saccharomyces pastorianus
  modified_base (125)..(125): a, c, g, t, unknown, or other
atgatgaaggctttggccgatgagcattggttaacatgttatcaaatggggaagtttgtcgatccaaattggttggataatgcaattcccacagagataattgtattgcagatgagcatcttggnccgcttactggaggtttgcccccttgaggaagtcgaaattgttacatcgcaatggagcacactagaattggagctaagcgcccgtgacctgctgacagacaagtacgcactggacggacagaacgacaataagagtaaggtaggcggcattgctagggagattttccacaacgtgactaatttctga

SEQ ID NO: 80778 - DNA, 732 bp, Saccharomyces pastorianus
atggaatcccaacaattacatcaaaattcaccaaatcttcagttatttttcatgatatggtactactacataaagggaagatttatgaacgccctcaaagaaagggcacttgttcatatcaactctctattatcgctagttgttttcattgggggcctgataagtagcataagtcttgcctgggttaactacactattcagtctagaattaatacagaattagaggccttcgggttttcttaccatcttggagttacatggtttgcgcttctgtggtgttttgcaggtttgatttctgtgtcatacttagcttggtctggcttagaatggtgtatttccgataatggcacgtcctatggaggtggaatcgatgataaattcttaggctaccaagccggtttatttactgatgcagatctagacgatgaaacttcttacagtcaacgttatccgcaacgacagtctacttcgggcgaggctgaactaatgagaaacagtgatactatggcaacaataagaaaaacatctgatgttgacttaaatagtgaaaatgatgctaacaccagtttagaccatggaaatcacaccgcaaatataagcaatggcggcaaacacgaaccatttgctactagagaggaattcgaattgcaggacataagattccggtcaagcaacgacagtgaagaaagtatgcaaagggttatcaagccttcgtcagcattacagttttga

SEQ ID NO: 80779 - DNA, 2073 bp, Saccharomyces pastorianus
atgaagctggaaattaacatcattcacagatcaaccgtcatcagacagactttggaagaggacggagttgtcccaactacagcagatattatatataaggatgaaactgcctcagaaccacattttttgagatctaacgtggctatcattctgggaaaagcatcagttattggtcttttgcttctgatcaacctttatgttttcacagataagttaaatgctacaatactaaacacggtatattttgactctacaatttactcgttaccaaattttatcaattataaagatattggcaatctcagcaatcaagtgatcatttccgtgttgccaaaacaatattatactccgctgaaaaaataccatcagatcgaagattctgttctacttatcattgattccgttagcaatgctattcgggaccaatttatcagcaagttacttttttttgcatttgcagttagtatttccatcaatgtctacttactgaatgctgcaaaaattcacacaggatacatgaacttccaaccacaatcaaataagatcgatgatcttgttgttcagcaaaaatcagcaacgattgagttttcagaaactcgaagtatgcctgcttcttctggcctagaaactccagtgaccgcgaaagatataattatctctgaagaaatccagaataacgaatgcgtctatgctttgagttcccaggacgagcctatccgtcctttatcgaatttagtggaacttatggagaaagaacaattaaagaacatgaataatactgaggtttcgaatcttgtcgtcaacggtaaactgccattatattccttagagaaaaaattagaggacacaactcgtgcagttttagttaggagaaaggcactttcaactttggctgaatcgccaattttagtttccgaaaaattgcccttcagaaattatgattatgatcgcgtttttggagcttgctgtgaaaatgtcatcggctatatgccaataccagttggtgtaattggtccattaattattgatggaacatcttatcacataccaatggcaaccacggaaggttgtttagtggcttcagctatgcgtggttgcaaagccatcaatgctggtggtggtgcaacaactgttttaaccaaagatggtatgactagaggcccagtcgttcgtttccctactttagtaagatctggtgcctgcaagatatggttagactcggaagagggacaaaattcaattaaaaaagcttttaattctacatcaaggtttgcacgtttgcaacatattcaaacctgtctagcaggcgatttgctttttatgagatttcggacaactaccggtgacgcaatgggtatgaacatgatatcgaaaggtgtcgaatactctttgaaacaaatggtagaagaatatggttgggaagatatggaagttgtctccgtatctggtaactattgtactgataagaaacctgccgcaatcaattggattgaaggtcgtggtaaaagtgtcgtagctgaagctactattcctggtgatgtcgtaaaaagtgttttaaagagcgatgtttccgctttagttgaattaaatatatccaagaacttggttggatccgcaatggctggatctgttggtggtttcaacgcgcacgcagctaatttggtcactgcacttttcttggcattaggccaagatcctgcgcagaacgtcgaaagttccaactgtataactttgatgaaggaagttgatggtgatttaaggatctctgtttccatgccatctattgaagttggtacgattggcgggggtactgttctggagcctcagggcgccatgcttgatcttctcggcgttcgtggtcctcaccccactgaacctggagcaaatgctaggcaattagctagaataatcgcgtgtgctgtcttggctggtgaactgtctctgtgctccgcacttgctgccggtcacctggtacaaagccatatgactcacaaccgtaaaacaaacaaagccaatgaactgccacaaccaagtaacaaagggcccccctgtaaaacctcagcattattataa

SEQ ID NO: 80780 - DNA, 3126 bp, Saccharomyces pastorianus
atgatcgcgccgcgccacaagcagaatgacaaagcgcgcactgggaggatgaatgtcgaacatgattcatatgctggctttagaagtgactttatacatatgtctttcgggctatcatctaactcaaactccgcatataacgctatgcaactaagtcccaacgggttcaaggcattctttgtttggtggaaatcattttcaggaaactttcccgtaaggagagggccattatttggtctccaaagtatcagtcctaaatttggtgaacatttatataccatttcttaccacgcagatgtctcaccattattcattaattacatgtaccacaacgctgatgccgatcaaattttgcgtaaaaactacttagaagttgccgaatttgctggtttaaaggctaaatcttctcattttattatggatcttcatcaaaggaaggaagtattgactgaatatcaagccggcttgaacgtcagaaggagagttatgaaattaaaatttctggctggtgatgttgtatgccaggacgtggacatccggactgtaagtggtgagttcagtaaattaaactacattgaagagaaagaggatgctgaatatgatatttttgataatgatatgtcgtggcttgatataacagattttcaagatgcatttttcattaaccctgataattatcttccaaaaattaagattatgccatttgccttttctcctcagttcgcttatcaaaaaagagctagttatggtgacaaataccaagttgatccgaaaacatgcaagccaataacgccgtttgataatcgtgtctcccatggctgtacactagggcacaatgtttctttacgtactgacctagttgagaaacgtgttacagttttgaagaagtttcgagagaaattgcaggagggtattagaaaaaacaaatcagccggtgtatcagaggagaatttgaatgatttactctcaaaagcaaattctagtgtggaaaatgcagaattactactgaaagacttccagaagatatttaaacaacatgaagccggacaaacagaacagcctttccatttcgactctttaaatctattgaaaaacaccaaaaagaccctgaaacaatttgaacatagattttttatttttaacgtactgttgaaatggaacgaggacgcaagaagtgctattttcaaatttttttactatgctaacctatccaatgaatttgcttctttagcaagtggcaagggcctaagggaatttgaagatgtaataaagcaaagagaaatgactgatgatacaacgagtatggaagcgataccagaaggaacagacaaagcaaacaccgctaaacaatgtcatagctgcgatgatacagagttcaccactgagaaccttttgaatatatttgaaaaaaatattacacaactgtcttgtgacatcaaaaataagatacaccataagttttttgtccaatttataactccacaaattcagttgacatccctggaaaatacagaagcttgtgttttggtttcttcacccttttttatgctaaagacattggaatttgatgcaaacactaccagtaacacgtatatgcaagatatttttttgaaaagacatggcattctattcggaaacgccaatgcctttttatttaataaaaaggattaccaagagttttttgaactatatttcggctccagctcatatggccaagataaaaaagaacagtggccaccatggctaggcttggagttaggattcgaaccttctgcattaaaaaagaaagcagtggttaggaatatttctgctctgcttcatcatcagaaattagcaccgttttctgctaaatatgactccttaaaagataaaatagaagataatatttgcggatacgttcctcaagttaacgtacaagtgaattctgacgagtacctaatgctgacgaagatggccttgaaattattcctttatgtagaacccgaagatgaagaattgaagaaatatattgaaaaactaattattggttacgatatctatgatacagcccaaactagaaaattcgtaaatgatttacacgatagtgaacaaattctagctgttgttgaaaaggagcttttattcaaaagaagcctattggacgacattggaaaactcgatctatccaatattcacaacgaacgcatgcatcagttgttgaggttgtatatcttaaggaaggttttcacttcaaatggaaacaattacattaataggactttagtatggaatatcaaggttaatgaaactatcttgcatttattagacaaaattgacaaaccatttttagatattgccgttgcaaagctaaactttcatagaatccaacacacgatgggattaaggaagaacactgtaaccgtaaaaatgatgcaaatatttgacttaggcgaaaatgttaattatcattgtattttagggcctttgataacatcaagtggtaatgacacagtcggtttggcgagtgatgttccgttagttcaaataacttgggatgttgataagcctgtaggtggtattaaggttgttaaaaacgttgagaccactttgtcgagtttgacgataaaattagaagaggacagactaaataaactttttgagtggttatcgttaaaggagttaatttacgatggaaacggagatgaggatgatggagcttccagtatttttgatatggtgtcatcagaatcagaggaaggaaaaattgagttttcagaagatattagttctgatttcaatgaaatgttaaagagatcaagtgattatatgatcgttgaagatcttaaattgaacagcttcaaactttgtatcagttataagggcaaaggaaagatgagattggctaacgttactaactttgttttcaatttcccgactttaagattgtccaaccaaactttgagggtcacagatctattacttgcccttaaaaaagtgttaatcaaggttttaataaaacatactgggagatttattggtaataaattgaaaagaaactctaaggagaataaaattgctgacgatacttcaccactgaagcaactcacaacttataattcctacacggagcctgaagaacttcgttaa

SEQ ID NO: 80781 - DNA, 81 bp, Saccharomyces pastorianus
atgatgtttccgattaatgttctactgtacaagtggcttatatttgcagtgactttcttatggagatgtaaattttactaa

SEQ ID NO: 80782 - DNA, 1305 bp, Saccharomyces pastorianus
atgaatcctctgaaggatggacttcaagtaggattagatttaaaactaggtgatttaaatattcccatgaatttattgaatttgtttatcaacaaggagaacgttgatttgatgtccaatgaaaaacttctacaaagattggcagatacaacaaaggcgaataaagagctaaaggatgaagatatcgctaagatgaaagatgatctcgtgtatgcaatggaaaaatttgtagatcggataaagccattgaaagaaatgaacgtcaccattgataaacttcaaatcaaagattttccactcaccaatcatccagaactgcttggaatgaacaaatatatcagttataatgttttggtttctaatataaacttcaataccaacaggttcagaaatgagatgccaggttatacgttaatttttgaggagcgtgattctcccttcaagtttagtattataatggcaagatttaatatatatttgaatctaaatcgaaaacatcaaagccacgccaaacagttgaaaattattgaaattccaaatgtttcgatatttggcgaaaccaatttgttctctcaaaaatttcgtctttctaataacctacacgcaaaggaactagagaacgctatttttaacatcaaaggtaatatatcctccttaactattgacatggatccagtaaatatttcctttatcaaatgcttcctatcaaacattaaagtctttacgtcctcttgtccgaaaaacaagattttaaaggaaaattctcatgtaaagttcttaacaaggcgtagagtcctatttgactattttaagtgttttttgcctctaatcaatatgaaattcaccctggatgatcccaaatttgttatcaatgataaagacgatctgatcataggcaagttttctgtcttcatgataagccatcactctaaaagatatacattgggtaacaatcttatggaagaaaaagaagagacgcaacacattttttatgaaagccattggaatgttgaattactagatatgaaattacagcatattataaaacatcaaaaatacgagcatacaatactaagggtggacagcattgccatagaagaaaaagttcaacttttaccggatatattatgttctgcaaacgctgatatcgacacgctaatgctagatttatctgaacttccaacaatggttatgttgagtgaattagtgcacaacttagatagtcagttggcaaatgtcgaagagaattatttcaaagagtgctatgaaaagttcgcatctaatttacaaaatatgacagctgaa

SEQ ID NO: 80783 - DNA, 2760 bp, Saccharomyces pastorianus
  modified_base (2094)..(2094): a, c, g, t, unknown, or other
atggttaggtctggtcagctcacaaattttagtaaagataataaacagaatcctaaccataagtccagtattgccgatttagacgatatatcgactagtgatgcgacagaggtaaatcatctttggaacatcaacttactagtaaatgatataactacgtcagtaatcggagagacacccgaagtgagcgaagaattgtccactaaaactgtttccaaagtttctaatttatcaattaagctatttccagacactgagtcatttagtagcaatgaaagcgattcgaagataattttgcaaataaatcactccagaggaacatcggtagtatcactgatgagtatctttttggccgtctcaggaatacacacattgaaccaaatatttggacattgtatacaccaaaagatgcgacagtctaaaactaaacaatactttcttgccctctcagaatccaaaaaaaaatcatgtatcaaaagtataaaatggggccaactaaaggagttactcgaaataaatttctcttctgaatatatcagccaaataatcgcactcccaaatggccttagaacaaaatttgaaccaacttcgacatttatcacagtcaaaaactgtaatacaatttcagtttcaggtcagtacttcagaatgatggtagaatctccaacgcagccaaacttttgggagagaatgatctgtatcaatggatttaaagtaatgatacacattgatttattaaaacagcaaatgaaaaagttaaactctttacagaattgggaaaaattaccatccgccataaccttagaaaatgattcatggcacttttccataccgcatcatttcgagatgtttaaaataatagattctattccaactatatttaagagtattaaacaaatgttatattcgttgaaaacatcaaaagacgatttgataattttcccccacaaaatagagactcctttatcactgccaaagattaaactgaaatctaaaaggtggttatttagcatttctgatgatccactagaggcagaattgaatactatctttcagatcggtttacaagaacaacgggagagacttgcgaaattacaggaattcaataaacgcatctctgaagatttgattaaaagtcaaaagaacgctaaagaaatgaaggacgacttcgaggcaattgataacgcaatactaaagcaccgtacaggattgtgggcaaaggatgggaaaaaaagattgggtaaatccgcaacagattctgaaatacctcttaccccagcagctttgaacattaatggaaagcgtgatgacaggcctgatagaacgcagtttatttctcccgagattgaaaatgcgtacaatactttattagcgaacttctccgattcatggattaaaagggtgaaagaatataaagttaaagaacgtcgtgagttcgataagaacttttctttcttatggggtttcattgattatactaagctccccaaagatattaacaaaaaagttttacctttctcaacaaatccttttttaatgaatttgataattgagaatatcgatattgatataataaggccttcatgtggcattgaaaatattccaaacttcattcacgatgttggaaaaggcgttccgaagaatacagaatattcgattatgattccgatgcatttagatgcgaaatttagtgaagtaagatggcatttgagagattatcccctgccttttgttagtatacctccactaagctctacacaaagtaaagaaacaatacctatgagaatttatggggattttatgataacagaggatatgcttcaatccgacagagagcttagaactttatttgttcctttaataccatcggtaactgttgaaaatacagatagatattactcgttgttcgtgcccagaacaatgactagcgctaagatattcaccgatctaaattttgaaataaactctaaccatacaacacgagtaacttggggtggttcttatcaaccagccattcaacaaacaatgcaatgtttggataacttttcaaagcctccattagatccttctgttaaactagggttttgggataanacaagatatcttttccatggaaagatcaatatagtttggaaaaagaggggaaaattcgaaatttcccttaaaggcgcaaaaagtccctatatgcttggcggcgaatcagctggtttcatagttggttttgatggtaatgttaacttaaaatgtaacgaagataatgatcccaaaaaatttttatcctgcagcgcagacaaggtccatttcagcattcccaattattttgcaaagccgttactggtatggtctagacctagtaccaatacaatgttcattccaaaccaggacgatacgaacatgcagagatatgcttcattttactatttattgaacactacatcaagtaaaaacgaaaaagcagacaaggaaattatgggaaaatcgttcattgaaaagacaggaattaaactatctgggggtatgacactggatatgggtattctcttcgaaaggttggggcctagtttgaatgagagaacttttgagtccaaaaagcattatttgactcgtctatgtaacccaatttacgttcaagatccctctcaaaacatagatatcatatgcatggctattagaaacgtgacatttatttacatagtgtcttttcagggcatatacatcataacgtcaagactcacgcatattaacgcgtatgcaacttaa

SEQ ID NO: 80784 - DNA, 312 bp, Saccharomyces pastorianus
atgttgatagtctgtggtgctataagtgcctataatgatccatctaaatttgtctttaaggggtatagctttattctgactaaacgattggtcgttaaaggagtactagtgacagataatattgatgattttccaaaggcattagataaattgggttctctggttaagcatggtaagattgacctcttgaaatccgctacccttgaagatggtaccggtgataagttcaagaatgttccattgatatggaagggtctatttagcggtgttaataaaggtaaacttattaccaaggttaacaatgaggagtga

SEQ ID NO: 80785 - DNA, 735 bp, Saccharomyces pastorianus
  modified_base (713)..(713): a, c, g, t, unknown, or other
atggtattggctaaacaatgggttttgaaaaacctaccaactcctggtgaaccatttaactttcattttcacgatcctgcatgtactttcgagctcattgaaaaggaactctcttcagaacaattaaaggacggtgaattactactggaaacaacttatttatctaatgatcctgcccaaaaattttggatatcatcaatggacaaaaattacgccaaaggtgtccagcctggtgaaattattcctgcaagaggaattggtaaagtcttggcctctagaaataaagcattctctcctggcgattatgtctctgcagtgaccggctggactacacatgccataatttcgcaagaaaatgttcaagggctgagaaagcttgacaagaacaaagttggtaaattatggtggtatctctctgtcttaggtggtacgtctttaacagcttattttattttctttacttatgctcaattgcaagaaagagaagaggactatggaaaagtttacctaatctccggtgcagctggtgccgtcggtaccgtttgcattcagctggccctaaacgtttttaaggcttcaaaggttatcgctatcgcaggtggaccagaaaaggttgcttttgttgaatcctttggtgataatgtagtcggtgttgattataaagatccaagtttcaagcagaaacttatggtggccgcttgggttgaaatccnctgttggtgcactaattgttag

SEQ ID NO: 80786 - DNA, 1386 bp, Saccharomyces pastorianus
atggggagtgatttttgtgtcttcttcttcggaggattgctggaacttttgttatttttcttttttacaacagttggtcaagcaggttgtcaaataggtaatgcatgctgggaattgtactccctagagcatggcatcaaggaagacggccatttggaggatggcttgtcaaaacctaagggaggtgaagaaggattttctacattcttccatgaaacggggtacggaaaattcgtcccaagagcaatctacgtggatttagagcccaatgttatcgatgaagtacgtacaggacgtttcaaggagcttttccatccagaacaattgattaacggtaaggaagatgccgccaataactacgcaagaggccattatacagtgggtagagaaatagtggatgaagttgaagaaagaattagaaagatggccgaccaatgtgacggtttacaagggttcttgttcacccactccctcggtggtggaactggttctggtttaggttccctgttattagaaaacttatcgtatgaatacgggaagaaatccaaattggaattcgccgtttatcctgcgcctcaattgtctacttccgtcgtggaaccttacaacacggttttaaccacgcataccaccctggaacacgcagactgtacgtttatggtcgataacgaagccatttacgatatatgcaagaggaacttgggaatttctagaccaagcttcagcaacttgaacgggttgattgcccaagtgatatcatctgttacagcctctttgaggttcgatggttcattaaacgtggatttgaacgaatttcagaccaacttggtaccatatccaagaattcatttccctttggtttcctacgcacccatcttgtccaagaagagggccacccatgaatccaactccgtgtcagaaatcacaaacgcttgtttcgaaccgggcaatcaaatggttaagtgtgacccaacaaaggggaagtacatggctaactgtttgttatacagaggtgacgtggtgaccagagatgtccaaagagccgtcgaacaggtgaagaataaaaaaacagtacaaatggtggattggtgtccaacaggatttaagattggtatttgttatgagccaccaagtgtgataccaagttccgaattagccaatgtggatagagctgtctgcatgctatccaacaccactgccatcgcggacgcttggaagagaatcgatcagaaattcgacctgatgtatgccaaacgtgctttcgtccattggtatgtcggtgaaggtatggaagaaggtgagttcaccgaagctagagaagatttagctgccttagaaagagattatattgaagtgggtgccgattcttacgctgaggagttctaa

SEQ ID NO: 80787 - DNA, 1797 bp, Saccharomyces pastorianus
  modified_base (53)..(87): a, c, g, t, unknown, or other
atgtcagggtcatttaccaacgaaagtcttcatttgaacggcaatcacactgnnnnnnnnnnnnnnnnnnnnnnnnnnnnnnnnnnngaaactggacttaccataccagagagatcttctctaaggaggtctaaattcaacacatataagatcagactagagggtagtagccttccacaggcggtaaaactcaatagcctaatgaatatacaaactaatgacaattgcagaagtgcatcatcgcctgcctcatacacacaagtgcctcaggagcaagcatcattgaatgattttcacgagattttcgaccattacagaagaacaagtactgattggagtaccgaaaatgagaaatacgttgatagcaccaactactactcggatgaagaagatttgacgcatgcatctatttctcaagagagcagtcttttatctacagatagttctaacaacagcgttttaataaagccgcataacactggttcgatgatttctgaaaaattggatcagcacgttagctcgagtgaaaaatcaaataccaataacagcgaaccaaatcatggctggtcatggttgaattctagcaatggaagtttgaacggtaatgaacaaacttatcaacagcttacagatgatgaagacgatgaagaatgtgtgaacaatgaaaaagctgactttgttaacttgagtgtatcgaggagagcgaaatctaccaaacgtgcctctgaaagaataaaccattccaaaaatagacattcgccaattttccagatacattctgaagaagcaaaatccgtggtaatcactccttcagtcgtttcttcgtctgaatcccagccatctaagcctactgcaccagcagccgtggagaaaaaggtagaactgcctactgacacccaagccagtacacataagaaaaattccttggagaaaaggcttgccaaattattcaaaagaaaacaacatagtggtacctgcaaatcagatgtgaaagtaatcaaaaaaagtgttaaaaaagaactgaaaaagaaggcttcgcattcgagtttatcaaaattcaggaaaagtcccaagaaaaagccccaagaagcggaagtgaactgtgaacgcccttcatcccccaccaaaacaattaccgaagatatagatacagaaagcgtcattgaaccggaagtgagaagttcaaatgcttccacccttcttcctgacagccatactagccacagttctgaatttgtggtggaaactataagcgagttagacggcgacgattcatttgatattagtggtggtgatgtaaactacgacgtggaagtgcattctagtatcagtagagatacgacagctggactagaagaggatataggagcagagagagaagacaacacttcacctactgcccctcaaatctcaactttgcctccaagaaaattgacatttgaagatgtcgttaaaccagattacccaaacgctccaataaaattcacagacagtgcttttggattcccattaccaatgatcaccaactctacagtgattatgtttgaccatcgtctaggaattaatgttgaaagggctatttacagactcagccatctgaagcttagcgatcccgggagggaattaagacaacaagtattgctaagtaacttcatgtactcctacttgaatttagtcaatcataccttatacatggagcaggtgggcactggagatatagccttcaatggtgattctgccttgggaatgatggacaaaaatgattctgatggcacaatcttaattccagacatttaa

SEQ ID NO: 80788 - DNA, 1308 bp, Saccharomyces pastorianus
  modified_base (1088)..(1122): a, c, g, t, unknown, or other
  modified_base (1259)..(1259): a, c, g, t, unknown, or other
atggtactgatggaagatgtgcaaaacaaagatggccataatactgtagaaaacagtagtggtggtacggacagtaataataatattcaaatgaggcgaatgaggaagacgcagctgtccaagaaggagctttttgagaagaggaaatctgacgtgttaattgctgccaagtctttagatactgaaattcagaatgtgaaaaatttgaagcgattgtcgattggttcaatggatttggtaattgaccctgagctagagttcaaaatgaacagtagaaactcatattcttcagattcctcaaaggaatccctacaagaatcgctccatgaagagaacattatacgatcagaacaaaaggaagaacaagggagcgaagacaatgatgcatatgaagagggcgatgctactaatgtcgacgacagtatagatatcactcaaacagagtatttgcatgatgaagaaacattggagaaggaaaaaatcatccgtaatgcttcttcatccacttcatcttcagcaagagtaacgtcgaggaacagaaggctcagtggagtaaagacattggctcacgatgttgtattggatgtggagaacgaccacgattcaaaaatggttgatttaactcaaaaccttttgtgggtgcccgctgaccaacatcctaacgttaagcccgaaaactatttggaattgatccaagacactttacaaaacattcaaataagcacaaatcaagacattgatgaaaacaaattagaactgggtaacaatcatgtaatttcgaatagaaaacgcacgggctctgtagttagaaggccttctcggttgaagacatcttataccaaatttgatgacgagcctccccttgcagacaaaccacaagaaggagaaatacaagtggataagcgaatatcctcatctgacatcaaaaccataagatctgtatctttgaaagaaattactgaagagcttactaagatttccaataatgccggtttaacggactcagatgcggtgactttagccagaagcttgagcatgtcagggtcatttaccaacgaaagtcttcatttgaacggcaatcacactgnnnnnnnnnnnnnnnnnnnnnnnnnnnnnnnnnnngaaactggacttaccataccagagagatcttctctaaggaggtctaaattcaacacatataagatcagactagagggtagtagccttccacaggcggtaaaactcaatagcctaatgaatatacaaactaatgacanttgcagaagtgcatcatcgcctgcctcatacacacagtgcctcagagca

SEQ ID NO: 80789 - DNA, 378 bp, Saccharomyces pastorianus
atggctaagggcaagttcacagaatgtattgatgatattaaaacagtctcccaagcaggaaatgaagggcaaaaactactggttccagcatctgcatcattatacatcccaggtaagattgtagacaataagaaattcatggtcgacattggtacaggatattacgttgaaaagagcgctgaagcagcaatcgcattttaccaaaagaaagtagacaagcttaacaaagaatctgtacagatccaagatattattaaggaaaagacccagtattccttgtccatcgaggcccaaataagacaagccgctattagacagcatgaagcgatgagtaaacaacaacagcagcaacaaaaaaaggagtcgtctacagcctag

SEQ ID NO: 80790 - DNA, 777 bp, Saccharomyces pastorianus
atgatagacccgacacgatatatctttaacgttagaccatctttttcatcccagacgcgtaaatatgggtacaaattagattaccgccttgcacggtcatgtaataacaaggttgtcacctacatatgggtatcaagagctacgaatggtgtagtaattgccacagaaaagaagtcgtcctcgccactggccatgtcagaaacactttcgaaggtatccttactaacaccggacattggtgcagtatattccggtatggggcctgattatagagttttagtggataaatcaagaaaggtagcacatactagttataaacgaatttatggtgaataccctcccaccaaattactggtttctgaagtagccaaaataatgcaagaggctacacagtccggtggtgtcagaccctttggtgtttcactgttgattgctggccacgacgaatttaatgggtttagtttatatcaagtggatccttccggttcctacttcccttggaaagccaccgctataggaaaaggttctgtggcggcaaaaacgtttttagagaaaagatggaatgatgaactggaactagaagacgccattcatattgccttactaacgctgaaggagtcggtagagggcgaattcaatggtgacaccattgaactggctattattggcgatgagaaccctgacttgctaggctacactggtattccaaccgataaaggccctagatttagaaaattaacttctcaagaaataaatgatagattagaagcattatga

SEQ ID NO: 80791 - DNA, 387 bp, Saccharomyces pastorianus
atgaaatcacatttttttaagattttaaggcctttcttgccgcatcatactgatattaggtcaacacttgctactatgaatgcaaaagccacgtgggaagaatgggaggaacaagtagtgaagcctgtcgaaaaagtagtgcaagaaatatttgaacagccagatatcgatattaaggatgaaattactatcggcgaaaagcaatcatggggtggttcatatagaactgttccatactggagatgtcaaccatattttaggcctgttaacggtatcacaggtgataaaagagttatgcaaggcctcatagatgaaagcgtgaacaagaaacgtaaagctgacgtgccattagaatctgctgataaaaagaaggacgtgaaagcttaa

SEQ ID NO: 80792 - DNA, 819 bp, Saccharomyces pastorianus
atgactgaacctgccctgagtagcgctaataacgctctgatgcaaaaactaacaggtcgacaactttttgacaagatcggccgtcctactaggatcgttgcaccaatggtagaccaatccgaattagcatggcgtattctatcgagaagatacggtgcaaccttggcgtacactcccatgttacatgcaaaattatttgctacctcgaagaaatatagagaagataattggtcttccttagacggctctagcgtagataggccgttggttgtacagttctgcgctaatgacccagagtatctattggcggcagctaaactggtggaagataaatgcgatgcggtagatttgaatttgggctgtcctcaaggcatagctaagaaaggtcactatgggtcatttttgatggaagaatgggaccttatacacaatttaatcaacaccttgcacaaaaatttgaaagttccagttacagcaaaaatacgtatatttgacgactgtgaaaagagtttgaattacgccaagatggtgctggatgctggagctcaatttttaaccgtccatgggagagtaagagagcaaaaaggacaaaaaactggtttagctaactgggaaacaatcaaatacctaagagataatttacctaaagaaaccgtgttttttgctaacgggaatatcttatatcctgaagatatttcacgttgtatggaacatatcggtgctgacgcagtgatgagtgctgaggggaacttatacaatcctggtgttttctcatgtagtcctagaataagaacaaggagaagatatttccacgcgtag

SEQ ID NO: 80793 - DNA, 285 bp, Saccharomyces pastorianus
atgacatacggatatatctacaggaagtatagagtccacacatactgtacagcgtcagggctatggtttgttctattgtccgactttaaacagcagtcttacactcaggttttacagtatatttacagccatatttatgtcaaatacgtgagcaacaacttattatcaccgtacgatttcgctgaaaacgaaaatgaaatgagaggtcaagggacaagaaagatcaccaatagaaactttatatccgttctcgagtcatttctagcaccaatggttaatcagtga

SEQ ID NO: 80794 - DNA, 105 bp, Saccharomyces pastorianus
atgacccacaacaggaaacctgctgaaccaacaaaacctaacaatttggacgccactgatataaatcgtttgaaagatgggtccgtcacctgcattaaatcctaa

SEQ ID NO: 80795 - DNA, 2442 bp, Saccharomyces pastorianus
atgccgctgctattcaagggactgaaacagatggcaaagccaattgcctatgtttcaagattttcagcgaaacgaccaattcatataatacttttttctctaatcatatccgcattcgcttatctatccgtcattcagtattacttcaatggttggcaactagattcaaatagtgtttttgaaactgctccaaataaagactccaacactctatttcaagaatgttcccattactacagagattcctctctagatggttgggtatcaatcaccgcgcatgaagctagtgagttaccagccccacaccattactatctattaaacctgaacttcaatagtcctaatgaaactgactccattccagaactagctaacacggtttttgagaaagataatacaaaatatattctgcaagaagatctcagtgtttccaaagaaatttcttctactgatggaacgaaatggaggttaagaagtgacagaaaaagtcttttcgacgtaaagacgttagcatattctctctacgatgtattttcagaaaatgtaacccaagcagacccgtttgacgtccttattatggttactgcctacctaatgatgttctacaccatattcggcctcttcaatgacatgaggaagaccgggtcaaatttttggttgagcgcctctacagtggtcaattctgcatcatcacttttcttagcattgtatgtcacccaatgtattctaggcaaagaagtttccgcattaactctttttgaaggtttgcctttcattgtagttgttgttggtttcaagcacaaaatcaagattgcccagtatgccctggagaaatttgaaagagtcggtttatctaaaaggattactaccgatgaaatcgtttttgaatccgtgagcgaagagggtggtcgtttgattcaagaccatttgctttgtatttttgcctttatcggatgctctatgtatgctcaccaattgaagactttgacaaacttctgcatattatcagcatttatcctaatttttgaattgattttaactcctacattttattctgctatcttagcgcttagactggaaatgaatgttatccacagatctactattatcaagcaaacattagaagaagacggtgttgttccatctacagcaagaatcatttctaaagcagaaaagaaatccgtatcttctttcttaaatctcagtgtggttgtcattatcatgaaactctctgtcatactgttgttcgtcttcatcaacttttataactttggtgcaaattgggtcaatgatgccttcaattcattgtacttcgataaggaacgtgtttctctaccagattttattacctcgaatgcctctgaaaactttaaagagcaagctattgttagtgtcacgccattattatattacaaacccattaagtcctaccaacgcattgaggatatggttcttctattgcttcgtaatgtcagtgttgccattcgtgataggttcgtcagtaaattagttctttccgccttagtatgcagtgctgtcatcaatgtgtatttattaaatgctgctagaattcataccagttatactgcagaccaattggtgaagactgaagtcaccaagaagtcttttactgctcctgtacaaaaggcttctacaccagttttaaccaataaaacagtcatttctggatcgaaagtcaaaagtttatcatctgcgcaatcgagctcatcaggaccttcatcatctagtgaggaagatgattcccgcgatattgaaagcttggataagaaaatacgtcctttagaagaattagaagcattattaagtagtggtaatacaaaacaattgaagaacaaagaggtcgctgccttggttattcacggtaagttacctttgtacgctttggagaaaaaattaggtgatactacgagagcggttgcggtacgtaggaaggctctttcaattttggcagaagctcctgtattagcatctgatcgtttaccatataaaaattatgactacgaccgcgtatttggcgcttgttgtgaaaatgttataggttacatgcctttgcccgttggtgttataggccccttggttatcgatggtacatcttatcatataccaatggcaactacagagggttgtttggtagcttctgccatgcgtggctgtaaggcaatcaatgctggcggtggtgcaacaactgttttaactaaggatggtatgacaagaggcccagtagtccgtttcccaactttgaaaagatctggtgcctgtaagatatggttagactcagaagagggacaaaacgcaattaaaaaagcttttaactctacatcaagatttgcacgtctgcaacatattcaaacttgtctagcaggagatttactcttcatgagatttagaacaactactggtgacgcaatgggtatgaattga

SEQ ID NO: 80796 - DNA, 657 bp, Saccharomyces pastorianus
atgaggatgaaattatttggcgacgacatggacgacttggatgacgaagaggaagaagaagttcgtattgaagaagtccaagaagaagatgaagaagataatgatggagaagaagaacaagaagaagaagaagaagaagaacaaaaagaagaagttaagccagaacctaagaaaagcaaaaaggaaaaaaagagaaagcacgaagagaaagaagaagaaaagaaagctaaaaaagtaaagaaggtcgaattcaagaaggacttagaggagggtccaacaaaacccaaaagcaaaaaggaacaagataagcataaaccaaagagtaaggttttggaaggcggcatagtaatcgaagaccgtactatcggtgatggcccacaggctaagagaggtgccagagtaggcatgaggtacattggtaagttaaagaacggtaaagttttcgacaagaacaccagcggtaaaccatttgcattcaaacttggccgtggtgaagttatcaaaggctgggacattggtgttgccggtatgtctgttggtggcgaacgtagaatcatcattccagcaccatatgcctacgggaagcaagctctgccaggtattcctgccaattccgaactgacattcgacgttaaattggtttctatgaaaaactag

SEQ ID NO: 80797 - DNA, 624 bp, Saccharomyces pastorianus
atgtctgatttgttaccactagctacctacagtttgaatgttgaaccttataccccggttccagcaatcgacgtcacgatgcccatcaccgttcgtattactatggctgctttgaacccggaagccatcgatgaagagaacaaaccatcgactttaagaattatcaaaagaaacccggactttgaagatgatgattttttaggtggtgattttgatgaagacgaaatagacgaagaatcctctgaggaagaagaagaggaaaaaacccaaaagaaaaagaagagtaaaggcaagaaggctgaaagtgaaagtgaggatgatgaagaagacgatgacgaggacgatgagttccaagaatccgtccttttgactttatctccggaagcccaataccaacaatctttggacttgaccattactccagaagaagaagtccaattcattgtcactggttcttacgctatctccttgagcggtaactatgttaagcatccatttgatactccaatgggagtcgaaggtgaagacgaagatgaagacgctgacatctatgacagtgaagactacgacttgaccccagatgaggatgaaattatttggcgacgacatggacgacttggatga

SEQ ID NO: 80798 - DNA, 855 bp, Saccharomyces pastorianus
atggatatatacgtcaacacgaaatgtgattggttgcaaatcaacgtcagagaccaaacaatggatcggaaacatgtattagaggaattgcaattggaagagatgccattctttattccttatgacacaaaagtcaatgatatcaatgaaattattacgccggaattggatgaaatcttaggggaagctatcccagcagaatttagagaaaaactagatactaggtcattttttgatgaaagtgatcctaacaaggcacatcttccggaattcaatgggtgccatgtatttgggtccattccggtaaatagagttagtggcgaattgcagattacagcgaagagtttaggttacgtggcttcacgcaaagcaccactggaagaattaaaatttaatcatgttattaatgagttctcttttggtgatttctatccatatattgataacccattggataacactgcacagtttaatcaggatgaacctttaactacttacgtctattacacatctgttgtgcccactcttttcaagaaattgggggcagaagtggatactaatcaatattctgttaacgattaccgctatttgtacaaagatgtcgctgctaaaggtgataaaatgccgggcatcttcttcaaatacaatttcgaaccattatccatagtagtttctgatgttcgtttaagctttatacagtttttggtcagattagtggcaatctgctcatttttggtctactgtgcttcgtggattttcacactactggatatggctcttatcaccatcatgggacctaagtggtccttgcgttatcagccagatgataaaactaagggtattttagataggtag

SEQ ID NO: 80799 - DNA, 258 bp, Saccharomyces pastorianus
atggctgttggtaagaataagagactatccagaggtaagaagggtttgaagaagaaggtcgttgacccatttaccagaaaggaatggttcgatattaaagccccatccacttttgaaaacagaaatgttggtaagactttagttaacaagtccactggtttgaagaatgcttccgatgctttgaagggtagagttgtcgaagttgtttggctgacttgcaaggttctgaagaccattctttcagaaaggtcaagttga

SEQ ID NO: 80800 - DNA, 2262 bp, Saccharomyces pastorianus
atgagggataaaaatgtcatgaattttattaataaagacagtcctttatcctggaacgatatgttcaaacccagtataatacaaccaccgcagttaatttctgaaaactcatttgaccagagcagtcaaaaaaaatcgagatcgacagggttcaaaaatccattaagaccagcgttgaaaaaggaaagttcttttgatgaacttcaaaatagttcaatatctcaagagagaagtttggaaatgataaatgaaaacgaaaagaagaaaatgcaatttggagaaaagattgctgttttgacgcaaagacctagctttactgaactgcagaatgaccaagatgacagtaacttgaatccccataatggtgtgaaagtcaagataccgatttgcttaagcaaagaacaagaaagtatcatcaagttggcagaaaatggccacaacattttttatacagggagtgccggtaccggtaaatccattcttttacgtgaaatgataaaagttttaaaaggcatatatggtagggagaatgttgcagtcactgcttccacgggtttagctgcttgtaatatcggtggtataaccatacactcgttcgctggtataggattaggaaaaggtgatgcggataaactctataaaaaagttcgtaggtctcgaaagcacctaaggcgctgggagaatattggtgctttggttgtcgatgaaatatcaatgttagacgcagaactgctagataaactcgatttcatagctagaaaaatacggaaaaatcatcaacccttcggtggaattcaactcatcttctgtggggattttttccagttaccgccagtatcaaaagatcctaatagaccaactaagtttgctttcgaatccaaggcttggaaagaaggtgtaaaaatgacgattatgctacaaaaggtttttagacagcgaggtgatgttaagttcattgacatgttgaatcggatgagactaggcaatattgatgatgaaacagaaagagagttcaagaagctttccagaccattgccagacgatgaaattattcccgcggaactttatagtaccagaatggaagtagaaagggccaataattcaagactaagtaaattgccaggccaggtgcatatttttaatgcaatcgatggcggtgctttggaagacgaagagttaaaggaaagactgttacaaaattttttagctccaaaggaattacatttgaaagttggcgctcaggttatgatggtaaaaaatctagacgcaacattagttaatggatcccttggtaaagtcatcgaattcatggatccagaaacatatttttgttatgaggcgctaacaaacgatccatctatgcctccagaaaaactcgagacttgggcagaaaacccttcaaaactaaaagctgcaatggagagggagcaaagtgatggggaagaaagtgcggtagctagtcgcaaatcttcagtgaaggagggatttgctaagagtgatataggtgagccggtctctcccctagattcctcagtttttgacttcatgaagagagtcaagacagatgacgaagttgtgctggaaaatataaaacgcaaggaacaactgatgcagaccatacatcaaaactccgcaggaaaacgaaggctacctctcgtgagattcaaagcttctgatatgagtacgaggatggtgcttgtcgagccggaggattgggcgatagaagacgaaaatgaaaagccactggtatcaagggttcaattaccgctaatgcttgcctggtcactatccattcacaaatctcagggtcagacacttccaaaagttaaagtggatttacgtagagtattcgaaaagggtcaggcgtacgttgccctttctagagctgtttcaagagaaggactacaggtgttaaattttgacagaactaggatcaaagcacatcaaaaggtaattgatttttatcttactttatcttcagccgaaagtgcctataagcaacttgaggcagatgagcaagtgaaaaaaaggaagttagactacgcaccaggccctaaatataaggctaaatccaagtcaaagtcaaattctccagcacccatatcagcgaccacacaatctaatagtggtatcgcagcgatgttgcaaagacacagtaggaagagatttcagttgaaaaaagagtctaatagtaatcaagttcattcattggtttccgacgaacctcgtggtcaggataccgaagaccacatcttagaataa

SEQ ID NO: 80801 - DNA, 285 bp, Saccharomyces pastorianus
atgccaaagtggataagatcaacattgaatcatattataccaagaagaccatttatctgtagtttcaacagttttcttttactcaaaaacgtatcgcacgccaaactatcgttttctatgagtagtcgtggtttcaggtctaataactttattcaagcacaattgaagcatccttccatactttcaaaagaagacctagatttgctctctgattcggatgattgggaagaacctgattgcatacagttagaaactgagaagccaagaaaagaaaattatcactga

SEQ ID NO: 80802 - DNA, 1248 bp, Saccharomyces pastorianus
atgtggcttattttactaacattgctatgtaaatactgttatttttttttcttttctggctgggctgaaaatttcttcagtcttcataaagttgagaaaataaaaggaaacaagtacatctttttgaacacagaagacggtaagtgtccaggtaagttggttgggttagtcacctctcgtgatatacaattcttagaagatgattctttggttgtttctgaagtcatgactaaaaatccagttactggcatcaagggtattactttgaaagaaggtaatgaaatcctaaaacaaaccaagaaaggtaaattgcttatcgttgatgataacggtaacctcgtttccatgttgtcaagagcggatttgatgaagaatcaaaactacccattagcttctaaatccgccaccaccaagcaattgctatgtggtgctgcaattggtactatcgaagctgataaggaaagattaagactattagtcgaagcaggtttggatgttgttatcttagattcctctcaaggtaactctgttttccaattgaacatgatcaaatggattaaagaaactttcccagatttggaaatcattgctggtaacgttgccaccagagaacaagctgctaacttgattgctgccggtgccgacggtttaagaattggtatgggttctgggtctatttgtatcactcaagaagttatggcttgtggtagaccacaaggtacagctgtctacaacgtttgtcaatttgctaaccaatttggcgttccatgtatggctgatggtggtgtccaaaacattggccacatcaccaaggctttggcccttggttcctccaccgtcatgatgggtggtatgttagctggtactaccgagtcaccaggtgaatacttctacaaggatggtaagagattgaaggcttatcgtggtatggggtccattgacgccatgcaaaagaccggtaacaagggtaatgcctctacctctcgttatttctctgagtcagacagtgtcttggttgcacaaggtgtttctggggctgtcgtagacaaaggttccatcaagaagtttatcccatatttgtacaacggtttacaacattcttgtcaagacattggttgcgaatctctaactttattgaaagagaatgttcaaaatggtgaagttagatttgaattcagaaccgcttctgctcaattagaaggtggtgtccataatttgcactcctatgaaaaacgtctatacaattga

SEQ ID NO: 80803 - DNA, 471 bp, Saccharomyces pastorianus
atgagtgctgctccattggattacaaaaaggctttagaacatttgaagacatacagttccaaggacggtctttctgtccaggaattgatggactccacaactagaggtgggttgacctacaatgattttttggtcttaccaggcttggtcaatttcccatcttctgctgtcagtttgcaaaccaaattgaccaagaaaatcactttgaacactccttttgtctcttctcctatggacacagtcactgaagctgatatggctatttatatggctttattgggtggtattggtttcatccatcacaactgtactccaaaggaacaggcttccatggtcaagaaagttaaaatgtttgaaaacggtttcatcaattctccaatagtaatttctccaaccaccactgttggtgaagttaaggttatgaagagaaagtttggtttctctggcttcccagttactggtatgttataa

SEQ ID NO: 80804 - DNA, 75 bp, Saccharomyces pastorianus
atgtggcattctgcccatttttttcacgaaaattctctctctataatgaagacccttgtgccctggactctgtaa

SEQ ID NO: 80805 - DNA, 129 bp, Saccharomyces pastorianus
atgattccctttcctgcacaacacgagatctttcacgcatacatcggaaggatcaccccccactcaagtcgtgcattgctaacatgtggcattctgcccatttttttcacgaaaattctctctctataa

SEQ ID NO: 80806 - DNA, 942 bp, Saccharomyces pastorianus
atgggccctgcatgttcactagatcaagccgaatccatttataaggctgctgctgaacgtggggttcaaaccatcatctctttacaaggtcgtaaatcaccatatattttgagagcaaaagaattaatatctcaaggctatatcggcgacattaattcgatcgagattgctggaaatggcggttggtacggctacgaaaggcctgttaaatcaccaaaatacatctatgaaatcgggaacggtgtagatctggtaaccacaacatttggtcacacaatcgatattttacaatacatgacaagttcgtacttttccaggataaatgcaatggttttcaataatattccagagcaagagctgatagatgagcgtggtaaccgattgggccagcgagtcccaaagacagtaccggatcatcttttattccaaggcacattgttaaatggcaatgttccagtgtcatgcagtttcaaaggtggcaaacctaccaaaaaatttaccaaaaatttggtcattgatattcacggtaccaagggagatttgaaacttgaaggcgatgccggattcgcagaaatttcaaatctggtcctttactacagtggaactagagcaaacgacttcccgctagctaatggacaacaagctcctttagacccggggtatgatgcaggtaaagaaatcatggaagtatatcatttacgaaattataatgccattgtgggtaatattcatcgactgtatcaatctatctctgacttccacttcaatacaaagaaaaatcctgaattaccctcacaatttgtaatgcaaggtttcgatttcgaaggctttcccaccttgatggatgctctgatattacacaggttaatcgagagcgtttataaaagtaacatgatgggctccacattaaacgttagcaatatctcgcattatagtttataa

SEQ ID NO: 80807 - DNA, 387 bp, Saccharomyces pastorianus
atggactacaacaagagatctttggtctcaaccgtgcctaatgcagctcccataagagtcggattcgtcggtctcaacgcagccaaaggatgggcaatcaagacacattaccccgccatactgcaactatcgtcacaatttcaaatcactgccttatacagtccaaaaattgagacttctattgccaccatccagcgtctaaaattgagtaatgccactgcttttcccactttagagtcatttgcatcatcttccactatagatatgatagtgatagctatccaagtggccagtcattatgacgttgttatgcctctcttggaattctccaaaaataatccgaacctcaagtatcttttcgtagaatgggccctgcatgttcactag

SEQ ID NO: 80808 - DNA, 1641 bp, Saccharomyces pastorianus
atgtcatgcgtggtttgccattcctcttctacatgggtaagctacacgtggaaaaatgtgtggaccatacggcagttaaaggaccaacacatgctaagttgctccaaatttgttaacgcagaggttgcaatcaacggtgtttgttcaatatcgagctcaggacgcttaaatattggcaaagtttccaactttccaactttggatgactggtttcacgttcatgaatcaagtgttaacaagcaagaaaacggtggaggagatgaaagcaatgaagaggaagaagaagaaatggaagaagaaatggaaatgttacaagtatctacattccgacctcgtactattttatcatttcctaataatccgaaaagcattttgtttattgataatcacagtggtaagaaacaatgccgtatatcactgcaaattgatggtgaatgcttaaagtttggcagttcggatcatttatacaagatactggacgatatcgattgcgtttccgctgctataatagatttcacaagacaagctgatcatttgatcatttgtgctggcgacaaaaggctgttaacatacaagatattagttaacaaagataaactatcttttgatattgaattacttcaccaaacagaaatcatttcaccaatacatgctatgttgaagtttaaaaacttcttgctgacagccatgggctccactattgtcctttatggtttggggaaaaagcaattattaagaaggtccgtaacacagaccccggtatccataacaaaaattgtgtctatggaccagtggaattatgaaagactggccgttggtgatatacatgaatctgtcactttatttatctgggatcctgcggggaatgtgtttattccgttcgtagatgactctgtaaaacgccatgtgacggtattgaaatttctagatgaggcaactgttataggcgctgatagatatggaaatgcgtggactttaaggtctccaccagagtgcgaaaaaatcatgtcaaatcatgatcccagcgaattatctaatggggccatcaagtacccgctagacgtcatcactttacagcagaaattacccaatacttatgattgcaagttcaagtttcaactactgaaccacttctttgttaatgatatcatcactgatttccatatcctggacagcctttcaaattctgatagacctggttgtatctatatgggcttacaaggaaccgtgggatgctttatccccttattatccaaggggaatgtttttatgatgggaaacatcgagaatataatggctgaggcggatgatacgttttatttagattatgaatcaagaaagaagaataacaatatgcgtaaggaagacgatgaagaggaatctggaagtgttgtgttacaaggacggcatggtatagaggatgaaataatatgtgagggttcctgttccattttaggtagagaccaccaagaatacagaagctattatgcccctgtacgtaaagttattgatggtgatttatgtgaaaatttcctgagactttccttgaatgagcaggaatttttggccaaaaatttaaagagtgtacaagtggaggatataattcaaacaatcaacgaagtcagaacaaattacatgtaa

SEQ ID NO: 80809 - DNA, 2139 bp, Saccharomyces pastorianus
atgtggggaggtggcaaaatggcagtagtaagcttgtcgccccacacggcgaagatgcgtaaactatttgggcaagctagcacaacgatggcttatgacggtttaaaacgagaggctgaaagaagaacaaggagtgaccataacataacaatggttgctaaagatgatgagctatacttgtaccatcttactttaaagaaacagacgaatttcgtgcactcctgcatcggacacttcgtcgatctggaagcagggtccaagcgtgagcagtcgcaattgtgcgtagctactgagacgcatttagaactttatgatactgcagatggggaactaaagcttattgccaagtttcaaaacctgtttgcgacgataacctcgatgaagtcgctggatctgccgcattcagggtcaagggcaaaagcttccaactggcccacttttctagcgctaacttccgattctggtaacctaagtatcgtgcaaatcattatgcatgcaggtgctcttagacttaagactttagtgaaccagccattgacgaggaccacccttcgaagagtctctcccatatcatacatggaaattgaccctaatgggcgttgtatcattctctcatctgtcgaacaaaataaattgtgtttcctcgttgattatgctcaaaaattgaggatttcgtctccattggaaatcatcagaccccatatggtaacgctggatatggcagttgttgatgtaaatttcaataatccatgttttgttaccttagaaatcgacaatgccgctactcaactatcagtacacttgatattttatgtcctcgagttgggtttgaatcacatcgtcaagaaggcagattatttagttaacccatctgccaatttcgtactgagtttgccagatctatcgcgatataatataacaacttcgctaagcgacaacaactatgatgctgactatgatacccttttcaacccttttgttgtcataggcttcgaaaatcatattctggtaaaggatatgaacggatttttcagcctgaaagtggaaatacccaaaagatctatcacaaatagccgtcataaaaatgtaacaatcatatcaggcatagtgcagaaattgaaaaatgattttttcgtacttttacaatctaaccatggcgatctttttaagttaactgtaagtccagacactaatgatagaaatagacctttagttcaattgtcctactttgatacaatccaaaattcacaccaattacacattttcaaaaacggttatctttttgcactatctgaaatgaataacaactttcttttccagtttgagaaacttggtgtagagaaaaatgatttttctaatgtttcaacctcaaaagatccaaataagtcgctagttttcgaaccatccataaagttacagaatttgagcatattatcgcaacaattgaatttgaacccttcaataaaatctcaaattgtcagtgattcgccactgtctatcgccactaaacattttacaaacaacaagataataactttaacaaatgctgtgaattactctaatttgatatctactggtttacccccgaacgcaaccaagttatggctaatacccgatcctgcaacaaccggcgataacaatactcttttgttcataacttttcccaagaaaactatgatactacaaattgacaacgagtccatggaggaactaacaccggatgaagcaacgcgttcggctttcaagctctctcaggacacaacaattcatacatgcctaatgggctcacactctattatccaagtatgcaccgcagaactaagacatatcgtaccgactggtaaatctaggtattctaataagctgacttgggtgccaccagcgggaattcgtattgtatgtgccacgtcctcgaaaacacaactaattatatcattatcaaattacgaattggtttatttcaagatagatgtatcttcggattcgttaatcgaattaaccacccacccagaattggaaacaatgccctctaaagttgcgattgtacaagatacgcagcatgctgatttattagccattgctgacaatgagggtatgatcaaaataatgtctcttaaagaccaaaaggaagatttttaa

SEQ ID NO: 80810 - DNA, 207 bp, Saccharomyces pastorianus
atgggaatattgatagatgatgaggaagaagggaccatatgtggtgacaacaaaacgcaaaaaaaattcgattatgatagtcctgattatggcgacgaaagcacaataccgagttactactgctactcggatgtagaaacgtacgaaagagtatatacgcccataaaggcatatttcccccagaaatacaaacataaatacatataa

SEQ ID NO: 80811 - DNA, 864 bp, Saccharomyces pastorianus
atggaatcaagtttacaaaaattgaaattccaggatattgacataaatcttattcctactgcgaagtggaccacaaaattacagtatattctatacacctggtgtcagtcgatactacatgtggccatgtttttttctgatatatacacgtgtattaaattactggcatttaacacatggtcgaacaatatcatccaaccattcttggaattccgtatttcaaaatggttgtttagcggatgcatattatgctcctcattaatattaatttgggagttggtaattggattgagagtgtataggaagaaagagattacatcgaactacatgaatggcattagcagattaataaattgcttgttcaatttcaaaaagtatcaaattttcgaactaatagtgctgactgatgagaaaaaattcagtaagtggttattcttttcatattttgaaatcagtggatgtttgaggctattgttcggtgactctccaaggcaaataatcaacggattaactttgtggtcagttttactgacagtttcgaatgagaccagtagcggaacccatagtactcaaagcctaggtaatttagatgacctaaatggaataataaacaagataaaacatattgctaagacaaattacgaagaaagtgtgatcttgtccttcatgttgttctcgtttatcatatgggtaattttaataagcaaattaattctaagcataataatattcatcattttcatacgtccgagatttttgtctagtacaaggaaggttaaggggtatgaattgaaactacgaaagtatgtgtctaaagtcattgacgagaatttaagtagaactgtctacgaatgggaatattga

SEQ ID NO: 80812 - DNA, 441 bp, Saccharomyces pastorianus
atgaagtgtcgatttgaaagagaaatctaccaaacgtataaaaaatttcaaaggccaatatggctaatgtttttactgatagtcattagtaaagtaatcgagatcaagctgaagaattattatagaaagaaggcaagaattgaagaactcgttactcaaaccatggaaaaattgaaattccaaaagattaaatcaatgtccgatccgaaagaaaacgcgtatttgagcatagttcaattgcgtgacatctttctttctgatattgtcgatctgaaatacaaaaatcaattatggtcagaagtggtaaaatatttagagcataataacagtaatattaaatcgaacttaactgaaattcgaggtgaaataatgaaatgttgggaatggataggtccgatggaacccaatgaacctaaggattccgctgaaaacaaaatataa

SEQ ID NO: 80813 - DNA, 2004 bp, Saccharomyces pastorianus
atgaatagtgacttggagtatttagaggacggttttgatccgaattcaatgaaagttgcgactttgaggaggatattggtagaaaataatgtcgatttcccatctaatgctaggaaaaatgcgctggtggggctgttcgatgaaaaggttaaaccgcagatcccgcagttacggaaaatgtatctgaacgttcggcccagcgatgaaggtattgtgaaaatggaccgtccctcatcttccccatctatagcttcacctcgtagaagtagacgagctcgcagggagaaatctgcttcccccatggccaaacagtttaagaagaatagaatactggatgatgtaagtaatgatgatgatgatgatgatgatgatgatgatgatgatgatgatgatgatgatgatgatgatgatgacaatgataaaaaagacgatcctttaattgtatctagtggaacggataccgatgaagtggacgatgaagaggatgatgtgataacatcaagctccaacaaatcagacaccaatgatttccagcaaaattccgatactcgtaagaaaaggaaagaccctgattctgacgactggtctgaatctaattcaaaggaaaataaaatcgataataagcatttgaacctcctatcatcagattcagaaattgaacaggattaccagaaggcaaaaaagcgtaagacgagtgatttgaaccaagagcatggaaatggctctgccattttaggaaaactttccgtcaaaacaccaataaagaacacaaatagaaagccagtaatcatggataattttaacgattcgttgacttcaagcggtacggaaaatgatccatttgtaccgaacatacgacacaatccaaaagagctcggaactgccaatggaacaggccatagcacacccttgagtaagttaaaagtttctgcctcatttgcggataaattgcctcaaaaggaggtaccatctacaatactggttccagaagtggaacagcaagaaccttctcagagtgaaagaacaccgtctttgttttcgtccgaaggctctggctcagagtcggaagcacccttgcttccagagatcaccacgccaggtcctcatcagcctatgggtaataccagcaataatgtggtcgaaatgatagatacagatagtagtaacttggtatgggatgaagatgaagttttagtgcctacaaggatcgagactccccaattacccacagagaaagacgtcgaaaagtgtgaagcaagagtgcaagaacttcaaggggaagtaaatgagcaattagagcatgaaaatgggagtgaatttgatgttaagcaaggatctgggaaggtcgggaacaggcataagttcaaaagagcactcaaatttttgagcaaatcattactggcgctatttttattttgcatattcattgttattcctctcttatttggcctctggtatagagagcaaagactgctcataggttactgtgggcatgaagtaccatcccatcgagttagtggcaattccttcgagtttattcaaaaactggataatttgttgcaggactacagaccgaaatgtatcccttgtccacccaatggtatttgttatccttatttgaaacttaaatgtaagccagattacaagttagcaccatctagacttgactttttggaaattattcctgcacaaggcaaatgtgttaaagacgacaaaaaacagcagttagtttccgaagtggttgaaaaatctatagagtttctgagagccaaaaatgcacaaatttcatgtggtgacggaaaagacgacatcgagagtggtatgacggaagatgccctctatcaaatatttaatgaggctagagctccttggattcgcgacgatgaatttgaggacctgtggatccaagttatcaaagatttaactgaagaaccagaaatattatggaggcaagtgagtacaatttattatcttacaaaaattattaaacctgttattatatga

SEQ ID NO: 80814 - DNA, 1515 bp, Saccharomyces pastorianus
atggcgtttttaagctattttgccactgagaatcaacaaatgcaaacaaggaggttgtcaagaactgctgaaggttctggtggctttggtgtgttgttgatgaatgaaattatggatatggatgagaagaagcccgttttcggtaaccattccgaggacatacagaccaaattggacaagaaattaggacctgagtatatctcaaagagagttgggtttggaacaagcaggattgcatacatcgaaggttggagagtaattaatcttgctaatcaaatctttggatataatggctggtctacggaggtaaaaagtgtagttatcgattttttggatgagcgacagggaaagtttagcatagggtgtactgcaattgttcgtgttacgttgactagcgggacttatagggaagatattgggtatggtaccgtggagaacgaaagacggaaacctgccgctttcgaaagggccaagaaatctgccgttacggatgccttgaaaagatctttgagagggtttggtaatgctctaggaaattgtctttacgataaagattttctggcaaagatcgataaggtgaagttcgatccgccagattttgacgaaaacaatttgtttaggccaacggatgaaatcagcgaaagctcaagaacgaatactttgcatgaaaatcaagaacaacaacaatacccgaataaaagaaggcaattgactaaagttacaaataccaatcccgactcgacgaagaacctggtgaaaatagaaaatacagtaagtcgaggtaccccaatgatggccgcacctgctgaggctaacagtaaaaacagcagtaataaagatactgatctcaaatctctcgatgcttccaaacaggatcaagatgaccttctcgatgattctcttatgtttagcgatgattttcaagacgacgacttgataaatatgggctacacatacagtaatgttttaacgacagagaaggatcccgttgtagctaagcaaagcccaactgctagctcaaacccagaggcagaacaaatcacctttgttacagctaaggctgcaacttccgtacaaaatgaacgttatattggtgaagagagcatttttgatcccaaataccaggcacaatccattaggcacaccgttgatcagactacgtccaagcatgttccagcgagtgtgctaaaagacaaaacgatgaccaccgcgagggattctgtctatgaaaaatttgcaccaaagggaaaacaattgagcatgaagaacaatgataaagaactggggcctcatatgctagaaggggctgggaatcaagtaccgcgtgaaaccacaccaattaaaacgaacgctacagcttttccgcctgcagctgctccacggtttgcgccgccttctaaggtagtacatcctaatggaaatggtgcagtgccagccgttccgcaacaaagatcgacacgaagagaagttggaagaccaaagatcaatcccctgcatgcacgcaagcctacttga

SEQ ID NO: 80815 - DNA, 867 bp, Saccharomyces pastorianus
atgtatgagaacgggaaactaacaagcgccaacgaaagactcttcgggaaccgaccctctatgatggcgccattacgggataacggcttattagatgaatcaccaaacaggctgagggtaagaactgacgatagtgtattgcttaaccgcggaaacaagaaaaggcataggtcctcgtattacgacaacgatttagatgaaacgacacaaacttttaacggctctattttcacccacgaaacaacatttatgactgctatgcgtctgatgttaaaaaaactgaaaaattctataatgtcgtttatcttcccttcctacgcagaaagacaatcatctgatgaaagcgacaattacagactattaccaaatggctccaacaaagcccaaatctcgataattgacatatggtccatttccaagaaaaggcaagctgagaagctggttccattgcccatatgccacgcaaatagtgtggtagcactgacaggactgctgatccgatcaaagacagaagatccaaaaggcggtatcattgcatccgttggggatattcttaagactttggagaggtccatctgtgcactgggtgaatttgccgattgggatccggaatcgatggcatacactgccttccaaacacaaaggacagcccaagatagagtacaacaagacagtgaagacgaagatagcatgaaagacactaccgacatgatcagtgttctttatcagctgtccactagtgcttttatggagattgtacttgaatacaatgttgctctgaacgacgtatatttggatgcagacgtggccaagttagcgaactggtttctagaagtgtacgcctcaggcaaccctaatgctacgtaa

SEQ ID NO: 80816 - DNA, 828 bp, Saccharomyces pastorianus
atgatacagacgccaagggagttgttgaatccacggtacacgtaccataccatctttagcgacgtgtgcaagacccgattcaaccatttagttacgaggttgtttttcatatgttctattatccaaactgtggtgatttcactgctggcgttgccacactcaccgttatggaaactggcattggcatttgttcccaatattttagctcttaacctagtttcccttttgatcattgtgacaagaaaaaattacatgcatgtaaagaattttgggttcgctaattcacttactttcattctaggccaattgttatcagtaaagtttcttgtataccagggagtctatagcatgggcagcatccttttatcattcgtactgggtgtggttttcggacgtggcggatctggatggaagccatactataagctgtttatttggctagtcgttcccacgatttacaacctacaacatcatgtcactgacgctgacaaattgtcgttcaactgcgaaaacttttttcaggccccacaagactacgtattagagcgtgtcaagaggattatggagaagtcagtcattctaagtgtaatcagcatgttcgtattaccaatctttaccacagtatttttttccaggcaaaaatcgggattatttgattcatttacgaatggcgtgctagctgtcacaaatttactaataatctcctgcattatcttcatcactttcgaattcataaatatagcatttgacgcacatatgtccataggttgtctgcacaagggcaagctaatttcgaatttgtcgtcgacgccgatggaacctgcttag

SEQ ID NO: 80817 - DNA, 111 bp, Saccharomyces pastorianus
atggaccgacaagaacggtactgtctgccatgtaactggactccaggtgctgctaccatcaagccaaccgttgaagactccaaggaatacttcgaagctgccaacaaataa

SEQ ID NO: 80818 - DNA, 615 bp, Saccharomyces pastorianus
atggtcgctcaagttcaaaagcaagctccaacttttaagaaaactgccgtcgtcgacggtgtctttgacgaagtctccttggacaaatacaagggtaagtacgttgtcctagcctttattccattggccttcactttcgtctgtccaaccgaaatcattgctttctcagaagctgctaagaaattcgaagaacaaggcgctcaagttcttttcgcctccactgactccgaatactcccttttggcatggaccaatatcccaagaaaggaaggtggtttgggcccaatcaacattccattgttggctgacaccaaccactctttgtccagagactatggtgtcttgatcgaagaagaaggtgtcgccttgagaggtttgttcatcatcgacccaaagggtgtcattagacacatcaccattaacgatttgccagtcggtagaaacgttgacgaagccttgagattggttgaagccttccaatggaccgacaagaacggtactgtctgccatgtaactggactccaggtgctgctaccatcaagccaaccgttgaagactccaaggaatacttcgaagctgccaacaaataagacgcttgcagagttgtctaaatga

SEQ ID NO: 80819 - DNA, 225 bp, Saccharomyces pastorianus
atgcaaaacccaactcattacaagatcccagcctggttcttaaaccgtcaaaacgacattactgatggtaaggactaccacactttggctaacaacgtcgaatccaagttgagagatgacttggaaagattaaagaagatcagagcccaccgtggtattagacacttctggggtttacgtgttagaggtcaacacaccaagaccactggtagaagaagagcttaa

SEQ ID NO: 80820 - DNA, 546 bp, Saccharomyces pastorianus
atgccccaaaagggttctggtagggcaagagtcggggatgctaactctccaacaagacataatggtggtagggcattggcaagaactgcaccaaacgactatactacagagctaccatccaaggtttattccatggctttcaacaacgctttgagccaccaatataaaagtggaaagttgtttgttattggtggtgaaaaggtcgacttaatatctcccacaccagaactcgacttgaacaggctggatcttgtgaatacaaacacagttgagggcaaagagatttttgagggcgaagtcatcttcagaaaattcttggaggaatttcaacttaaaggtaagagattacttttcattacagacaagactagggaagggctgataaagagttctgatccatacaaacaaaaagtagatgttatacagaaagaacttgttgaggtaaatgacatactaagagcgcaagctgtttttatcgaattggaagctcttgaatatctagcaatggcccatcagaaagaaatccttcactccgtgtctaactga

SEQ ID NO: 80821 - DNA, 240 bp, Saccharomyces pastorianus
atgaagagaatccaaaagggtccagttagaggtatctctttcaaattgcaagaagaagaaagagaaagaaaggaccaatacatcccagaagtctctgctttggacttgtctcgttctaacggtgttttgaacgttgacaaccaaacttctgacttggttaaatctttgggtttgaagttgccattatctgtcatcaacgtttctgcccaaagagacagacgttacagaaagagagtttaa

SEQ ID NO: 80822 - DNA, 219 bp, Saccharomyces pastorianus
atgtatccaattgagtactcaccatataaattgtctgagttaggagccaacccctatcgtctgccatggtgtatgaggggattgatgtacgagtccaacaagcatttcagtaatgaagaaatcaagatgttgtttaaggaatttgaggaatgggagcctgagacaaagcaattgaaggacataaaaaacaggcttaatggtttgaaatatcgactctga

SEQ ID NO: 80823 - DNA, 108 bp, Saccharomyces pastorianus
atggtccattctacggttgcagatcatactttgtttgttcgtgcttaccatacgagtgataaagactcattgagggagttattcgagtttcataagtttgattcctaa

SEQ ID NO: 80824 - DNA, 1143 bp, Saccharomyces pastorianus
atggtcacgactccattgcattcctcgccgaaaagcagtctgaaatcttcaacgacctcactgcgctcagtacatactcagtctggtcgtatggggcctagtgagcctaagcacagaacaaccaaatcctggtctatatgggggggtaatgacgaggaagaaccggagttatctaataaaaataaaggaaaggaaaccgcccaagacaacagtcaagaaaatgacaatgtttcgaatgagggcacacgcttgcacgataatcaacaaacaacgattttaaaggaaaccaccaggatcgagaagggtgagaaggacaaaaaagacagaaatgcagctatagtagaaaaaaacacaagatcacgagcatggccattcttttggggccgtaacaaaaaagatccggagccgacgcataacattcccactgatgcggataataacactttatcacgtttagcaaatagtctaaatccggctcctctaaccaacacttacataccttataaacctgatgctatattgatcagagataaaggtgtcaaaactgctaagaaattaacagatgacataggcaatcagtttccgaacattgttgtaccaagtttcgatattttaccgaaacaaaccatatggaatacagtcacatccacaatttggaagtggaagactgaatactgggatagaagaccttcatcaagggtacgagagggggaagaacaggtgcagcactcacaaaatcagttaaaagaggaaacaaacacagttgcaaacgaggcaaaagatgaggagcggttggaacacaacagaggatctctatttagggttgatccatggaaaaaaataaaccttctatcagattaccaatctaggcccatcagagttctcattgtcggcgttcatgggttctttccaacaaaaattattagaccgtttattggtgagccaacgggtacatctaccaagtttgtcacagaagctgaggaaatagtgaaggaatattttgatcaacataaagtacccattgaaataagcaagattgctcttgaaagagaaggagagatatttgatagagtagatttcttctacgaagttatgaagcattggagcaaagaaataaccattctgatttatcaatctcgttag

SEQ ID NO: 80825 - DNA, 921 bp, Saccharomyces pastorianus
atgatctatttgaaatgcgtacacgagttggaaccttggctggttgctcgccaactaggtgtcagaaacaccccggagatattcctcattgccaacgtggctaataaggcttcccattcagaaactttgccctcacaaaggctctccattctcggcaagttaaaggtcaattcactgaacagattcttgcagtcgttaacaaacgtggtggaaaagtacactccagaattagttgttaataaaactgaaatgcacgagctacgcatgtcaagagaaataaaaaaactgcaggaggatgcgtacaaaaagtcgctagaaatggacagaattaaagctatagaaaaggaaaagagcttgaaacacgctcaggatttgaaattaaactcaactgctcggcaattaaaatggttaaaggcttgcatcgatgagatacagccgttcgagacaacggggaagcaagctactctgcaatttagaacttctagtggcaaaagattcgtcaagaagttcccctccatgactacactttaccaaatctaccaatccattgggtgtcacatatacctcgcggtatattctagtgaccccgtagaatggtctaacgccctccaggacaaaatcaggcaattatctgcagacgatgatgtgctctgctttaaagaaggacaacttgaaactgctactgctaccacgatcgaagagctcggccacatcatcaacaacgagcttacctcatttgatctcgaacgtggtaaacttgaattcgactttgaattggtatcgcccttccctaagtatactgtgcatcctaacgagcacatgtcggtggaccaagtgccccagctatggccaaatggcagtcttctagtggaagcactggatgaagaagatgaagaagatgaggaaaatgaagaacaatga

SEQ ID NO: 80826 - DNA, 435 bp, Saccharomyces pastorianus
atgaaaaaaaaagtaaactccagaaactctttgtacgcgtttgtcgtttttaacgatatgctattttatcattgttcttcattttcctcatcttcttcatcttcttcatccagtgcttccactagaagactgccatttggccatagctggggcacttggtccaccgacatgtgctcgttaggatgcacagtatacttagggaagggcgataccaattcaaagtcgaattcaagtttaccacgttcgagatcaaatgaggtaagctcgttgttgatgatgtggccgagctcttcgatcgtggtagcagtagcagtttcaagttgtccttctttaaagcagagcacatcatcgtctgcagataattgcctgattttgtcctggagggcgttagaccattctacggggtcactagaatataccgcgaggtatatgtga

SEQ ID NO: 80827 - DNA, 1377 bp, Saccharomyces pastorianus
atggtagagcaaggtcaagtgacatttatgtcaactcaaacaagcagagaagttaccattacagcaaataatctgtccaaatccatcgacactacagctacatcaagtgaatatgcgctacatgacatagtcgaattgagtgctaaaaatgttgcttgtattattcaagctggccacgatatcttcaaggttattgatgaaactggtaaagtgtcgacaattacgaaggggtctatcttgagtaaaataaatactgctcgtgcacgcgtttctagtgtcgatgcaaatggtaatgaaatcaaaattggtgataccatagtagagaaagtaggttcacgcagagaaggtcaggtcctgtacatacaaacacaacaaatttttgttgtttcaaagaagattgttgaaaatgcaggggtttttgttgttaaccctagtaacgttgaggccgtggcatccaaggacaatatgttaagtaacaaaatggatctaagtaaaatgaatccagaaatcatttctaaaatgggacctccatcatctaagacattccaacaacccatccagtccagaggaggtcgtgaagttgcactcggcaaaacagtaagaattcgttctgctggttacaagggtcaattaggtattgtgaaagatgtgaatggtgataaagctactgtcgaattacactcgaagaacaaacacattacaattgacaagcataagttaacatattacaaccgtgagggaggtgaaggtatcacgtatgatgaattggttaatagacgtggtagagttccacaggccagaatgggcccaagttacgtcagtgccccaagaaacatggccactggcggtattgcagcaggtgctgcggctacctcttctggtcttagcggtggtatgacaccaggatggagctccttcgatggtggcaaaacaccagctgtaaatgcgcatggaggctcaggtggtggtggtgtctcctcatggggtggtgcttccacttggggtggccaaggtaatggaggtgcatccgcttggggcggtgctggcggcggtgcctcagcttggggcggccaaggtactggtgctacttctacttggggtggtgcttcagcctggggtaacaaatcaagttggggcggtgcatccacttgggcgtcgggtggtgaatctaatggtgccatgtctacttggggtggtaccggtgataggtcagcctacggcggggcttccacctggggaggaaataacaataataaaagtacaagagatggcggagcttctgcatggggtaaccaagacgatggaaataggtctgcttggaacaaccaaggaaataagtcaaactatggtggtaacagtacatggggaggtcattaa

SEQ ID NO: 80828 - DNA, 3273 bp, Saccharomyces pastorianus
atgtcagtttaccatttaccaacgctgttgaacccgctggttaatgctatatttaactgtcccgaaccagaaagatccccattgaaaaagcttttcgctaatttaaaaacccgtaggtttatcctcctagcacctccttcagaataccttttgaattaccacgatgtcaagagcaaactgccgtcacatgacctctgttataatgcagagtttattaactcttacatattgttaatgactgaaaactcttacataaatacgaattcaagggacagtcattatgaaacgttagatggtaagaccgttgttattcaatggaagaataatgtgatccatgccttaaatggatttcatataaggcgaagactaaagattctagagacaaaaatattacccaattttaatgactactttgaaggggcggctgattttatcatactattcatagatcaacctttaaattgcgaatttgtacctaacgactacttacagtgttttcacaattatgagaaaataccaaaaaatgcacatgctatgccaaatctgtcgatagattcttttcagcaagaaagatcgtcattcgagaatatattgcacattcatcctgctcgattaacacagcttggccaattgttttcgagttacagaacgctcgctcctggtgatgatccatctagaagtatttttgaaagcattgtgcaacaagcatttgatggaatgaaatcggattcacttttcaagaacttttctaatctttacgatcttatacacgactattttgaactaaatctttacgatgatatatggtctaggcttactacacatttcaaaggccacgaagtagacactgaaaaatataaatatttttcagtgaaccagttgttgacagatttttactcaaaagattatggggaatttgaattacacgacatcactcttattgaaaggcgtctccatctagcgtccaaacatcttcaaaagttggctttgacccattcatacgctgaaaaatctaaaatattagttgaaactctacagaaattatcaggtactaccgaaatggattcacatcaactagaactaccagacggattgaataacatgacgatggatgcagacactttaattagcctttttgtgctcgttgtttgcagaagtgaacaaaagcaccttaaaagtcatctttactatttgcaaaatttttcgaataactcttcttctacaaaattcggcattctagggtatgctgtatccacactggaagcagtggtttgttatttcgaagacttcaacaaaaatacaggcaacgtggcgaaagctaacacattatgtgagaaaactaagaatttattagataagttgtcatgtgaaaaccccacaaatgaaatagaagatctggcaacatacaaggatattttgacctacagaaatgagcaaggacaatccattctatccatatgtataacaaatcataaaaactacatcttattagatattctttctgaatatgaaaccgactttccagtagaagaccttttagaggacgaaacgattgatggttctacgctgcttatagaatcgataaaagcaggaaatttagaagccgcgaaagttctcataaagatcatgctgttcaattgtactgaagaggagctggtttcttatatcaataaaacagatagatatgcacgtaccgtggctcattatctaacccatgaaatggatatacttaaaagcatcggaaattatattgattggaaacgaaaaaactccagtggacaaacgcctttattttccatctttagaagttatgatcaaccaaattatgaagaaatggtgaagaccgcatttgatatcgcaaatacttggtatagaaagcacaacagtttgtttgactatctagaccacaccgataataagggcaatagcttgttgcatgttttgaaaacaaacattccaatccttttacaactgattaagctagatattaatgaggaaaattataagggattgacgccattaatggtatatgtgaagtacaaaagactaagtaatattgacgccatcacgaaagaccgtcgacttatattagagaaggttcaaaactcgaccttcttcacttgttttgattatgcaaaagatcactcggtactaagcaagataggagaaaggggtgtcaaagattcactttttggattaatatatttccattctttgcgatatcataatttaaatgcgacaacaaatataacatccgtttcaaatgcagagaaacctttcgccactactgttattaacatgaaaacaattcaaggcttactacgctcaattctgaaagacaatccgttcacctttttgccattaaatacctatatcgatgaaatatcgcacttaaaccgttctgatttaacaataatcgggaaaacagatgtcacatcgttacttcaccaattaactaactgcttcaacgttcttttattcctgaaaaaaattccagaaaatttgttcactgatgaggcttctatctgttattggatgcgcataaacacttctaaaagaaaccagaaaccctcaggaaaagaaaatccaaaaacaatggaacccgaggagattaatatgatacaaagctttttacgttttaattttgatgagatttcatcatttaaggcaagcttgaatattttaaggaaagtcttaatatttattaatttgaaatccgatgatttcgaggatgcttataagggtcttaacgaaatgggtagaaaattaattaatagtgaagcatccagcgcatttaaggggattataacaaatcataatatgttcagtgaattatcgctagcagaactactagaaaacgtgcgtttcttggaacaatgtactatccaactatctagtttcgttcagataattttatttgaaaaaattccgaactggtggaaacattatggtgagtttttagctttacataaaagctatcggaaggcttttcctaacatggttaagccaaaaagtgcatcagatacctctagtcgtgctccacttggtggttttattgaaacgaagcgtgaacaatcggagcaaagactagcggttcagataaaggcctcttcaaaaatgctcaaagaacttggaagcgaaatttttgtagctcacgaaaggttggccgaggaactaagcaattatatggagttcaggaaggcgtgcttagatcagcgtagtcttgtggcatttgccacaaccaacattagcgttcttcaagaatgtgtttaa

SEQ ID NO: 80829 - DNA, 189 bp, Saccharomyces pastorianus
atggcaatatccgacggaggtaaattggtgacctacatttctccctcccatgaaagcaccacatatcccttagttgaagtactaaaatatggcgagatcccaggatatccagaaagtaactttagagagaaactaactttgataaaggaaggtttgaagcagaagtccacaattgttaccgtagattaa

SEQ ID NO: 80830 - DNA, 1212 bp, Saccharomyces pastorianus
atgtcgttgggtcctcttaaagctatcaatgataagcaattgaatacccgttccaagttagttcacaccccaataaagggaaataccgcagacctcgtaggaaaagaaaatcactttaaacaaacaaagagactagatccgaataatgatcatcaccaccagccagctcaaaaaaagaaaagggaaaagttatcagctttgtgtaagacaccaccttcattaatcaaaacaagaggaaaagactatcaccgaggtcattttttaggtgaaggtggatttgctcgctgtttccaaattaaggacgattcaggcgaaatttttgctgccaaaacagttgctaaagcctcaattaaatcagagaagacaagaaaaaagttgttgtcggagattcaaattcataaaagtatgtcccatccaaatatcgttcagtttattgattgttttgaggatgatagcaatgtctatatcttattggagatatgccccaacggttcattaatggaattactaaaaagaagaaaagttttaacagaaccagaagttagatttttcaccactcaaatatgtggtgcaattaagtatatgcattcaagaagagttatacatagagatttaaaacttggtaacatcttcttcgattcaaactataacttaaagattggtgacttcggtctggcagctgtgttggcgaatgaaagtgaacgtaaatacaccatatgcggaacacctaattacatcgcacctgaagtgttgatgggtaagcattctggacattcatttgaagtagatatttggtcattaggtgttatgctttatgctttgttgattggtaagccacccttccaagcaagagatgtaaacactatttatgaaagaatcaaatgtcgtgatttttcgtttccaagagataaaccaatctcagatgaaggtaagattttaataagagacattctctccttagatccaatagaaaggccctctttgactgaaattatggattatgtatggtttaggggaactttcccaccatctattccttcgacggtcatgtcagaagcaccaaattttgaggatattcctgaagagcagtcactggttaacttcaaagattgcatggaaaaatctctactattagaaagcatgagcagcgataaattcagcgtcaaaagagggattatatttcttcaattaaatctagtatcgataaactag

SEQ ID NO: 80831 - DNA, 348 bp, Saccharomyces pastorianus
atgggaggtcttccgaaatcaagattgcctaaaattaaacacccaatgatagttaccaagtgggtcgactactccaacaaacacggattctcctatcagttatcaacagaggatattggtgtcttatttaataatggcaccacagttctccgattggcagatgcagaagagttttggtatattagttatgacgatcgggaaggttgggtagcaagtcattatttattgagcgaaaaaccacgagagctaagtagacatttagaagtagttgatttttttgccaagtacatgaaggcaaatttgagccgagtatctacgtttggcagagaagaatatcataaaagataa

SEQ ID NO: 80832 - DNA, 423 bp, Saccharomyces pastorianus
atgtcatactccgattcagaacgtcttggtatgattaagaatgggtttgaagctgccacaatgggtaattttactgatgattctgatttcttgggctgtgttggttgcgccattatcagacgtaagcaacaaaacttgaatgctacattgccctctgaatgcagccagtgttttaccaactactgctggaacggtactattgacagcaggtcagtctcaggtgtaggaaatgatgattattcttcttctgcttccttgtctgcctccgccgctgctgcctctgcctccgcctccgcctctgcttctgggtcttccactcataagaaaaatgcgggcaatgctttggtgaattattctaacttaaacactaacacttttattggtgtcttaagtgtcattagtgccgtcttcggtctaatttag

SEQ ID NO: 80833 - DNA, 1680 bp, Saccharomyces pastorianus
atgaagttgcagagtttgttggtttctgctgcagttttgacttctctaacagagaacgttaacgcttggtcaccaaataacagttacgtccctgcgaacgtaacctgtgatgatgatattaatttagtcagagaagcatctggtttgtcagataacgaaacagaatggctgaaaaaaagagatgcatacaccaaggaggctttgcattcttttttgaatagggccacttcgaatttcagtgacacttccttgctatccactctttttggtagcaactcttccaatatgcctaagattgccgtcgcctgttctggtggtggttaccgtgccatgttgtctggtgctggtatgcttgctgctatggacaatcgtactgatggcgcaaatgagcatggtcttggtgggctgctgcaaggtgcaacttacttggcaggtctgtcgggtggtaactggttaacaagtactttggcttggaacaactggacgtctgtgcaagctatcgtggataatacaacagaatctaactcaatttgggacatctctcattcaattcttaccccagacggcattaacatctttaagactgggagtagatgggacgacatatcagatgacgttcaggataaaaaagacgccggtttcaacatctctttggcggatgtttggggccgtgctcttgcgtacaatttttggccaagcttacaccgtggtggggtagggtacacatggtcaactttaagggaagctgatgtcttcaagaatggggaaatgcccttccctatcactgttgcagacggtagatacccaggtaccaccgtgataaacttgaatgccactcttttcgaatttaatccctttgaaatgggttcatgggaccccactttgaacgcatttacggatgtgaagtatttaggtaccaacgttacaaacggtaaaccagttaataaaggccaatgcattgccgggtttgataacactggtttcataacagccacttcatctacgttgtttaaccaatttttactaagattgaattctaccgatttaccttcatttattgctaacttagccaccgatttcctggaagatttatccgacaatagtgacgatattgcaatttacgccccaaatccattcaaggaagctaattttcttcaaaagaacgcaacctccagtattatcgaatcagaatatctatttttggttgatggtggtgaagataaccaaaatattcctttagttccattgttgcaaaaggaacgtgaactagatgttatttttgcattagacaattctgctgatactgacgactattggccagatggtgcttcattagttaacacctatcagcgtcaatttggcagccaaggtctcaatttgtctttcccatatgttccagatgtgaacacatttgtcaacttggggttgaacaaaaagccaaccttttttggttgtgatgcaagaaatttgacagacttggagtacattccaccattaattgtttacattccaaattcaagacattcatttaatggtaaccaaagtacttttaagatgtcatactccgattcagaacgtcttggtatgattaagaatgggtttgaagctgccacaatgggtaattttactgatgattctgattttcttgggctgtgttggttgcgccattatcagacgtaa

SEQ ID NO: 80834 - DNA, 159 bp, Saccharomyces pastorianus
atgggtttgaagctgccacaatgggtaattttactgatgattctgattttcttgggctgtgttggttgcgccattatcagacgtaagcaacaaaacttgaatgcttatttggcctctgaatgcagacagtgtttaccaattactgcggaacggtactat

SEQ ID NO: 80835 - DNA, 1839 bp, Saccharomyces pastorianus
atgtcgaactacttacaaaaagaagttattcccagcgttattcaagattatttatctggaaatttgagcactccttataatggtgaacatttagccgatactttacataagaatggtatcaacatgcgttacttgggtaaaattatcgagctttctcaaaaggaattggactcccaaattgtccactacgaacaaaatttgaaagctgttgaacaaggcaacaaagaatatgaggattgggaaaaatcttatctgcaaaaaattgagaacatgattaaagagagacaagccaagattaataagctggtacaagaaggcaaagaggttccaaaagaactaactgaagatttgaaattaaacgatgaagaaatcaaaaagcccaccgatggaaaacctgtggtcgttgcctacgatgagctagtgccattaattaaaatttccgaattagaaattgtttcgcgttctttgaaacatgttttaaaagatttgggtaaagatgttccggtcttcttggttccatcactggtagcatacgttttcaatatgttagttggtatcaactacaatgctgatccgaagccagaaccagtcgacgaattttatccagtcaataagtgctcatttgctaaattaacacgctccgaattgctggaagctgtctctaaacaagccttcttgcgtttccgtcatcaattaccatccaattggatcgaagcttacatggaaaatcctttcaccctcattagaagtgtttcttacaaatttggtattcaattgctcaataaagaatacttctttactaaagaacaattggaaagttataagcaaagtcttgacaagaaaattaggaacaagtttgtcgaaccaccaactaccttcagtttaagcgatttgaccattattccacgtgttaagttctcagaatatacttcttcagttagtgaggaattttgggctcaaggtgcttctatgatcaacgaagacaaacaaagtgctttgactttgctcgctcaatcaattacagtcttagaagatgtcaacaatattttacatcccgccgttgctgaaaagtacttgtcattatctgccatttataataagttagcattataccctgaagctatcgcgttctgtcgtaaagcatgtactatttatgaaagagttagcggtattgattcttttgaaatgatgagggctttaactaatttagcaattctagaattctctaatgaaagtccttataacgctactgtggtttataataggctcgcagaaatcctaaaagtttatgagttaccaaaaatccatcacccagcccccacaagcattttcaaccatttggaacaattagccctaggtgttcaagataccaaattggctattgaagtcttgggacaactaagctcctatgttgtggaactagaaggcaaagattcattagcatatggctataccgagtcacgtttaggtaatttgtttgcagcattgaaggatttccaccgtgcattagagcacatcactgtaacccaagggattttcaccaagcaattgggtatgaatcacacgcactcagcccaatcaagacagtgggttaatggtttaagctcattaataatggatttaaaacaaaagaagcaacttgcacaagatcaaatgtcgacaacgggatcaaattcagctggccataaaaaaaccaatcaccgtcaaaagaaggatgacgttaaacctgaattggctaacaaaagtgtggatgagttgttaacatttatagaaggcgattcttccaactctaagagcaaaaacaaaaccaacaataaaaagaagcatggtaagaaatag

SEQ ID NO: 80836 - DNA, 1881 bp, Saccharomyces pastorianus
atgagcgagaaaaaagaagaagttaaaaacgccaccgttaaggtgactgtcaaacttccaaaagaagataaccattcgcataatacgaaacatctcaaaaagacccaaagttcaaaaaataatgatatatcttttgaaatcggcaaggaatccaaaattcaaactgttctagatgtgttggctatgattccaagttccaagtacctgacaaacgttgggctgaaaacaattgaaggtgactcccagctatctgatgaagtgtctataaaggaaattgtcggtgagaaaagcgagttaaaacttcaattgatactgaagccatatagcgcaagagaggctttgaaacatgtgattactgttcgcgatttcatcggatttgcccaagaaacctcagatggattatctgaatttgctatttctactggttcaagcttttcctcgttaccattgggtcctatcaaggaacgctcaaaacaagaagaaaaagacgagaagagcgatccagaagaaaagaaaaatactttcaaagatgtgactgacgaggaaaaactaaaatttaacgagatggttcacgaagtgttttctagctttaagaattcttcaattaacaaacttctcacctctgaatccaacatcatcacgccgtgcgtcaggtctttgagtttcgcaccttacaatcctgtacctccattttatagaagtaaaggtcatctattttacctacaaattgtcactttggaaggcgagagtttctatatcactgcaattccatctggattctatgtcaataaatcaaactcaactaagttcgatccttctccaaaagaaaacactgacgagaacgcgcactcatccccgatctattacagtctatttgacttgattgcttctcgctctaaaaaattcatttctcatgtccaagcatttgagaaaaaactatctgctttagattctacaagctatgtaagaccaagcaatactttcttgcataaaccatggtttgtttcttcattgccaccaaataacccagattatctgaggttacaaactgccgccttggataccacgccagaaagaaactttaatgatgaatttcaagccattaaagatttgactacgtcaacattacaagatcgtattgaaatggaaaggttgttttctaaagttgtacatgaattttctgttactgcagcatcaggcgctatgtcaattttttacagtgatttcgttgcaatgaacccagaatctccaactcgggatcaaattttcttaaaagacaatatcttttattcctatgtttccgacgttagtggcaattatgaagggaaaggtggggatgaagctgcaatcgctgcttccaaccaagacttgaagacaatcaatattttgaatcgcttgcatatgcacgaagttcgttatcttttaacaactgtagtcgaatttgcaggcagaagaattttggctcaaactccagtacctggactcttagctaccatgggtaacaaaattgtaaaagatgctaataccggcgaagaggttaccgaagattttgtcaatgatattaatgtaaagtacggccttgatgaaggtttgggaaagattgtttatgatgctgactttgattctgttttagaaaaaaagtttgtcaaggcattccatttgaaaaagcacaaagtcaacggtactgaattagcattttcatcgcaatccaagggaattgttggattcgataagaggcgctatattttggatttagccaacacgtatcccttggacatcaactttgctagacaaactttgacaacatcgaagagactgaaaaccgttacccacacaggcaaacttgttacgtccggagttagtagaaaagtggtggaataa

SEQ ID NO: 80837 - DNA, 804 bp, Saccharomyces pastorianus
atgcactttaaaccgtttatgctgtcaatatcttttgccatcgggcttccactttttgccaataccttcattcatttagaagacggtgaaaatccgctactttggctggtaaaatatatcttagagtctactattcgtcaaaagattttgtttgcttggtcttcaattcttatactgtccataccaagtatattgatcgagaaggacagtctatcgttgaacacctcccgaaaattgtggcatttcatcattttcttactcataataccgtcattccaaatggattcaaactttgtgaaaattgcattgtccggaacaataccagtcttcttatcaattgagtacataagatttcaaaacctaccgccgttaggatctgctattgaattacaactaagaaggtttgctgatgatagggaccacagcgggccattgatcatatcatacctttatttactcttcggaatatcaacacctttattaatgaataactctccaatgggtctaataggattgggaattggtgattccttagcatctattattggtaaaaggtatggccgcattcgttggaaaggtacacaaaaaactttagagggaactcttgcgtttatagtaacgagttttatcgtttgtttgatattgttacgttttgataaagctgcaatttttaaccacctaactactttacaattgcttaccctttgtacactgagtggagtgctagaaggtaatagtgtgcttaatgacaatattttgatacctgcatttatgatgatttgtgaaaaattaattactctttga

SEQ ID NO: 80838 - DNA, 324 bp, Saccharomyces pastorianus
atgccaactgaggagatctgcaaaatcaatatgaggactcgtaaatttgatgtgggcgggaattctcgagattttgagtgcttttattcgaattttgttcaaactgttatattgttgggcacttttttttactgtgttgaaaggcttcagccgtggtccattgttaccgctgatatatcttataaacaaatctttgtaaatgtctttgtggtgtgtttgataatggttggtctgatattcacaaaatattggcaacatggttacaaaagcctacccaagttcgataccatttacagtttatatttaccgtttatggtttcgtag

SEQ ID NO: 80839 - DNA, 153 bp, Saccharomyces pastorianus
atttctccggaaagtgcagtagcaaatctaggtactgatactggattgccctcagatgttcttgatactgtcagtaaaatagggaactctcctaatgtgtttgatgatgatttattttccaatttattatggtttgaccaaaattttgcataa

SEQ ID NO: 80840 - DNA, 498 bp, Saccharomyces pastorianus
atgttaatttctcattgtcaaatggctattgaaaatttggctgaaattacgagaagtaatcttttctttgttccgtggtggttaaacctttctcaactattcacggtaaatttaatatgtattatctacctgcacgcagggattgccgtaactcaaaataaagctatcatgcaaagctgccaagaaatatggcgaaccttagagtgctctaagccaaaaaatcggccttcaatgcttcctgagtgcttatggtgtttgaaaatgctgaatcatatgttctgcatacgactgagagattctgctttgcaattggaagctactctcggaactgatcatggtgatgacacccctaatagaaataagtttgagcagttcaagaaagttggcgataatgatgcggatgttgaagttgatgctggtgaaagagaagaaaatgctgatgaaagacagaaaatccacgtaacaatagcgaacagagtaccattcgctactagatct

SEQ ID NO: 80841 - DNA, 2160 bp, Saccharomyces pastorianus
atgaaaatatattatatacttgtatttgagcatcgttcagtagcaatcaagctcatcatcgtagtgattgttctccttcagttttttttagcacgaagtcggcaaattgataggacatgggcccatactaatagaaaggaacggttcagagaaatgacagctatcgggaatactgatgatgcacttgatactagtacagccgcaagtaaagaaaatggaaaaggtagactcagggttcaaaaagcttgtgaactttgcaagaagagaaaggttaaatgcgacggtaacaatccttgtctgaactgctctaaacatcaaaaagaatgccgttatgatttcaaagctacaatccgtaaaagaagaagacgacaggtcgcatcagctgttcgggacgttagtaagacatatgcagaaaccagtgagtcttttcctagggacttgttaagtaaatcaaatattatcataaatgccccctcagatggtgtatcttcgtctgctagcaactctcccaatccaaattcacattatcataatatatcatccactttacccttcatgagcggtaggccaaaccatacattccattccggaagcaacttaaatggagaaaataacaataacagttttccggaggatcacatggccaaattacttctgcaattgagttcaaaattggggaatacgaccaaggaatcgtcaattagaacaactagaaccaatgctaatgatgtgaatgcaaacccgacagtggtaaacatgaaaaatagtcaggaagactgtgacacgaatcacaggtctgcaatatatgactctgcagaggctcttcataataacaacatcaattctaaagagaataagacaatcaactctcaaataactaacattgttaatgatcattttgaatcaccctggcagacattttctttagataagtataggtttcaccgacgctaccaaaatattctgccctattaccttggtgtatctattttaaaggatctatctccgcagacaatagagtacgcgaagttgaaaaggccaagagttcaaaactatggttggaacttgtcaggaggccattacttaaagtataagggtgactttagaagccaagaaaaaaatataaggcatgagtctaaatttttcgactttgatgaccctattcacttatccttaatcaataagttactaaggtattattttgatgagatcaatcctgttttcagtatcattcacgaagcgacattttggcagcaatataacaataaatttctacggcaaggtaaacaaaataattcatctgcgaatctattcacttccatgctttatctaattttgtctactacactaagattcagagaagggcatctagatggtcagaaagggcaaggaacctacagtaacacatccttaaatatcacattcgaggaaaaatctattttgatcaaaaaaccctccatagaggaaaatttattcaaatacgcttatttaataatcaacacgctgacctttgagtgggaatcattcgaactaatacaatcgtggcttttgataaccttctatttcagaacctgttacagacagacggcgtgctggaacgcgttaagtcaagcggtgaacatgtgtaatgggatgagtctatatttaaacaaatttcctgagatccattccacttatgatgaatcaaaagcatggcattgtttctggtgttgttttataatggataagttgataagttttcaaatgggtcggttctaccaactatcactacccgcgagcgagatgtgcgaacagatgaatctagtgaagtcaaagaaatttttacaagaagaagatgattggtttcacgaagagacttttcaaatgcttgatttgtccataatagtgacacagtttttaaaaagagacgcacaggatttaaatttgaacgagaccgtgcaattgcgcagccaacttggtcaatggtatgacacctttatagttggaagtcaaaccaatgcgtacgacgacaactatcgttacttctatcaagttcaaccattcatgacatacctggatataaggctgactttcgaagtaagacaattattttgtctaatcgccccctcatctaccgcaaataataaatccctagaatatgtcgtcgatactgaatgttaa

SEQ ID NO: 80842 - DNA, 636 bp, Saccharomyces pastorianus
atgataaacgtgaatggctataaggttattatctgtgatacggcaggtataagagaaaagagttctgacaagatagaaatgctaggtatagaaagagcaaagaagaaaagcgtacagagcgacttatgtttattcattgtagatcctactgatttatcaaaacttttgcctgaggacatattagcacacctatcatcgaagacgtttggaaataagagaataattattgtagtcaataagagcgacttagtttccgatgatgagatgacgaaagttttgaacaaattacaaactagactcggatcgaagtaccccatattaagcgtgtcctgtaagaccaaggagggaatagaatcgttaattagcactctgacaagtaattttgaaagcttgtctcaatcaagtgccgatgcaagtcctgtcattgtttccaaaagagtgtcagagattctcaaaaacgacgtactgtacggcttggaagagtttttcaaatccaaagatttccataatgatatagtattggccacagaaaatttgaggtatgcatccgatggaatagctaagataacaggacaagctattggtattgaggaaatcttagattcagtgttcagcaaattttgtatagggaaataa

SEQ ID NO: 80843 - DNA, 144 bp, Saccharomyces pastorianus
atggcacagttgactgctataatagattttgccgacgataatagccaagaaattcagaatacggatgagattttccataatgtagaaaagaacatcatatgtctgcgagacctaatcgttactttcatgcggaaaagtcgctaa

SEQ ID NO: 80844 - DNA, 312 bp, Saccharomyces pastorianus
atgactactaaattgcagaaaagggtcaatgacttggatgaagatattccaaggccgcctttctcctcacatagtgacaaaacggaagataaagagggagtttctgaggcctgtcccgtttgcgaaaaaactgtacaaaacccctgcgtattggaaacaggatacgtggcatgctacccgtgtgccataagctatttggttaataatgaaggccattgtcccgttaccaataaaaagctgctgggttgtacatacaacaaacacacgaataaatgggaagttgtgacaggtattaggaagctactaatctga

SEQ ID NO: 80845 - DNA, 243 bp, Saccharomyces pastorianus
atgagctattattcaaacctaccgtctgcaggacaatctagtcgagggtcttcaacaagcggtcgaaatggggtgggattagaaccattgtatccgactatctttgagataatgtcatcacaagaaatcgattcgttactgcccgcatccatccgttatctactggcaaatcatttagtggcgaacttccctaacaggtatactttgcggctgaaccagtacttttccgagtggtttcaagcg

SEQ ID NO: 80846 - DNA, 363 bp, Saccharomyces pastorianus
atgaataatatattcagcagcgatgaaactgaaaataaatggcccaagagagcgtttctaagaatttatccatttattaagaaattattagcgttatccaatttactcgttaaattattatttttaactaaaagaacaggatcggtttccttgttgcaatacttattcaagatagagtacacaacggtaagaccactatcgtcagaactctctggtctcaaagagacgaaagggatggataataggctaaggaaaacaaatatatcgtcaattttcgcgctaatgcaaggacaattatcgattatacccagatttttaacatttatgggttcgcaatcttccccacttttatatttgtcctaa

SEQ ID NO: 80847 - DNA, 321 bp, Saccharomyces pastorianus
atggatccattcttgcacaaagatttgcaaaaatccgatttggttatttttaagggtgatctaaactatagaaaattaactggcgacagaaaatggccccgcaccactaaatgggaaacggctatcggacctcttgctacgaatggtattacatcattgagcttgagaacctgtaaagccgatgtacaagttgctttacctgaaggtctagacgcgaaattaagtcaagaatgggaaaaggaaaatcctggccgtggttcttggtggtgttgtagcggtaaatgggcagtcatttgtttctgctctggtatacataaataa

SEQ ID NO: 80848 - DNA, 1146 bp, Saccharomyces pastorianus
atgactatccctggaagatttatgacaaatgataagggcacttttggtgaatacactgctagcacccgttggcccattatcattcagaatgctatagacgatttaagtaagcatcaagaaacggagaagagtaacggcactaagttcgaacaaggtgaagttatcaaaaaggagctcaaggaattccgtcaggagataattgatcgtgtacctttgagaccctttactgaagaagagatcaaaattgccaacgtcccgctttcgttcaatgaatatctaaagaaacaccctgaagtcaattggggggctgtagagtggctgttctcggaggtttacttgtatagaagagtaaatgttcttttccaacgccaatgcgaatgggctaaatttgacatattcaacagacttaaacagtcaacttttgagtcctcgttttatggtgtcgtggaattggcgttaaggtatggaaatctgttaccacagctgagagaaatgaagcagaatccaggaaatgagattgacgatatattgaaagttctttttaaagagtttattgagatttctttgtggggcaatgccactgatttatctttattgaccaacgctacgttagaagacattaaatcaatccaaggggcgaaagcaagagctgcatccgagtccaagattgttgttaatgacacggagaaagcatgggaggtattaaccaaagccagggccgatgccaatagcagagaaattcgtgttgattttgtattagacaattctggctttgaattgtatgctgacttgatgttggcagcttttctgttacaaagtggtttggctaccaaatgtattttccacgctaaagacattccatacatggttagcgatgttatgttaaaagattttgatatattagttcatgacctaagagatcgtgagttcttcccaagtggtgaaccctcgacaaaggaatccagagctcttgatttatttgctggtgaaatggaaaagttcgtctctagcggtaagatagaattccgcgaagattctttctggaccacggaattagattattggaatttggacgcaaacgaaaccaaataccatggatccattcttgcacaaagatttgcaaaaatccgatttggttatttttaa

SEQ ID NO: 80849 - DNA, 423 bp, Saccharomyces pastorianus
  modified_base (11)..(11): a, c, g, t, unknown, or other
atgctctctanatttcctcaagaaattcccgtacatgaagtcaaatcatcaggtactcagatacgaaaagaatcgaatgatgatgattccactggttttaccgataaattagagaatataaataagccattgatagacaaaaaaggtcaagtcttgaggaacttcacgcttgtcgacaaaaggcaacaactgcaacaaaaagtgcgaggatatggtcaatatggaccaacaatgtcggtggaggaatttttagataaagagtttgaagaaggtcgcgttcttcaaggtggcgaagaaccagagcaagcaccagatgaagaaaacatggactggcaagatagagaaacctataaagctcgtgagtgggacgagttcaaggaaagtcatgctaagggaagcggaaataccatgaatagaggatag

SEQ ID NO: 80850 - DNA, 738 bp, Saccharomyces pastorianus
atggcgtcagtaacagaacaattcaacgatattattagcttatactcaacaaaattggaacacacatctttgaggcaagattcaccagagtaccagggattattactttccacgatcaagaaattattaaacttaaaaacagcaatttttgacaggttggcattgttcagtactaatgagaccattgatgatgtgtctactgcttccatcaaatttctagcagttgattactatttaggattattgatatcaagacgacagtcgaatgattcggatgttgctcaaaggcagtctatgaaattgatttacctgaaaaaaagcgttgaatctttcattaatttcctgacactattgcaggattataagcttctagatcctttggttggtgaaaaactaggtaacttcaaggatcgttataaccctcagcttagcgaattgtacgcgcaaccaaaaaatgacaaagatttatctggagcacagttgaagagaaaagaaaagattgagctattccagcgcaataaagaaattagcacaaaactgcactgcttggagttggaattaaaaaacaacgacgaggaccacgaccatgatgaattactaagagaactatatttgatgaggttacatcactttagtcttgatacgattaacaacattgaacagaatttatttgaatgtgaaatgctctctaatttcctcaaaaattccgtacatgaagtcaaatcatcaggtactcag

SEQ ID NO: 80851 - DNA, 1164 bp, Saccharomyces pastorianus
atgaattctagcgccaactgggctcaaatgagcagtatctccacgacaagtaaaaaaaccgaatcgtatatggacaatataaggaaactatcttctcagctgaaggaaaccgaaaataaaaggaaactagcttcaatagacaaatatgagaaaccattgccatctccagaagtcaccatggctacacaatttagaaattccacacccgtcatacgtaatgagacaaaagtggttgctgacccaacattatctttgaggtcttcacccgtccagttacagagcaatgtggatgactccgtgttaaggcagaaacctgataaaccaaggccgattgttggggaagaacaacttaaacctgatgaagattcgaaaaatcctgatgaaaaaggtctaatggtgcataaaagaaatcaatctctcagttcaccatcagaatcaagttcttctaatccaacggattttagccacatcaaaaagagacaaagtatggaatctatgactacatccgtaagttcaatggccaatagtatagacgactcacagagatttgccaaatcatggaactcgtcaaataggaaaagaaaatctatgagccatttgcaagtaccctcatccgcttcttcgaggtcggatgatggggaaagaacgcctaactctgagcacaacctcaatgaagatgattataacacgaggagagatactagtacaagcacaattttgttcaaccctcctgtggcagtaagaggaacgtctagggggcacacgcatagacaatccatgataatgcaagattcaagtaatccaattgaagatgccttgtacgaaatggaaagaatccaaagtagttctaaaccaggtacaaaaacaggaaacatcatggatgagagaggtgtggtcagggatagaggtattactgttaccttgcctattgtcaccagtgaaggttttccagtcattgaatatgccaaggccatgtatccattgattggaaatgaggcacctggattagcgaatttccataagggcgactatctgctaattactgagattgttaataaagattggtataaaggtgaagtttatgataatgaccgtatagatagaaatcataggataggattaattccctataatttcattcagctactgcatcaaggtctttga

SEQ ID NO: 80852 - DNA, 948 bp, Saccharomyces pastorianus
atgatttcgttgcagaattgttgtattattgatgttggaacacatcatacagatattattcctattgttgactatgcacaattagaccatcttgtctcttcaataccaatgggcggacagtctattaatgattctctaaaaaaactactacctcaatgggacgatgatcagatagaatcattgaaaaaatcaccaatttttgaggtgctcagtgacgacgccaaaaaactatcaagtttcgattttggaaacgaaaatgaggacgaggatgaaggaactttaaacgttgccgagattattacaagtggtcgtgatacacgtgaagttttagaggaaagagaacgtggtcaaaaagtcaaaaatgttaaaaatagcgacttggaattcaatactttttgggatgaaaaaggtaacgaaattaaagttggtaagcaaagattccaaggatgtaataacctgattaagaatatttctaatcgtgtaggattgacgttagataacatagatgatattaacaaagccaaagccgtttgggaaaatattatcatcgtcggtggcactacttcaatttcaggttttaaagaagctttactaggtcaactactgaaagaccatttaattatagagccagaggaagagaagtcaaaaagagaagaggaagcgaaatccgtattaccagctgcaacaaaaaagaaaagcaagtttatgacaaatagcaccgcatttgttccaactatagaatacgtacagtgtcctacagtaatcaaactggctaaatatccagattactttcctgagtggaagaaaagtggatattcagagattatattcttgggtgcccaaattgtttctaagcaaattttcactcatcctaaagatacattttatatcacaagagaaaagtataatatgaaaggaccggctgctctttgggacgtgcaattttaa

SEQ ID NO: 80853 - DNA, 693 bp, Saccharomyces pastorianus
atgctgccgaattcaaatttgagttcatctcaacaatttatcaaaccgtctatgattctttcagacaatgcgtccgttattgcgaaagtggcgactacaggcttgagtaatgatatgccatttttgacagaggaaggtgaacaaaatgctaattctactccaaatttcgatctttccatcactcaaatgaatatggctccattatcgcctgcatcatcatcctccacgtctcttgcaacaaatcatttctatcaccatttcccacagcagggtcaccataccatgaactctaaaatcggttcttcccttcggaggcggaagtctgctgtgcctttgatgggtacggtgccgcttacaaatcaacaaaataatataagctgtagtagtgtcaactcaactggcaatggtgctggggttacgaaggaaagaaggccaagttacaggagaaaatcaatgacaccgtccagaagatcaagtgtcgtaatagaatcaacaaaggaactcgaggagaaaccgttccactgtcacatttgtcccaagagctttaagcgcagcgaacatttgaaaaggcatgtgagatctgttcactctaacgaacgaccatttgcttgtcacatatgcgataagaaatttagtagaagcgataatttgtcgcaacacatcaagactcataaaaaacatggagacatttaa

SEQ ID NO: 80854 - DNA, 288 bp, Saccharomyces pastorianus
atggaaaaggtcacagatcagagtgttacgtaccgcaaccagaaaaatccctatataataaatagtgtaaccccagtggatgcactggcttcaagggcatataaccaaaggaatgtttacatttcaggcttcatcatctacttttatatatgtatactcaccgtgatgagtatattgcgaagaatagtggaatggaatgacaaaatgaaggctggagatgacattctgaaggaaaagttaagacgaaagcaaaaatatttagaggaattgcagaagaagaaattttaa

SEQ ID NO: 80855 - DNA, 1182 bp, Saccharomyces pastorianus
atggcacaatcacaaaatgcgctccaacaacagcagcagcaacaacgattacaaattcagaataacaatccctacggtactaatgagcttttttcgaaagcaactgtcaccaacacggtttcctatccaattcaaccaagcgctacaaagatcaaagccgatgaacgcaaaaaagccagtttgacgaacgcatacaaaatgattcctaaaactttatttacagccaagctcaagactaataattccgtcatggataaggcccagatcaaggttgatccaaatttgtcgatttcaattgataaaaagaataatcagattgcgatttctaaccagcaggaggaaaatttggacgaaagcatattaaaagcttctgagttattattcaatcccgataaaaggtcattcaagaatctaattaataacaggaaaatgttgatcgcatctgaggaaaagaataacggatcacagaacaacgatatgaattttaaaagtaaaagtgaagaacaagaaacgatcttgggaaagccaaagatggatgaaaaagaaactgctaatgggggggaaagaatggttttgtcctcaaagaacgatggggaagatagcgcaacgaaacatcattcccggaatatggacgaagaaaataaagaaaatgtcgccgatttacagaagcaagaatattcagaagatgataaaaaggctgtttttgcggacgttgcggaaaaagatgcctccttcattaatgagaactactatatctcaccatccctggacacattatcctcttattctctcttgcaactgcgcaaagttcctcatttagttgtgggtcataaaagttatggtaaaattgaatttcttgaacctgttgacctcgctggaattcctttgacctcattagggggcgtaatcattacttttgaaccaaaaacctgtataatatatgcgaacttgccaaacagaccgaagagaggggagggcattaatgttcgggccaggattacctgctttaactgttatcctgtagacaaatctaccagaaaacctataaaggatccaaatcatcaactggttaaaaggcatatcgaacgcttaaagaaaaatccaaattctaagttcgaaagctatgatgcagacagtggtacatacgtgtttatcgtaaaccacgctgcagagcagacctga

SEQ ID NO: 80856 - DNA, 2313 bp, Saccharomyces pastorianus
  modified_base (2251)..(2251): a, c, g, t, unknown, or other
atgtttggagttagccgtggcgcattccccagcgcaacaacacagccatttggctcaacaggatcaacctttggtgcccaacagcaacaacaacaaccagtagcaaacacttctgctttcggcctcagtcagcaaacaaatacaacgcaagcacctgcgtttggtaactttggtaaccaaacttctaattctcccttcggaatgtcaggctcgactacagcaaatggtactccttttggtcaaagtcaattgacgaacaacaatgcctctggctcgatcttcggtggaatgggtaataacacagaactttctgctggttccgcttctgttgtgcccaattctactgcaggtacaagcattaaaccttttactacattcgaagagaaggatccaaccacaggtgtcatcaacgtcttccaaagtatcacctgtatgcctgaatacagaaatttttcttttgaagaattgagatttcaagattaccaagctggtagaaaattcggtaccagtcaaaatggcactggtactacttttaacaatcctcaaggaactaccaatactggatttggaattatgggtaataataactccactacttctgctacaacaggaggattatttggtcaaaagccagcaacaggcatgtttggaaccggaactgggagtggtggtggctttggctctggagcgaccaactctacaggattgtttggaagctctactaacctctcaggaaattctgcatttggagcgaataaacctgccacttccgggggattgtttggtaatacaactaacaacccaacaaacggcactaataatacaggccttttcggccagcagaactcaaatacaaacggaggattatttggtcaacagcaaaattcatttggggcgaataatgtcagtaacgggggtgcctttggtcaggtgaatcgtggtgcctttccccaacaacaaacacaacaaggtagtggtggtatatttggtcaatcaaacgctaacgcaaatggtggcgctttcggccaacagcaaggcactggtgctctttttggagctaaacctgcttctggtggactatttggacaatctgctggttcaaaagcattcggaatgaataccaaccccactggtaccactggtggcttatttgggcaaaccaatcagcagcaaagtggaggagggttatttggccagcaacaaaattccaacgctggaggattgttcggtcagaataaccaaagccagaaccaatccggattatttggacaacaaaactcctcaaacgcatttggccagccacagcaacaaggcggattatttggaagcaaacctgcaggaggactgtttggacaacagcagggagcatccacttttgcgtctggtaatgcccaaaataattctatatttgggcaaaataaccaacaacagcaatcaaccgggggattattcggacaacaaaacaaccagtcgcagtcccaacctggtggattgtttggccagaccaatcaaaataataatcagccatttggccaaaatgggttacaacaaccacaacagaataatagtctttttggagcgaaaccaactggttttggaaatacaagcttattctctaacagcacaacaaatcaaagtaacggtataagtggaaataatttgcagcagcaatcaggaggtttgttccaaaataaacagcaacctgcttcgggtggcctgtttggttcaaaaccatcgaacactgttggaggcggattatttggaaacaatcaagttgcaaatcaaaacaatcctgcctcaactagcggcggattatttggtagcaaacctgctacaggatcccttttcggaggtactaattccacggctccaaacgcctcttcgggtggaatatttgggtccaataatgcatctaacacggcggccaccaccaattctactggtttatttggtaataaaccagttggtgcgggagcttctacaagtgctggaggactatttggaaacaataacaactcgtctctaaacaattccaacggttcaacgggcctgtttggtggtaataatacctctcaatctactaatgctggaggcttatttcagaataacactagtacgaacacttcgggcggagggttattttcccaaccttcccagccaatggcacaatcacaaaatgcgctccaacaacagcagcagcaacaacgattacaaattcagaataacaatccctacggtactaatgagcttntttcgaaagcaactgtcaccaacacggtttcctatccaatcaaccaagcgctacaaagatca

SEQ ID NO: 80857 - DNA, 1596 bp, Saccharomyces pastorianus
atgacgaaaagggaaaaatatgtttatatcacattgaacaagttccaacaagaatcacagggtctaatagccgaaggttgggtgccttccacagaattgatccatttacaagactcattgaaggattacattgaaacgttgggttctgaatacagtaccgtctttaatgtgatcctaaccaataaattaccacctacataccatagaaccaacaagttcactcaggccttccaatcgattgtggatgcatacggtatcgcaacatataaagaaatcaatgctggtttagccacggttgtcacgttcccatttatgtttgccattatgtttggtgacatgggccatggtttcattttatttttgatggcactattcttggtgctaaatgaacgtaagtttggtgctatgcacagggacgaaatttttgacatggcatttacaggtagatatgttttattgttgatgggtgcattttctgtatatactgggctgttgtacaatgatatcttttccaaatctatgacaatattcaaatcaggctggcaatggccttccactttcagaaagggcgaatcgattgaggcgaagaaaactggggtttatccgtttggattggattttgcttggcatggtactgataacggactactattttccaactcttataagatgaagctgtccattctaatgggatacgcacatatgacttattccttcatgttttcttatatcaattacagagctaaaaactctaaagtggacataattggtaactttatccccggtttagtgtttatgcaatcaatatttggttatttgtcgtgggctatcgtgtacaagtggtcgaaggattggattaaagatgataagcctgctccagggttactgaatatgctaataaacatgtttttagcaccgggtactattgatgatcaattatattccggacaagccaagttgcaagttgtactactgcttgcggcactagtttgtgtcccgtggttattgctgtataaacctttaacactgagaaggttaaataagaacggtggtggtggcaggcctcacggataccaaagtgtgggcaatattgagcatgaggaacaaatagcacaacagagacattcagcggaaggtttccaagggatgatcatcagtgatgttgccagtgttgcagacagtatcaatgaaagcgttggtggaggtgaacaggggccatttaatttcggcgatgtcatgattcatcaggtaatccatactattgaattctgtttaaattgtatctctcatacagcatcatatctacgtctttgggcactatcgttggcgcatgcgcaattatctagtgttttatgggatatgacaatttcaaacgctttcagttctaaaaactcagggtcgcctttggctgtcatgaaggtggttatcttatttgctatgtggtttgttttaaccgtttgtatcctagttttcatggaaggtacttccgcaatgttgcatgcgctacgtttgcattgggtggaggcaatgtccaaattttttgaaggtgaaggatatgcgtacgagccattttcatttcgtgcaataatagaataa

SEQ ID NO: 80858 - DNA, 813 bp, Saccharomyces pastorianus
atgaatcaagaagaggctatattccggtcagcagacatgacgtacgtccaactgtacataccgttggaagtcataagagaggtaactttcttattagggaaaatgggtgtctttatggtgatggatctcaataaagatttaactgcctttcaaagaggttatgttaaccagttgaggcgtttcgatgaagtggaaaggatggtaggcttcttgaatgaggtagttgaaaagcacgccgcagagacctggaagtatattttacatatcgatgatgaaggaaacgacattgcccaacccgatatggcggatctcatcaataccatggaaccactatcgttggaaaatgttaatgacatggtgaaggaaattactgattgcgaatcccgtgcaaggcaattagatgaatctttagatagccttagaagtaaactgaacgatcttttagagcaaaggcaggtaatattcgaatgctcaaaatttattgaagtcaatcctgggattgctggaagagctacaaaccccgagattgaacaagaagaaagggatgttgacgagtttagaatgacccctgatgatatcagtgaaacattaagcgatgctttttcttttgacgacgaaacaccacaggaccggggcgctctagggaatgacctcactagaaaccaatcagtcgaagatctaagctttttagagcagggataccagcatagatacatgataacaggctctatcagaagaacaaaagtagatatattgaacagaatcctgtggaggttattgcgtggtaatttgatctttcagaatttccaatag

SEQ ID NO: 80859 - DNA, 522 bp, Saccharomyces pastorianus
atgaacgtgttattagctcctctgctttactcatgtccttctgaacctatggcgtatcaacttttcactaagctttgttatgaaatgataccgacgtatctaactaagaacctaaacggcgcccagaacggcgccaaactactagatatttctctcagaatcattgatccaaagctgagtaaatttctatcggacaacttacttacagcagagatttatggtatgccttccatactcacgttatccagctgcaataaaccgcttgatcaggtcattaaactgtgggatttcatgtttgcatatggattccatatgaatattctctttgtggtggcattcctagttaaaatgagatccaaggttttcaaatcggattcccctgttaatttactacgacagtttccggattttgatgctgacgagatcattcggctgggcgtcgggttcatcgctaagatccctgctcaaatttatggcctattggtagaccacttgaccgacccagacatatatataccgtaa

SEQ ID NO: 80860 - DNA, 387 bp, Saccharomyces pastorianus
atgacctcaattgaagatctgatatcaaatcctcccctgctactgcattcctcactctctcaacttcgctacctcatactcagtgaagggcttcccatatctgaagataaacagcagcagcgcacgcgatgttacgtgtggacggtgctctctcaaacttctatggaggcgtctacacaacggtaccttgcgctcttgaaactgggcccaccttccacaaccatttaccaaaaaatcaagaacgacacatccagaacttttcagacggatccaaattttaaaatagagtctcagaggatgcctcatccgtgtctgtcgggcttgttgggaacgcacgtagagacgaagatcggtggtcgatccttgagcctatttaggctgacgtgt

SEQ ID NO: 80861 - DNA, 123 bp, Saccharomyces pastorianus
  modified_base (9)..(9): a, c, g, t, unknown, or other
aaactttanaatagagtctcagaggatgccctcatccggtgtctgtcgtgctttgcttggcaaacacaacaaagaagacaaaagactcgttttggtcgcattcctgtgagcacatatgtgtag

SEQ ID NO: 80862 - DNA, 222 bp, Saccharomyces pastorianus
atgacattctcctgctttgccggtattcttggtattatcacaattgcaatttatggtatgatggatatggaagatacgaccgaaaaggttattcgagacttgcacgtggaccctgaagtcttgctaaatgaggttgatgaaaatgaagagcgtgaggtaaacgaagatcgtcattccactgaaaagcatcaattttcaactaaagccaaacggttcttctaa

SEQ ID NO: 80863 - DNA, 1245 bp, Saccharomyces pastorianus
atggacggtgtgcccttcttgacgcaatgtccaattgcgccaggcagtactatgctttacaatttcacggtggactacaatgtaggcacctactggtaccattcacacacggacggtcaatatgaagacgggatgaaaggtcttttcatcatcaaggatgatagcttcccctacgattacgatgaggaactttctttatcgcttagtgagtggtaccacgacttggtcacggacttgacgaagtcgttcatgagtgtttataatccgacaggtgctgagcccatcccacagaacttgattgttaacaacacgatgaatctgacatgggaagtccagcccgatacgacgtatcttttgagaattgtcaacgtgggtgggttcgtttcgcagtacttttggatcgaggaccacgaaatgactgtggtcggaatcgacggtatcactaccgagaagaacgtaacggatatgctttacatcactgtcgctcagagatatacagtcctggttcacactaaaaacgacacggacaaaaatttcgccatcatgcagaaatttgatgacaccatgttggatgtcattccaagtgatttacagctgaatgcaacctcttatatggtctacaacaaaaccgctgcgctgcccacacaaaattacgtggattcaattgataacttcttggacgatttctacttgcaaccgtacgagaaagaagccatctatggcgagccagatcatgtgattaccgttgacgttgttatggataacttgaaaaacggtgtgaattacgccttcttcaataatatcacctatactgcaccaaaagttcctactttgatgaccgttttgtcttcaggtgatcaagcaaacaactccgaaatctacggttcaaacacgcacactttcatcctagaaaaggatgaaatcgtggagattgtgctaaataaccaggacacaggtacccatcctttccatttacatggtcacgctttccaaaccatccagagagatcgtacatatgatgatgccctaggtgaagttcctcacagtttcgatccggacaaccaccctgccttcccagaatacccaatgagaagagatactttatacgttagaccacaatccaatttcgtcatcaggttcaaagccgataacccaggtgtttggttcttccattgtcatatcgaatggcatttgttgcaagatttgggtcttgttctcgtggaggatccttttgtatccagatga

SEQ ID NO: 80864 - DNA, 135 bp, Saccharomyces pastorianus
atgactaacactttgctctctatagccgttttgcttttctcgatgctctcgctagcacaagcggagacgcacacgtttaattggaccactggctgggactacaggaacgttgatgggctaaagagccgtcccgtg

SEQ ID NO: 80865 - DNA, 126 bp, Saccharomyces pastorianus
atgtcgaacaaaattgatgacttcgtccatagaccaagtaataacttggagcaaagagatcctcaatttagagagcaaggaaacgttgtgatgtcattatataatttagcctgtaaatacatataa

SEQ ID NO: 80866 - DNA, 480 bp, Saccharomyces pastorianus
atggttaaaggtagtgtgcatttatggggaaaggatggcgaagcatcgttgatttcagtggacagcattgcgcttgtatggtttatcaagttatgtacttcagaagaggcaaagagtatggttgcgggattgcagatcgtattctcaaacaatacagacctatcatcagatggaaaactaccagtgttaattttagataatggaacgaaagtatctggttacgtgaacatcgtacaattcttacataaaaatatatgtactagcaaatatgagaaaggtacggattatgaagaagatttagcaattgttggaaaaaaggatcgccttttagagtattccctattgaattatgttgacgttgaaatttctagactaacggactaccagctctttttgaacaccaaaaattacaatgaatataccaagaagttgttttcaaaattgctatattattgcctatgtggtataatacgccattcg

SEQ ID NO: 80867 - DNA, 996 bp, Saccharomyces pastorianus
atgaaagatgcccaagtaatgattgatttggttaacgataaaattggtcaaaaaaattctaccctagtcatgtctacaggcgttattggacaacgactacagatggacaagatcagcactggtatcaataaaatttttggagaagaaaagttcggcagtgattttaactcttggttgaacgtagccaaatcaatctgtactactgatactttcccaaaattagttacatctagattcaaattacctagtggtactgagtatactttgacaggtatggcaaagggcgcgggtatgatttgtccgaatatggctaccttattaggtttcatagttacagatcttcctattgaaagcaaggcgttgcagaagatgctgactttcgctactacccgttcatttaattgtatatcggtggacggtgatatgagcaccaatgacacaatttgcatgttggccaacggtgctattgacaccaaagaaattaacgaagactctaaagattttgaacaagtaaaattgcaggtcacagaatttgctcagcgcttggcccagttagtcgttcgcgatggtgaaggttcgacaaagtttgttactgttaacgttaaaaatgctttgcattttgaagacgccaaaataattgctgaatcaatctcaaactctatgttggtcaaaaccgcactatatgggcaagatgccaattggggaagaatattgtgcgcgatcgggtatgcaaagctgaatgacttaaaatctctagatgtcaacaaaattaatgttagctttattgctaccgacaattcagaacctcgtgagctgaagcttgtcgctaatggtgtgccacaattggagatcgatgaaacaagggcttctgaaatattggctttgaatgatttggaagtgtctgtcgacttgggaaccggtgatcaggcagcacaattttggacttgtgatttatcacatgaatatgtaacaattaacggtgattaccgttcataa

SEQ ID NO: 80868 - DNA, 309 bp, Saccharomyces pastorianus
atgagaatatcatcaacattgcttcaacgctcgaagcagcttatagataagtatgcattatacgtgcccaagacgggctcttttcctaaaggatttgaagtaggctacactgcatctggagtcaaaaaaaacgggagcctggacctgggtgtaatcttgaataccaataaatctcgtccttcaaccgcagcagctgttttcacgaccaataaattcaaagctgcgccagtttggacatcgaaaaaagtccttgaaactgctcgtggtaaaaacatcaacgctattgtagtcaattccggttcgtgctaa

SEQ ID NO: 80869 - DNA, 2322 bp, Saccharomyces pastorianus
  modified_base (2304)..(2304): a, c, g, t, unknown, or other
atgttcaaatacaaccgctcactctgtagcagcgctttgatagcaaagtctcagattcgtttttatagattgaagcgggcgccattgaattatgcctcccatatacctgaagttcttaataagaccatcatagggccagacgaaccagaaaaatgtctcattttgaaaggaaaaacatcagaggaaatcgaaaataatcttctcagtaataagaaatttcaggagatcaatcctcttgatactatccaggaaacgttcattcaatatctgaaattttgtaatgaaactaactttaaaagaagtaacaagaatttaaacagattaaaaaaaaccttagaaagcaaggactctaatagcaccgtaaaaattaatgcagttttcaattatttgctcgaagagtgtgatttagaaatcaaaagattgaacacgaccggccaaacccaggtatacaatgaagagaaaggaaatgaagatgacttagagcaatccataatgaacgatattttccgatcagcacaagaacaatttgaagatcaagagggccatataccgttaaggagtacatcatttttactggagattttgaaaagttttaatgaacggtttaatggcataatcaaaccgaaagagtcaataacagaaatggtcacattcagccaacttgctcaagcttttgaagttgttaaattgataccagtgcaagaaatgaaggagaaagggatttacttggtcggaaatttactttatggcacagggaaagttcgtttagatcctataaatgagtcattctatattgaatccctactagtttttggaaactataaggctgcatacagtttatttattaccaataaagacaaagtaaacgagcgctggtggaatgaactaggattaatgatcacattaaggtctaaccacttgagaaacttcaggaaacttttagccgagacagatgcaaagtactcaacaaagtattcttatttgagcccaagagttaccaaattgagcatacgaaaatatttgtcgattggcaatgttactgaagctaatatactgactgatcgatttattaagttagtggaagaagttggaataatcagaatgaaagatgagcaggaggaacttcccacgggagttaaaaattttcagaatgagaaacatgcaactgagttcttaaatgaactagaaataccatcggatcatgattatatcagcattgttgatttccatctttataagagaaatattcccatggcggctcaacttatcagcaagtacatggaaatacctggaacgacacaagaagatgccgcatttctacttgttaaaaccaagctaaatatgttgaaagattttgaaaagctacgaaacatttttgctcaaaataaagattatgtagtgcctgagaataatgtgaaaatgttgcaagaggcatttgagagcgttattactaagtataacactaattctccaatatacaatgaattgctgtttgagaatgtttcggccttaacaaaaagtattgtattaactgattttctggaagagttcattactaaacaggcttctggacagtggatggaattaaacagtgtgtcacgttccagaaagtttaatggcttgttgaacatacttctcggtacaggtgaagaagaaaaagcatataatatcttaaaaaaactagaagaagcctcaaagaaatcaaaaacagatccagatttactctataatcagttttattcggaagttaatgcatatcattacgctaaatttgttgaattttatagtcttcaaattcaaaatatgaaggcacaaaatacgccctcatttagaaaaaaggaatttaagcagaaagtgaagtcacttttaaaaagaatgcaggagtcagaggttatcccaaatgctgtttttttgagagaaatactcaatttttatgatagcatgtatgactttaattcaagttttgagatcatcaatccgctacttgaatccaaacaacaggtgagctctgagtcttcattatccacctcaaacccttgccgattttacaaccgtcgcatcataacgaaaccgctgtaccacaagatttggtctgtgtattgccattattatcatgttttacaaaataattctaggattttatcgaaaaagtcgtccattgtaaagaaattaataaaaaggcagataaagattcacccaacttgtcacccaagagtactgttccaaatgacgacagaaaatggtgaaattttgccagacaaaactttttctaaattaattgtgtccacgtttatgaaaagcggnggattagaagcaatacct

SEQ ID NO: 80870 - DNA, 1242 bp, Saccharomyces pastorianus
atggtgaactctggggcaagagaacttccaatgcccttacatcagcagcagtatatatacccttactatcagtatacaagtaataacagcaacaacaataatgtgacggctggtaacaatatgtctgcgtcgccgattgtccatagcaacagcaacaacagcaacaacagcaatatttctgcttctgattacactgtcgcaaacaacagtactagcaataataacaataataataataacaacaacaataataacaataatattcacccaaaccagtttgctgcggccgcaaatatgaactcaaatgctgcagcggctgcttattactccttccccactgcgaatatgccaataccgcaacaggatcaacaatatatgttcaatcctgcttcatacataagccattactattcagcagttaacagcaataacaatggtaataacgccgctaacaatggcagcaacaactcttctcactcagccccagccccggcccccggtccaccccatcaccatcaccatcatagtaatacacacaacaacctcaacaatggtggtgctgtaaatacaaacaccgctcctcagcaccatccaacgataataacggatcaatttcaattccaactacaacaaaacccttctccaaatttgaatctcaatattaacccggcacaacctctgcatctacctcctggttggaaaataaacactatgccgcaaccacgtcctacgacagcacctaaccatccccctgcgccggtgccttcttcgaaccctgtggcctcgaactcggttcctgccccatcatcagaccataaatatatccatcaatgccaattttgtgagaagtctttcaaaagaaaatcatggttgaaaaggcacctattgtcacactcgcaacaaagacattttctatgcccttggtgcttaagcaggcagaagagaaaagataatctcttacagcatatgaaactcaagcatacaaattatttattagacgaactcaagaaaaacaacatcatctttaactacaacaattcttcctcctctaataataataacagcaatagcgctagcggcagtggcggtgccggtgccgcggcggcagcagcaacagctcccgaaaatgaagatggaaacggttacgatacaaacatcaagactttaatcaatgatggtgtactgaataaggacgacgttaaacgtgttttgaataaccttattgttagtcacaacaaatag

SEQ ID NO: 80871 - DNA, 81 bp, Saccharomyces pastorianus
atgaatgcggaccatcacctgcaacagcagcagcaacagcgacaacagcatcaacaacaacagcatcagcatcagcattag

SEQ ID NO: 80872 - DNA, 321 bp, Saccharomyces pastorianus
atgtttaaaaattttaacagttcttcctttggtttggattcgataatcttctttaaatataacagatgctttatttcatcgttggaaaagtcattgaattgtatagaatctagttcgttcgacacgactacgttagtcagttctttcaaatcccataattttcttaagttattgcttttggaagccgatttattgttactactcttgtcgttgttgctaacttggaaatatattaacgaggctatgtctttgaccatattatcctcgctattgccattttgggatccatttgatactaacttatctattaaactttcttga

SEQ ID NO: 80873 - DNA, 693 bp, Saccharomyces pastorianus
atgtttgaaaactgcgaaaaatggaggaaggattatggtaccgacactatcttgcaagattttcattatgatgaaaaaccattgattgccaaattctacccacaatattatcataaaaccgataaagatggccgcccagtatattttgaagaattaggtgctgttaacttacatgaaatgaacaaggttacctctgaagagaggatgttgaaaaacttggtttgggaatacgaatctgtcgttcaatacagattacctgcctgttcaagagctgctggtcacctagtggaaacttcatgtacaattatggatttgaaaggtatctccatatctagtgcatacagtgttatgtcatatgttagggaagcctcctacataagtcaaaactattaccccgaacgtatgggtaaattttacatcatcaacgcgccattcggtttctctaccgcatttaggctatttaaacctttcttggatccagtcactgtttcaaagatttttatcttgggttcttcttaccagaaggaattactaaagcaaattccagctgaaaacttaccagtcaaatttggcggtaagtctgaagttgatgaatccaagggtgggttatacctatccgatatcggtccatggagggatccaaagtatattggaccggaaggtgaagctccggaagccttttcgatgaaatga

SEQ ID NO: 80874 - DNA, 999 bp, Saccharomyces pastorianus
atgaatccttatttgagtgagtttccaagtaacatgttttatgaaggcagcctacaaaatggtgtaacgattgaacagcgtaccgttcccaacagcaaattcccatggccaattcgcggtataccaatgatgttttgggccaattacggtagagaggagatttctgctaacggtacttccttcttaaacagaattgaagccatgaattgtgaacgaatcatcactaaacttttcagagacggtgtcaagcccgagcaaattggtgttatcacaccatatgagggacaaagagcttatattttacaatatatgcaaatgaatggttcattggataaggatttgtatatcaaagtggaagttgcctcagttgatgcattccaaggtcgtgaaaaggattacataatcttatcgtgtgttcgtgccaatgaacaacaggccattggtttcttacgtgatcctcgtcgtctaaacgtgggtctaacccgtgccaaatatggtctagttattcttggtaatcctagatctttggcaagaaacacattatggaaccatctgttaatccacttcagagagaagggttgtttagtcgaaggtacgttggataacttacagttatgcactgttcaattagttcgtcctcagccaagaaagactgaacggccaatgaacgctcaatttaacgtagaatctgaaatgggtgactttccgaagttccaggattttgatgcacagagtatggtgtcattcagtggtcaaattggggactttggtaatgcatttgttgacaacacagaactttcttcttacatcaataatgaatattggaattttgagaattttaaaagtgctttttctcaaaagcaaaatcgcaatgaaattgacgatagaaatttgtaccaggaggaggcttctcatttgaactctaacttcgcgagagagttacagagagaagaacaaaagcatgaattgtcaaaagacttcagcaatttgggaatataa

SEQ ID NO: 80875 - DNA, 1410 bp, Saccharomyces pastorianus
atggtcggttccggttctcacactccttatgatatatcaaactctccatctgatgtaaatgtccaacccgcaacacaactaaattccaccttggtggaggatgacgatgtagataatcagctatttgaagaggctcaagtcactgagactggattccgttcgccttcagcttcagacaattcatgtgcgtattgtggtatagattctgcaaagtgtgtcatcaaatgtaattcatgtaagaaatggttttgtaacactaaaaacggtacaagcagctcccacattgttaatcacttagttttatcccaccataacgtagtttctttacatccagattctgacttaggggataccgttttggaatgttataactgtggacgtaagaacgtgtttttattgggatttgtttccgctaaaagtgaggccgtggttgttttactttgtagaataccttgtgcccagacgaaaaatgcgaactgggatactgatcaatggcaaccattaattgaagacagacaacttttatcatgggtcgcagagcaaccaactgaagaagaaaaattgaaagctcgtttaatcactcctagccaaatttccaagttggaggcaaaatggagatccaataaagacgctacaattaatgatattgacgccccagaggaacaggaagcaatcccacctttactattgagatatcaagacgcctacgaataccaaagatcttacgggtctttaatcaaattggaggccgactatgataaacaactcaaggaatctcaagctttagaacatatttctgtttcatggtccttagctttaaataataggcatttagcatctttcactttatctactttcgaatctaacgagttgaaagttgccatcggtgatgaaatgatactatggtactctggcatgcaacatcctgattgggaaggtcgtggttacattgttcggttaccaaatagcttccaggacacattcacattagagttaaaaccaagtaaaacgccacctccaacacatttgaccactggttttactgctgagttcatctggaaaggtacctcttatgacaggatgcaagacgcattgaaaaaatttgccattgataaaaaatctatttcaggttatttgtactataaaattttaggccatcaagtggttgacatttcatttgatgtcccattacctaaggagttttcaattccgaattttgcacaattaaactcatcccagtcgaacgctgttagtcatgtattacaacgtccgttatctttaattcaaggcccaccaggcactggtaaaacagttacttcagcaacgattgtgtatcacctttccaaaatacacaaggatagaatattggtgtgtgacctgcaggcatgcaagctggcactgccgtcgttt

SEQ ID NO: 80876 - DNA, 711 bp, Saccharomyces pastorianus
atgctgcaggtgactctagaggatcccctgatggttctttccaacaatttgcgaccgctgatgctattcaagccgccaaaattcaacaggggtaccgacttggccgaagtagccccaatattatgtgctggtgttactgtatataaagcactaaaagaggcagacttgaaagctggtgactgggttgccatctctggtgctgcaggtggcttgggttccttggccgttcaatatgcaactgcgatgggttacagagttctaggtattgatgcaggtgaggaaaaggaaaaacttttcaagaaattggggggtgaagtattcatcgactttactaaaacaaagaatatggtttctgacattcaagaagctaccaaaggtggccctcatggtgtcattaacgtttccgtttctgaagccgctatttctctatctacggaatatgttagaccatgtggtaccgtcgttttggttggtttgcccgctaacgcctacgttaaatcagaggtattctctcatgtggtgaagtccatcaatatcaagggttcttatgttggtaacagagctgatacgagagaagccttagacttctttagcagaggtttgatcaaatcaccaatcaaaattgttggattatctgaattaccaaaggtttatgacttgatggaaaagggcaagattttgggtagatacgtcgtcgatactagtaaataa

SEQ ID NO: 80877 - DNA, 2163 bp, Saccharomyces pastorianus
atgtgtggcatttttggctattgcaattttttaattgagaagacaagaggagaaatcatcgacactttaatcgaagggttacaggcattggagtacaaggaatatgactccagtggaatttcgatccaaggtgatgagctgaagtctctcaatatttataagcaaaccggtaaaataagcagtttgaaggaagaaatcgacctttacaatcttaataagaacctgccctttatttcgcattgtggcattgcccatactaggcgggcaacacatggagggctaagacgtgcaaattgtcatccacataactcagatccatctaatgaatttgttgtggtacacaacggggttattaccaacttcgctaatttgaaagccttattgatggcaaagggctatgtgttcaaaagtgacactgataccgaatgtattcctaaactgtacaaacacatttatgatacaagcattgaactcgggtacaacctcgatttccatgtattaacaaatttagtacttaaagaattggaaggctcttatggtctgctatgcacttcttctcattttcccgatgaagtggttgccgcaagaaagggttccccgttagttattggtgttaaaggtaaaactgacatggacgtaaactttgtcgaggtggaatatttggatcaagaagaagactacttgaagcttaatactcaaaccaagagttctggtaatgtcttggctgccgcacctgtaaaatataacacttgtttaaggaagtcacccccccttcgttcacaatacctgagaaactctacaacttctacattcaatcatggctcatccacagaaacgccagccgagaacggcttgccgcgacccatggaattctatttgtcatccgattgtgcatcactagcgcggtatgtgagtaaagtagtatatttggaggataatgatattgcccatatctatgatggggagcttcatatccattgttctaaaattggttccgaggacttttcatttagaacagttcaaaaattagaattggagttgtccaaaatcaaaaaaggcccttacgataattttatgcaaaaggaaatatacgagcagtgtgaaacaacaaaaaatgtcatgagaggaagagttgacgcctttacaaacagagtagttttgggaggactagaaaattggttgacagaattgagaagagcaaaacgaataataatgattgcatccaaggcctccttccattcatgcctagctgcccgtcccatctttgaggagttaatggaagttccagtaaacgttgaattggccttggatttggttgaccgcaattgttgcattttcaggaacgatgtttgcatatttgtttctcgaagtggggagacaactgatacaattaatgctttgaactactgtatcaaaaaagaggcagtcacaatcggggtagttaattgcagcggttcctctatctcaagatttacacattgcggtgttcatacaaacacaggccccgagaaaggtattgcaacaaccaagtcttatacttctcaatacatcgctttagtcatgattgccctatggatgtcggaagatttggtgtctaaaatagaaaggaggaaagaaataattcaagccttaactatagtcccaagccaaataaaagaagttttggagcttgaaccattgattattgaattgtgtgacaagaaactaaaacagcatgatacatttttgcttttaggaagaggttaccaatttgcctctgctttggaaggcgcctcgaagatgaaagaaatttcttacgtgcattctgaaagtattcttaccgacgagctaggacacagagtcttagctgtggcatctgataatccgccaattatcgcctttgcgacaaaggatgctttttcgcccaaaatcgcgtcttgcattgaccaaataatagaaaggaagggcaatccgattatcatttgtaacaaggggcataagatatgggagcaagacaaacaaaaaggaaacgttgttacacttgaggtaccccaaaccgtagattgtctccaagggatacttaacgttattcctttacaattaatttcttactggttagcgatcaagaaagacatcggagttgatttgccaagggactcggcgatgtcggccccggatatataa

SEQ ID NO: 80878 - DNA, 1176 bp, Saccharomyces pastorianus
atggttcctgtaacgaaagtagttacaccaatcaaatctgctcttaaaaaatcgtcaggatcgcccaaccatgactcatccatgtactctgataactctcccgccaatggcgcatatctgtctcttacgactgctgaaaatacgagattaaatgctcaaatgacgatgtccgacagcgtatcacgcagagcaagtgtaaaacgatcttctataaaaagacctcagtcagtaggccagttcagaagcatcagatcaaattcgccttctcctccagagaaaataaacaataaacgccattctgctatacccctaggaaccccagagaagggtaaaccaaaaagaaattcggttatggcttctctgtctaaaaattcgcagcaaattcaagagcccgcaagtgtatatgagtcaaatggcccaaataaaccgaaaaaccaaatcaataagaatataaagagaggatcacagatcgcgcaaaacaataaaccttcaacgaaggacatgaatagtattttgtaccccaaagaaccacctcctcgcaaatctagttttgagaagacgagaagcaatgaatcccatctcggatttaaaaagctttctttgagaaatggtaattttgaggaggcattgagtgaaagctataatgggcaagctagccagaatagcacaaatgtgaatcgaaccgatacagcacaggagtttttcaaatatttgggtcattcatcaagatttgcggattcagactcagaagatgagtcccaatttttcaaccaaggcccatcaaaatacaacacagaaacagaaggcaataaaaccagcggtaacaaaaatagtaatggtggtaacggtgctttttcgcttttcaagagcaaaagtaagcaaaaagaaaataatgtggtttcccctggagtctcaagtcctaatcatactaccaccgatcctgccattacaagtaaaaaggtggacaagaaattcagcgggttatctttaagagctgccagtgaagctgaacctgcaaaaaattcaaacccttcgatgaccaataggttacgcttctctagtaatccagagaacggcgaaaacaggctcccacaagcacaggaagtcagcgttacaaaagaaaagaagggtagtttcggcaaaaaactgaaaaaaatctttggtagaaagaaatag

SEQ ID NO: 80879 - DNA, 1434 bp, Saccharomyces pastorianus
atgtttagaagaagaacaactgcaccagaaatggaacaggcggacccgacagcagtggcagctgcagcaagtatcggtaaattatttatgaagaagggtaatcaatctgataacgaacaaaggccgacctatcgatccgcttcgatgacaaacttaagaaaaccttctgcccccaaaaaaatgtcttcaatttctagtatatcatcggaatctagaaggagcgatggtaaaggtcgtcccgggaaaataaacagccttacccaacggtcatcaatggggaagggagattcattaaattctcctttaacgaaggaaccgcagcacaaagctaggtctcataatagaacttcgagtctccctaaccagagaggtcagcaaagcagaaacagttctggtttacaacgtcaaaagtccaaaacacaccaaagaataagctatgatgaggctcaacgtacgttcaaggattttggcggaccacaggccagaggaattttaacgggacaacaccgtactgaaaaccctagcgggtctattcctttgaggactacgcgaaagtatattcctgggcccaacgggctggttgcaattgaggtccccgttgaaaaaccaagcaatgccaatacttctaaatcgctaaggcgttccaactctgcccacagtgccttgaatgcaagaaatggttcacttttaagaaaaaaagtatcgcaggaatctttacattctcaaccaaagaagacttcgtctttagggaatacatcaagtacacaagcaaaaaaaggccagaaggcggttcaggagagaaatcttgccaagaaacatccaataaattcaaatgttcctctcattgaaacacaagttcgtgaagaaacagaccaagagttgaaacttgataattctaactcttccgaatccgaaacagtagtcaatagcgaaaataatctagaaaaaccttcttcactaaacattgaaaaagatgatctaagcaaactaatacatgaaaacattgagttagaaagttttattgaagaaaaagggaaggaaaaacctttaaattctgatcaagaagatgttttcataagcgaaaaaactgtaaaaggcgatgtacaatggccaaaaaataaccgtcaagcatctactcttgagaaaacttttaattacgacaacgaagagaagagggaggggaataaaccagtagcagaacatcctcttccggaggccgaagtggatgacaagtcggttgaacaactgaacaacatttcttctagcggcagttattcggcccaaggatcagttgaaaactccaaaccagaaaatggcaataaaaatctagagaatgacacaacatcgtctcccacacaagaccttgatgaaaaatcccgctcaatagaagagaaggataccttggaagggaccgagagttcaaaaaaaagttga

SEQ ID NO: 80880 - DNA, 240 bp, Saccharomyces pastorianus
atggatacggccaaaaaaaaaaaaaagcatataaaatggagatttcttgattattcattattaaaaaatcctttatatgttacagtgcatggaagccatcgttcagaagttgaacgagcacgaaaaagaataaaatacataacttgtacaaggagagaatttctgccgagagtccctatttctttctaccaaagatttttttcagttttttgccgaaactacccttcttttcttttgtaa

SEQ ID NO: 80881 - DNA, 816 bp, Saccharomyces pastorianus
atgctggccaccgaaccagctaggatagtgggttttagagattcatatttattttttcaaactcaccccaacctttataagttcattctgaatcaaactcaaaagaacgacttgatagaccgtggcgttttaccttattcatatagaaatagacaaatcgctctagtcaccgctagaggcgtgtttaaagaatttggtgctaaaatcattcgtggcggcaaacatataaccgatgattattatgcttctgaactaagaacaaagggaaatgtaattgaaggaaaacttgctggtgatcctattgataaatctgcaagggccttagaaaccatgatgtatcctgcttccgagaatggcataaaccctgcaaaaaaccaggtggaattctttgaacacaggccacatggtcacatgagtaattctaatattattgcatcaggtagtaagctgagctctacaaattggctctatcagcattctgctgcgtgtagtagatttaatagcgatttgttttatgatagagtgaaggttcttcttgtagatcaacaaggcttgagagatgcatacacaaatatattacacataccagaatccacacagtcaaccactgttttaggatggaggagatcaaaaaacgatagtcccagcgacacaagcattgtgtatgagaccgttatacacgataacgatttgaataaaccgaaaacgggactgtcggaaatcccgaaagagatctatgaagacgttgttgatgaagacgttttaagggctatcaccgaacaacaaaatttcgaaaaatgcaacgaatatatttag

SEQ ID NO: 80882 - DNA, 162 bp, Saccharomyces pastorianus
atgtcagattcagagggaggtctagcttccgaagttgaacatgagaagcggtcaagatctactagcaacagacccaattatgcaattgatactgaggatttagatattgatgaaaatgatgagaatgaagatgatgattacagagaagaagaagcaatgagg

SEQ ID NO: 80883 - DNA, 357 bp, Saccharomyces pastorianus
atgaaacgtgtaagtaaaatcaagtggtggaacatcgaggaaaatatactaaaggaactaaaagtcgataagagaacttttaaatcgttgtacataaaggaagatgatagtaaattcacaaaattttttaatttacgacacacaagaataaaagagcttgacaaaagtgaaattaatcaaataacataccttcgatgtcaagcaatagtttggctatcttttcggactttgaaccatatcaagctacaaaatgtatctgaagtttttaacaatatcatcgtacctagagcattgttcgatagtaaacgagtagagatttatcgatgtgaaaaaatctctcaggttttggtaatataa

SEQ ID NO: 80884 - DNA, 981 bp, Saccharomyces pastorianus
atgccttctttcaatcctgttagattcttagagttaccaattgacattagaaaagaagtttacttccatttagatggtaatttttgcggagcacatccctacccaatagatatattatacaaatctaatgatgtggagcttccaggaaaaccaagttataaaaggtctaagagatctaagaaattattgagatacatgtatcctgtttttgccacgtatttgaacattttcgaatactctccgcaactcattgaaaaatggcttgagtatgcattttggttgcgctatgattgcctggttttggactgtttcaaagtaaaccatctttatgacggaacgcttatagatgcattagaatggacgtaccttgataatgaacttcgactggcctacttcaataaggccagtatgttagaagtttggtatacttttaaagagtacaagaagtgggtgatagacagtgttgcttttgacgagcttgacttacttaatgtaagtaatattcaattcaacattgataatctaactccacaactagtagacaaatgcttatcaattttagaacagaaagatttattcgcaacaatcggggaggtacaatttggacaagatgaagaagtaggagaagagaaagatgttgatgttagtggagctaattctgacgaaaactcctcacctagctccacaattaaaaacaagaaaaggtcagcatccaaaagatcacattcagataatggcaatgtgggagcaacgcacaaccaactaacaagtatttctgttataagaacaataagaagtatggaatccatgaagagcctgcggaagatcactgtgagaggagagaaattatatgagttgctaataaattttcatgggttcagagacaatcctggtaaaacgattagttacatagtgaaacgtaggataaatgaaaatacgcctatcacgcatgaatcaaatttccagaaccggactagctga

SEQ ID NO: 80885 - DNA, 147 bp, Saccharomyces pastorianus
atgaaaatacgcctatcacgcatgaatcaaatttccagaaccggactagctgactttacaagatgggacaacttgcaaaagcttgtattacgtagagtagcttacatcgacctgaatagcattgtccttcccaaaactttcaaatct

SEQ ID NO: 80886 - DNA, 891 bp, Saccharomyces pastorianus
atggttttatgtaatcttcagaatattttgataaaagcattaagggtagggccagtgcctgaacatgtctcctttatcatggatggtaaccggagatatgccaagtcaagaaggctaccagtaaaaaaaggccatgaagctggtgggttaacattactaacactactgtatatctgcaaaagattgggtgtaaaatgtgtttccgcctatgcattttctattgaaaattttaatagaccaaaagaagaagtagatacgctaatgaatttgtttacggtaaagcttgatgaattcgcaaaaagagccaaggactataaggatcccttatacggatctaaaataagaatagtaggtgatcaatctttactatctccagaaatgagaaaaaaaattaaaaaggtggaagaaatcacacaggatggagacgatttcactttatttatatgttttccttacacttcaagaaatgatatgttacatactattcgtgattcagttgaagaccatttggaaaataaatcaccaaggattaatataagaaaatttactaataaaatgtacatgggtttccattccaataaatgtgaattattaatcagaacaagtgggcataggaggctctcagactatatgctatggcaagtacatgaaaatgccaccattgaatttagtgatacgttgtggccaaattttagcttctttgctatgtacctgatgattctcaaatggtccttcttttccaccattcaaaaatataatgagaagaatcactcattgtttgaaaaaatacatgaaagcgttccttcaatatttaaaaaaaagaaaacagctatgtcattgtacaactttccaaacccccccatttcagtttcggttacaggagatgaataa

SEQ ID NO: 80887 - DNA, 171 bp, Saccharomyces pastorianus
atgaaaatgcccagtattattcagattcagtttgtagccctaaaaaggcttttggtagaaaccaaagaacagatgtgcttcgcagtgaaaagtatatttcagagagtatttgagtgggttatgtcattaagcttgttttcatggttttatgtaatcttcagaatattttga

SEQ ID NO: 80888 - DNA, 960 bp, Saccharomyces pastorianus
atgcaagtaaggaaaaaagatacccaaaagatttacgctttgaaggctctgagaaaagcatatattgtatcgaaatgtgaagtgacacatactttagcggagaggactgtcctagcaagagttgactgcccctttattgttccgttgaagttctcattccaatctccggagaagttgtacctagtattagctttcattaatggcggtgaactgttctaccatttacaacacgagggacgattcagtctagcacgctcccgtttttatattgcagaactattatgtgctctcgattcattacacaaacttgacgtcatttatcgtgacctaaagcctgaaaacattctattggattaccaaggacatattgcactgtgtgattttgggctttgcaagctgaacatgaaggataatgacaaaacagacactttctgtggtactcccgaatatttggcaccagaaatcttgttggggcagggctatactaaaacagttgactggtggacattaggtatcttactgtatgagatgatgacagggctgccaccatactatgatgagaacgttcctgttatgtacaagaaaattctgcagcaaccgctactatttcctgatggatttgaccctgcggctaaagacctattaattggcctcttaagcagagacccaagcagaagactcggcgttaacggtacagatgaaattcgtaaccatcctttctttaaagacatctcatggaaaaagctacttttgaagggctatattccgccttacaagccacttgttaagagtgaaatagatactgcaaattttgatcaagagttcactaaggaaaaaccgatcgatagtgtagtggacgagtacttaagtgcaagtattcaaaagcagtttggtgggtggacgtacattggtgacgaacagttgggtgattctccttcgcaggggagaagcattagttag

SEQ ID NO: 80889 - DNA, 1041 bp, Saccharomyces pastorianus
atgcattcctggcgaatatccaagtttaagttaggaaggtccaaagaagatgatgggagtagtgaagatgaaaatgaaaaatcgtggggtaatggcctgtttcatttccaccatggagaaaaacatcacgatggtagcccgaagaatcataatcatgaacacgaacaccatataagaaagatcaatacaaatgagactctcccaagttccttaagttctccaaaattacgtaatgatgcatccttcaagaatccatcggggataggaaatgacaattctaaggcttccgaaaggaaagctagtcagtcgtctactgagacgcagggaccgagttcggaatccggactaatgacagtgaaggtgtattctggtaaagattttactcttcccttccctatcacctctaactctactattttacaaaaactactaagttccggcatccttacttcatcatccaatgacgcttccgaagttgcagccataatgcggcagctaccacgatacaagagagtggatcaagattcagcaggggaaggcttgatagatagagcttttgccactaaattcattccttcctctatattgttacctgggtcaacaaattcaagcccattactttattttacaattgaatttgataattctattactactattagtccagatatgggaacgatggagcaaccagtgtttaacaaaatatcgacatttgatgtaacaagaaaattaccatttttaaaaatcgatgtctttgcaaggattccatccctacttttaccctctaaaaactggcaacaggagattggcgagcaggacgaagtactgaaggagattttaaaaaaaatcaatacaaatcaggatatccatttggactccttccatttacctttgaatttaaaaatcgattctgcagcccaaataagactatacaatcaccattggatttctttagaaaggggatatggtaaattaaatatcacgcggactacaaaccttctaagaacaagcctctctccattgatgactttgatctattga

SEQ ID NO: 80890 - DNA, 240 bp, Saccharomyces pastorianus
atgttttcgaaagagtaccgtcaacctaggacacatcagcaagagaacttgcagagcatgagaagatcttccataggatcacaggacagttccgatgttgaggacgttaaggaagggagattacccgcagaagtagaaataccaaagaatgttgacatctctaacatgtcgcaaggtgagtttttaagactttacgaaagtttgaggaggggggaacccgacaataaagtaaatagataa

SEQ ID NO: 80891 - DNA, 597 bp, Saccharomyces pastorianus
atgcagaacaaagctgctacaagaagatctgttcctaatcctgcttccactctcactgcatccaaaagtaatgcccgtccttctccccctactgctgccactcgtgctacacccgctgcagccgcaatgggctctgatagacaggcaaatatccctccaccacctcctccacccccaccctcttcaaagccaaaagaacccatgtttgaagcggcttacgatttttctggttcaggatcaccatctgagttacctttaaagaaaggagacgtaatttacattacaagagaagaaccaagcggttggtctctcgggaaacttctggatggctctaaggaaggttgggtgccaacagcttacatgaaaccacattccggaaataataatatccctactcctcctcaaaacagggatgttcctaaacccgttctgaattctgtacaacatgataacacctctgcaaacgttattccagctgcagcccaagcaagtttgggtgatggtttggcgaatgcgcttgctgctagggccaataaaatgagattagagagtgatgacgaggaggctaacgaagatgaagaggaagatgattggtaa

SEQ ID NO: 80892 - DNA, 1029 bp, Saccharomyces pastorianus
atgtatgaaatgtatgaaaagctcaatatgcttgaagaagcccaaaatttgtaccaagaattattaagtcggtttttcgaagcgctgaatgttcctggcaaagttgatgagagtgaaagaggcgaggttttaagaaaagacttgagaatcttgattaaatcgttagaaatcaataaggacatagaaagtggcaagagaaaattgctacaacatttacttttagctcaagaggaaattttaagcaaatcgccagagttgaaggaattttttgaaaacagaaaaaagaagctctcgatggtaaaagacatcaatagagaccctaatgatgattttaaaacatttgttagtgaggaaaatattaagtttgatgagcaaggctatatgattttggatctggaaaagaatagcagcgcttgggaaccctttaaggaagaattttttactgcgagagatttatatacagcttattgtctgtcatcaaaagacatagctgcagctctaagttgcaagataactagtgtggaatggatggttatggcagacatgccaccaggacagatattgctatcacaggcaaatttggggtcattgttctatcttcaagcagaaaagctagaagctgacttaaatcaattagagcaaaagaaaagtaaagagtccaaccaagagttagatatgggaacatacataaaagccgttagattcgtacgcaaaaatcgtgacttatgtctggaaagagcacaaaaatgttacgacagcgttattgcgtttgccaaaagaaacagaaaaattaggtttcatgtgaaggatcaactggatccttcaattgcacagtcaattgctctatctacctatggaatgggggttttaagccttcatgaaggtgttttggctaaagctgaaaaactattcaaagattcgatcactatggccaaggagactgaatttaatgaactccttgcagaagctgaaaaggaactagaaaagacgacagtcttgaaagcggccaaaaaagagggtttaaactaa

SEQ ID NO: 80893 - DNA, 543 bp, Saccharomyces pastorianus
atgcttttacaaggaatgcgtttatcgcaaaggttacataagagacatctatttgcttccaagattttaacgtggactacgaaccctgctcatatacgccacctacatgatataaggccgcctgcatcaaacttcaatacgcaagaatcggcccccataccggagtctccagcaaactcaccaactcgaccacagatggcacctaaacccaatttgaaaaaaaaaaatcgtagtttaatgtattctattattggggtttccatagtaggtttatatttttggtttaaaagtaactccaggaaacaaaaactacctctttcggcacaaaaagtctggaaggaagccatatggcaagaaagtgataaaatggattttaattacaaagaagcgttaaggcggtatattgaggcgttggatgaatgcgatcgctctcatgtcgatttattgtcagatgattataccagaatagagctgaaatgtatgaaatgtatgaaaagctcaatatgcttgaagaagcccaaaatttgtaccaagaattattaa

SEQ ID NO: 80894 - DNA, 300 bp, Saccharomyces pastorianus
atgttgtggaacttggccgctaagaaggctatgtacactttgtctgcccaagatgaagttttctctttggctttctctccaaacagatactggttggctgctgccactgctaccggtattaaggtcttttctttggacccacaatacttggtcgatgacttgagaccagaatttgctggttacagcaaggccgctgaaccacatgctgtttctttggcttggtctgctgacggtcaaactttgtttgccggttacaccgacaacgtcattagagtttggcaagttatgactgctaactaa

SEQ ID NO: 80895 - DNA, 573 bp, Saccharomyces pastorianus
atggcatctaacgaagttttagttttgagaggtaccttggaaggtcacaacggttgggtcacatctttggctacttctgctggtcaaccaaacctattgttgtccgcttcccgtgataagactttgatctcctggaagttgactggtgacgaccaaaagtttggtgtcccagttagatctttcaagggtcacagtcacattgtccaagactgtactttgactgctgacggtgcttacgctttgtctgcttcttgggacaagaccttgagattatgggatgttgccaccggtgaaacctaccaaagattcgtcggtcacaagtccgatgttatgtccgttgacattgacaagaaggcttccatgattatctctggttcccgtgacaagaccatcaaggtctggaccatcaaaggtcaatgtttggccactttgttgggtcacaatgactgggtttcccaagtcagagttgttccaaacgaaaaagctgatgatgactctgtcaccatcatttctgccggtaacgacaaaatggttaaggtatgtgatatattttctttccatgatagaatatga

SEQ ID NO: 80896 - DNA, 774 bp, Saccharomyces pastorianus
atgaaccaggaaaacatcaacaatgatacttttctatataaaaaaaataatcgcgatggtcatttatcagcagtttctcatatgtccagctcttcccgtagatcgttcatctccaatacgctgccgttgaatattgattccgcctcagaatctgataattttgtaccgcatatggatggttcaccctccaaaacaaaatcagccccagttagctacgataaggatggcatgaatgcttcagaagaagacttcagttttgataatactttagccaaaccgtatgaaccgttatatgctaggagaggagacataacttccgccggatcaactagtggagaagatagctctcagccaaagatgataacaatatctggtgagcaattgaatttgataacagaaaacaaagaattaatgaatgagttgacactggtgtctacagaattagcagaatcgataaaaagggaaactgaattagaagaaagaatacggctgtatgaaaccaataattcagcaccatcttttgacgattcttcgagtgtgtctttttctgactttgaaaaggaactgagaaaaaaatccagtaaaattgtgcaattgatccagcaattaaatgacgagagattaaagagattcattgcggaggagcagttattactccaagaaaatggcaccaaaccaagttctatggaactagtaggaagaattgaaaacttgaataaacttattgatgagagagattcagaaattgaaatgcttaaaggacatttacagtag

SEQ ID NO: 80897 - DNA, 2040 bp, Saccharomyces pastorianus
atggatgcaggtttatcgaccatggcaacaagaaacggtcagtcttctgctagagttaaattgagaaataacctcttgaataatgatataggaaatattgacattagggatgaaacacctatttcaaggaacgggaatgacagcaatattaacatccagccttcttccgtgccgctgcagcagcagcagcagcagcaatactaccgtaatggcatgaatgaggctccaatacaagcgccacttcaacaacgtcaaattcccatgcagaattattcacaacagcaacgccagcaacaacagtataattttgagtattccaatccacatatgaatgagattcccctcatgcagcataacttcaccaaaccatcactaagcaataatcgcgataatgttaatggtaagaaagcttcctcatttacccagagctcattttccaattttttcaaacataagcatcaatttgggaagtcaaagaaaaacactaaggggacaggaggtggtggagatggtgatgatgacgatgaggttatcttggatgattctgcaaactccgacctaacattcaatgacattcagaccttcggtcacaagggcggtgacaaatatggatatggtggtgattccactcctatcattccaacattggtgactaaagaccgcggcaatatgagtaatactgagtataggaagtacattactaatcaaaggaaaaccgcaatgaatgccatggctaaacaaactaaaaatggtacattagcctcgttgcctccgagagcaatgtctttgcaaagtttcccgaatggtaatcctttaatgcaagcacccactcctcatcctagatttcaaccgaataaaatggtgagcgctaattattcgagatcaaattcgttgatgagtggacctcccggacaatttcgacagccgcagcaacaaagaatgctaccgatgaacaactacaacaatcacccaggtcaattccagaataccccaccagtaatgccctctggacaacagccacctcagcaaccacgtactctgtcattaactaatggcccaagatattcaccccaaaatcctcggccattcgcaggtcatcagcagatatcacaaagacaacaacaacaacaacaacaacttcaacttcatccaatgtctgaaggctatcggacaatgtctctacaaagtcagaacgttccccaagggtttaatccatggtcaccaaatgacaacgatcgtaaagctgtgtctatgaaacagccaatcagtcaatcgtcaatttcctcaaagaataattcagcttattcaataccgaacgtacaaaacaactccctgactacattctctccgtcatctcctactgatgctacagcaatgcctaactctacaaaacaaggatcttcaccactaaaaaaacaagtgaacattgatcaacctattgaaaacaagggaaaactgaatgttttgcaattatccactcctcaacaaaacgagttaaaggaaaaagaaaggaagctagctgaaatggaaaaatctttacgtgagagagaagcactagtagaagaaaaagaaaaggaaagagctgagaaaaatactgaagcaaatgaagaggaggaaatttcacatgaatcagacgatttaaatttaagacctacgagtgcgctagagactggtttaagagatcttaaattggaaagtgaaagtgcagtcgccaatagagcgtccttgtcgactttctcatccacatttagtgattctccctccaagcaaagaatcatcaataccagaacaggtatgtataagctagaaaactctactgatatcaatgaatacgtgaccgcacaagaattcccctctcccggaaagtataactcaaattcggataatggcgaaatgaatacaacgaacgaggtcgattttgatttcaatactagtaaagggcttctttgttacaatccataccggaaagagatcccaaaagaaatgtctcagatgctaccattaagcgacgtgaatccgatggcaatggcaggagactaa

SEQ ID NO: 80898 - DNA, 1866 bp, Saccharomyces pastorianus
atgagggtgaaaccaagcgcatcactaaaattacaccatgatttgaaactctgtttgggtgaccacagcagtgtcccagtagcactaaaaggccacggcccttctacgttaacatatgatatcattgaaactttttctagcaagaggaaaacttttgaaattaaagaaataaaaaccaacgaatatgtcattaaaacaccagtctttactactggtggtgattatattctatctttggtttctatcaaggattctaccggctgtgtagttggactcagccaaccagatgctaaaatacaggtgaggagagatattccatctgctgcattcaatttttttgaacctatcaaagaagctaaaattaagcacggttctgtcactgaaattccgctcaaattaagtggagaggggccattcaccgttaagtttaaacacatggattacgatggaaacattgtgaaagaatttgaaaacaaatttcagaatagttataagcccgctttgaaagtaagtaaagaagggctttaccaattggtcgatattcgtgactcaagttgccaaggtaatgtgattgaccggaacagtctgtataaggtatctttcttggagaagccaaaatttgcaattcaagacaatcatcacattacaaaagtaacggaaaatttattctctaaagaagaagtctgtcaagggatggaaggtacggttgatttggctctatttggttctccgccattcatattagaatatgatttgatggcacccaacggtcatatttctacaaaaaaaattcaggtggcaaccaaatacgcttcactgaaactgcctaatcaaattcctggagagtacataactactattaaggccatcttcgatggcaattatggtgaaagcgacatacattttagagaacatcagtcggagctcataatcaaacagacagtgcaccccattccagacgtcgcctttgctgatggtggtaaaaacttgcgtgcatgtgctgctaatgtagatcaaatctcatttttggaaccaataaatttgaaatttttacaaggcgaaagcccattttcaatcacctttagcgtttatcacgagagtaccagtaggacagatcagtataccattgacaacattgactcagagaacttttcatttgaaaagttatatgaagggatgaagttaggtaaccatgccattactattgattctgttgttgacgcaaatggttgtgttaacagcctcatatctggaccgcgtaatcaaattcttgtgtcaattactgatgcaccaaagatacatatattagatccttctaccgagtattgtgttggggactatgttgcatatcaattaaacggtgtggcacctttcatgattaagtatgaattcaacggtattccactaaaatctaaggaacgcagctcccaatttgttagattagcatctgaaccgggcattatatctatcacttctttacaggattcatcatcacaatgcattgtcgactttacgaaccctaaattaaagagtgaatttgatgacttatctttaaacatacatcctattccttccgtaactgtttctcaaggaaattacgttactgaggatatccgcgaaggtgaccaggctgaagtaatcttttcgtttgaaggtaccccaccattctcactaacttatgtaaggacagaagagactgatggaaaacacggcaaaaggaggtcgcaggttgttgagacgcataaagtcactgatatatattctcatgaatacaaggtaattacaagcttgcaaggtacctacgaggcgattgaaattacagatgcttattgttttgccaaaaatgatctttttttcaataactaa

SEQ ID NO: 80899 - DNA, 843 bp, Saccharomyces pastorianus
atgagcgaaaatggtgatgtttatatatacaatctagctccacaaagcaaagctttttccacaccaggttatcagattccgaagtctgctaagcgtcctattcacactgtaaaaaatcatgggaatgttgaaggctacgggttggattggtcaccattgatcaagactggtgcgttactatcaggtgattgctcaggacaaatatattttacccaaaggcacacatcgagatgggtgactgataaacaaccatttactgtttcaaacaataaatccatagaagatattcagtggtctcgcactgaatccaccgtttttgcaaccgcaggatgtgatggatatataaggatttgggacacaagatcaaaaaaacataaacctgctatctctgttaaagcttctaatactgacgtaaatgtcataagttggagtgataaaattggttacttgctagcaagcggtgacgataacggtacatggggagtatgggatttaagacagtttacgccaagtaatgctgacgccgtccaaccggttgctcaatatgacttccataagggagccattacttccattgcattcaacccattagatgagtctatcgttgcggtaggctcagaagataatactgtgactttgtgggatttgtctgtagaagctgacgatgaggaaattaaacaacaggccgccgaaacaaaagagctacaagaaattccaccacaattattgttcgttcactggcaaaaggaagttaaagatgtcaaatggcataagcaaatcccaggttgtttagtaagtaccggtactgacggtttgaacgtctggaaaacaatcagtgtctaa

SEQ ID NO: 80900 - DNA, 180 bp, Saccharomyces pastorianus
gcctgcaggtctataattaagaatgagggcggtgaaggggcaagaaagtttacgatttccaacggtgtcaaaatttacaatcataaagatgaactactgccattgaatatcgatgatgttcaattatgtttcctgaagattgatacggggaacacgataaaatgcgaattcatactatga

SEQ ID NO: 80901 - DNA, 603 bp, Saccharomyces pastorianus
atgtcgttaaaggataggtatctaaatctcgaattaaaattaataaataaactacaggagttgccatatgttcatcaatttatccatgatcgaataagtggtaggataactctctttttgatagtggttggtacgcttgcattttttaacgaactgtatataacgatcgaaatgagtcttctacaaaagaacacatcagaagaactagagcgtggaagaatcgatgaaagtctgaagcttcatcggatgttggtgagtgatgaatatcacggtaaagaatacaaagacgagaaaagcggtattgttattgaagagttcgaagatcgcgataagttttttgcaaaacctgtgtttgtatcagaattggatgtcgaatgtaatgttattgtagatgggaaagaacttctgtccaccccattaaaatttcatgttgaattttctccagaggattatgaaaatgaaaaaagacctgagtttggtactaccttgcgtgtattgaggctgagactttaccactactttaaagattgcgaaatatatcgcgatataattaagaatgagggcggtgaaggggcaagaagttacgatttccacggtgtcaaa

SEQ ID NO: 80902 - DNA, 201 bp, Saccharomyces pastorianus
atgatccacatagaaagatttaatgctctacaatgcctgtgtagtccatattttgatgaactaaaacttgatgacggtaaaataaatcaaataacaactgatttgaaattgctagagttcgatgaaaatgtcgaattgggccatctatctcccgatgaactatcatctgtaaaaaaaaagctatatccgaagtctaagtaa

SEQ ID NO: 80903 - DNA, 729 bp, Saccharomyces pastorianus
atgaaaatgctgagtcacataaatataatagatctgaagtactttttctatgaaagggactcccaagatgagatttatttaaatttgatactagaatacatgccacaatctttgtaccagaggttacgtcatttcgtccatcaacgtacgccgatgtcaagattggaaataaagtactacatgtttcaattgttcaagtcattgaattacctccatcatttcgcgaacgtctgtcatagagacattaagcctcaaaatttattagtagatcctgagacctggtccttaaaactgtgcgatttcggcagtgcaaagcaattgaaacctactgaacctaacgtttcctatatttgttcacggtactatagagcaccagagctaatcttcggcgcaacaaattataccaaccaaatcgacatatggtcctctggctgcgtaatggcggaactgctattgggccaaccaatgttccctggagaaagtggtattgatcaactagtggaaatcattaaaatcttaggtactccatcaaagccagaaatttgctctatgaatcccaattatatggagcataagttcccgcaaattaaaccaataccattgtcacgtgttttcaagaaagacgatgatcaaactgtggaatttctagctgacgttttgaaatatgatccactagaaagatttaatgctgacctgcaggcatgcacgcttgcactgccgtcgtttaca

SEQ ID NO: 80904 - DNA, 183 bp, Saccharomyces pastorianus
atgaatattcaaagcaataattctccgaatctcagtaataacatagtgtcaaaacaggtttactacgcccatcctccacctacgatagacccgaatgatccggtgcagatatctttccctaccaccgaagtagttgggcatggttcgtttggtgtggtatttgccactgtttcaagaaactaa

SEQ ID NO: 80905 - DNA, 300 bp, Saccharomyces pastorianus
atgaatccgacaatgttgaacaccttgggaatattggccacacatgtcttgaaagatgaaattgacgatgattctggaaatcaaacgattctgcaactggctgcagggagtataagcaacgattgtaacactacggagttggaaattacgtgcagtcctgaaatgggaaggactattacacacaatcgaccaaatactaaagatgagtcaattcaggattcacatgggaataagaccctccaattgcctaaaatgaaaagtttcagtaccatagacggaagcattaaggatattaagtga

SEQ ID NO: 80906 - DNA, 789 bp, Saccharomyces pastorianus
atggaagaaaataaacttagtggaaataaaccgattcaacttgctacctggtcgaaccagatggggtcaccagaaaacaatggaaataatgcaaataatggtagtgatgtacagaatgttattcagaaagctttaggcttgattcgacagttgaacaataatgggctaatgagtccgatggaagaagagcattcgcaaccttcatcttcacaagagacacttagtgtcgatagagagattaatgaacagggccgtttgcgtcttcttatgcaagcaaaagatgataatacgcggaaggaagtaggcacatattctagtccgatggattctgcgtacgccagggaaaatatgttaaacgttttgcaatcattagttacgcatctgaaccaagctgtcagccaaatacaacaattaaaattcaagaacatgattcttacttcaaatgaaaataatattcagtcgaggcatgaagtggaagataatctccagaaacagcaatttgaaaggatgaagtgtcagtttctattggaacgtcaaagtttgaaggatcaattgcgaaagcgagagaataaaattgttaaatataagcagaaaattattgaaaagaacaagaaattaaacaatctagcaaaagtacttaatcaacatgcaatatctgatacctctcaaatagatagtttcagtagctcggtaaagaaaacgccttcttcgactacaacgccccaagaaatgaagtcggacatgttgaacaccttgggaatattggccacacatgtcttgagaagatga

SEQ ID NO: 80907 - DNA, 921 bp, Saccharomyces pastorianus
atgtccagtattgagaaagctgcctccctatctccaaaagatcctgagagagcaagattgttgagctttgttgtcgttggtggtggtcccaccggtgtcgaatttgccgctgaattgagagattatgttgaccaggacttgagaaaatggatgcccgaattgagtaaagaaattaaagtcactttggtggaagctttgccaaacattttgaacatgtttgacaagtatctcgttgactatgctcaagatttattcaaagaggaaaaaatcgatttaagattgaaaacaatggttaagaaagttgacgctaccactataactgccaaaactggcgatggtgacattgaaaatataccgtatggtgtattagtttgggctacaggtaatgcgccaagagaagtgtctaagaacctaatgactaaattagaggaacaggactcaagacgtggtttgttgatagataacaaacttcaacttttgggtgctaagggatctatttttgctatcggcgattgtaccttccaccctggcttgttccctaccgctcaagttgcccaccaagaaggtgaatacttggctcagtatttcaagaaagcttataaaattgatcaattgaactggaaaatgacccatgccaaagacgattcagaagtcgctagattaaagaaccaaatagtgaaaacgcaatcgcaaattgaagacttcaagtacaaccataagggtgctctggcttatattggttcagataaagccattgctgatcttgccgttggtgaagccaaatataggttagccggctcattcaccttcctattctggaaatctgcttatttggcaatgtgtctatcctttagaaacagagttcttgtcgctatggattgggctaaagtttatttcttgggtagagattcatctatctag

SEQ ID NO: 80908 - DNA, 78 bp, Saccharomyces pastorianus
atgattagacaatcattaatgaaaacagtgtgggctaactcctccaggtttagcctacagagcaagtcggggctgtga

SEQ ID NO: 80909 - DNA, 807 bp, Saccharomyces pastorianus
atgtacagtcatatttatggtgaacgtggtactttaacacactacttgatactcaaccctgccaaagatatacccatcacacatatggtggaggttccaaaggacgaaaatgacccatatgacgactttgtatatgctgctgcctggcccctaacatttggtacagccttttctacattatacgatttcaagaaagattggacttctgattcaaaagttctggttattggcgcttcaacctctgtgtcatatgcttttgtccatattgcaaaaaactacttcaacatcggcactgttgttggcatttgtagcaagaattccattgaacgcaataagaaattaggatatgactacttggttccctatgacgaaggatccatcgttgagaatgttaagaaattaaagcaaatcgtgttggaaaacgacaaatttgacatgatttttgattcagtgggtaaccatgatttcttccctgtcattgatcaatttctaaaacctaaggcgaaaaattccttttacgttacaattgcaggaaataacaaggccaattataagaatatcagttggagagatttcgtatcattgagttctattttaaaggctataaacccattcaaaaaatacaactggcgctttggacacccttatccccccaacaacttcattgaagttggcaacgaaatgatcaagaagggcacttataagccgcctattgattccgtctacgagtttgatcaatataaagaagctattgacagactgatgtccaacagagctaagggtaaagtagttgttaagatgaaatga

SEQ ID NO: 80910 - DNA, 210 bp, Saccharomyces pastorianus
atgttggtcatgcttttgggtagatatttcaaagagaacttcaaggccggtgacaagctagtagttgtgaactttcctcattcgattgctgatgcaacaagatttgaaaatgaggtttctatagtgtctaaaatctttgttccgaggaaattgagtggctctgacgtctgtaaatattacgaaactgtaggtaaagctgatatcatctga

SEQ ID NO: 80911 - DNA, 915 bp, Saccharomyces pastorianus
atggaattattggagttagcaggttacagaagctcctatattcatatcaatgagcttgtcgatcatttctttccaccagtccgccttgatagtgtcgatctaagaactaatacttccatggttcctggctccccccctaatagaacgttggataactttgactcagaaattacttcagatcgcaaaacgctatttagaggcaatcaggaagagaaattcacagacgtaaatttttggagagacccgttagtcgacatcgacaacttatcggatattagcaatgatgattctgataacatcgatgaagatactgacgtatcacaacaaagcaacattagtagaaatagggcaaattcagtcaaaaccgccaaggtcactaaagccccgcaaagaaatgtgagcggcagcacaaataacaacgaagttttagccgcttcgtctgatgtagaaaatgcgtctgacctggtgggttcccatagtagctcaggatccacgcccaataaatctacaatgtccaaaggggacattggaaaacaaatatatttggagctaggttctccacttgcatcgccaaaactaagatatttagacgatatggatgatgaagactccaattacaatagaactaaatcaaggagagcatcttctgcagccgcgactagtatcgataaagagttcaaaaagctctctgtgtcaaaggccggcgctccaacaagaattgtttcaaagatcgacgtttcaaatgacgtacattcacttgggaattcagataccgaatcacgaagggagcaaagtgttaatgaaacagggcgcaatcagctaccccacaactcaatggacgataaagatttggattcaagagtaagcgatgaattcgatgacgatgaattcgacgaagatgaattcgaagattaa

SEQ ID NO: 80912 - DNA, 243 bp, Saccharomyces pastorianus
atgataggaaaagactggacgcacttgggtgtagccaagttatttagcgagatctccaggaatggctataatatactctatctaactgcaagaagtgctggacaagctgattccacgaggagttatttgcgatcaattgaacagaatggcagcaaactaccaaatgggcctgtgattttatcacccgatagaacgatggctgcgttaaggcgggaagtaatactaaaaaacctgaagtcttaa

SEQ ID NO: 80913 - DNA, 1110 bp, Saccharomyces pastorianus
atgcagtacgtaggcagagctcttgggtctgtgtctaaaacatggtcttctatcaatccggctacgctatcaggtgctatagatgtcattgtagtggagcatccagacggaaggctatcatgttctccctttcatgtgaggttcggcaaatttcaaattctaaagccatctcaaaagaaagtccaagtgtttataaatgagaaactgagtaatatgccaatgaaactgagtgattctggagaagcctatttcgttttcgagatgggtgaccaggtcactgatgtccctgacgaattgcttgtgtcgcccgtgatgagcgccacatcaagcccccctcaatcacctgaaacatccatcttagaaggaggaaccgagggtgaaggtgaaggtgaaaatgaaaataagaagaaggaaaagaaagtgctagaggaaccagattttttagatatcaatgacactggagattcaggcagtaaaaatagtgaaactacagggtcgctttctcctactgaatcctctacaacgacaccaccagattcagttgaagagaggaagtttgttgagcagcgtacaaagaactttcagcaaaaactaaacaaaaaactcactgaaatccatatacccagtaaacttgataacaatggcgacttactactagacactgaaggttacaagccaaacaagaatatgatgcatgacacagacatacaactgaagcagttgttaaaggacgaattcggtaatgattcagatatttccagttttatcaaggaggacaaaaatggcaacatcaagatcgtaaatccttacgagcaccttactgatttatctcctccaggtacgcctccaacaatggccacaagcggatcagttttaggcttagatgcaatggaatcaggaagtactttgaattcgttatcttcttcaccttctggttccgatactgaggacgaaacatcatttagcaaagaacaaagcagtaaaagtgaaaaaactagcaagaaaggaacagcagggagcggtgagaccgagaaaagatacatacgaacgataagattgactaatgaccagttaaagtgcctaaatttaacttatggtgaaatgatctga

SEQ ID NO: 80914 - DNA, 444 bp, Saccharomyces pastorianus
atgagcagtatgctaaatgagtactattccatagaattggtgaatgatggtctagataatgacttaaagtctgtgaagctaaaatctctaccactacttttaaaaggctacattccatctctggtcaagttaccattttttatatatcgcctgggtaaagaagttgattgggaggatgaacaagagtgtctagatggtattttaagagagattgcattactctatatacctgatatggttccgaaagtcgatacatctgatgcatcgttgtcagaagacgaaaaagcccagtttataaatagaaaggaacacatatcctcattactagaacacgttctcttcccttgtatcaaacgaaggttcctggcccctagacacattctcaaggatgtcgtggaaatagccaaccttccaagtctatacaaagtttttgagaggtgttaa

SEQ ID NO: 80915 - DNA, 1326 bp, Saccharomyces pastorianus
atgtctctcagaataaaagcacttgatgcatcagtggttaacaaaattgctgcaggtgagatcataatatcccccgtaaatgctctcaaagaaatgatggagaattccatcgatgcgaatgctacaatgattgatattctagtcaaggaaggaggaattaaggtacttcaaataacagataacggatctggaattaataaagcagacctgccaatcttatgtgagcgattcacgacgtccaaattacaaaaattcgaagatttgagtcagattcaaacgtatggattccgaggagaagctttagccagtatctcacatgtggcaagagtcacagtaacgacaaaagttaaagaagacagatgtgcatggagagtttcatatgcagaaggtaagatgttggaaagccccaaacctgttgctggaaaagacggtaccacgatcctagttgaagacctttttttcaatattccttctagattaaggaccttgaggtcccataatgatgaatactctaaaatattagatgttgtcgggcgatacgccattcattccaaggacattggcttttcttgtaaaaagttcggagactctaattattctttatcagttaaaccttcatataccgtccaggataggattaggactgtgttcaataaatctgtggcttcgaatttaattacttttcatatcagcaaagtagaagatttaaacctggaaagcgttgatggaaaggtgtgtaatttgaatttcatatccaaaaagtccatttcaccaatttttttcattaataatagactagtgacatgtgatcctctaagaagagctttgaacagcgtttactccaattatctgccaaagggcaacagaccttttatttatttgggaattgttatagatccggcggctgttgatgttaacgttcacccgacaaagagagaggttcgtttcctgagccaagatgagatcatagagaaaatcgccaatcaattgcacgccgaattatctgccattgatacttcacgtactttcaaggcttcttcaatttcaacaaacaagccagagtcattgataccatttaatgacaccatagaaagtgataggaataggaagagtctccgacaagcccaagtggtagagaattcatatacgacagccaatagtcaactaaggaaagcgaaaagacaagagaataaactagtcagaatagatgcttcacaagctaaaattacgtcatttttatcctcaagtcaacagttcaactttgaaggatcgtctacaaagcgacaactgagtgaacccaaggtaacaaatgtaagccactcctaa

SEQ ID NO: 80916 - DNA, 171 bp, Saccharomyces pastorianus
atgaacttgtacaatctttttcgccttgaaaaggtcttcttatttttattgagcctccacttgttaccatacttggcctcaagatgcttgatcgatggctttcctcttattccagtatcatactcttcccatatagtctttacatcagtgggagccttcaatatcctataa

SEQ ID NO: 80917 - DNA, 1428 bp, Saccharomyces pastorianus
atggcagagttgtttttcgaaaaaggatccaaaaactctcaaatttctgagtttcttcaagatatggacctttcgatagaattatttatggaatttttagtgctgctaaatgatgaggaacaatcaaagactttatttttagatattctgaaaagatgggtccatcatacaaaaaaaagtgaaaaaagatcttccgataatcatagcgggatgccaagcgttacagataacgcgttaatactcatggacttgaaacttttggaatgtatgaacaaccgatttaaaaccaagattgttaataaacctaaggacgttcttattgttattgatcaattgatagatgttgttcaggaaaaagatgaaacaatacaggaagtagaagcagattctgacgacgaagttgaagaaggagaagaaacagaagaattggatccaaatgaaaattcttcctacaaaattatcttgcagttattatcaaccgtcctttcagaatcgtccagtagtatattattgcaaaacagttatatattgaaatccatttctagaaaattacaatctttcaacactaatgcttccgaaatagatgcattattggcatcaatagataatatattgattaacggacatactacggaaaggaacgacaacatagaaattgagatggatgaggaaaggcttgacaaagcgataactagtctacatgatcctttagtgcccataaaatcttatggtttaacagaactacgtcatctagctgaaaagaagtctccagtaatttcactggaaaaggtgttgcaaatacatttagattatttaaagaatatggaccctttcatttatctcaacgttattaaaggacttacaacgctatgtgaattagagccagaaaccatattgcctctacttgcagaattttatgctaacaaaaaaaagaaaaacagattagatgatgtgctgaaagttggagaagtgttcatcaattacattcaacgtcagaacgaattgttccagggtaaattggcttatctgattatagatacctgtcttagtattgtgaggccaaatgatagtaaaccattggacaatagatggcgtatgtcatccatgtcaatcttaggtatgtgccttcaaatcaacgccaggggtgtctcggatagaattcgcgatatgctggattgtgtatttggaatattgcaattagaacaaccacaaaatcatttgaaggacaaggatgattcttttttgatgagaagaagtgccgtacacttgatacatgatttgttgtacagtacaggatttgatttacttccctttgagtacaactacgataagctaaaaacactattatcttacgttcgtgatcaagatgaagattacatggtttgtgaacagattgacaagcttttaaccgtattagatagtttataa

SEQ ID NO: 80918 - DNA, 897 bp, Saccharomyces pastorianus
atgaatgaggataaagagcaaaagatcaacatacacgatatattgaatacaagaccgaagctcaccaaaaagacagccctagatgttttcttcgaagatctggatgacaatgtaattactcccataaacgaatatgttcttgattcaggctcatcatcatcctcttccatttatcaggcgttgaagtgctcaaataacaatgagtttgttgcagtacttttacagaaattccagaatttgcacattcacgtactagaacagcaacggaggctcatcgaaagtaaaagtgacttattgcctatctcattgcatgatatgaaatacgtagacgaactgataaatcttttgattattcatggtatagatgctaatttgtctcctacgatgaaaattccattcgattcgaaaagaataaatactttcaagaagggccaaaaaagcgcagaatatgaaacgcctcgatggcacaccataaataacgatactttatctcaagtcataactgtcttttataatgttctaactagtgagaggtcttctgactacctgagagaaataatatcaaaaggcagtgcttacgcaaacattttattaggtttgattgtgttacatttgcagttgcctaataggtactcttcacaaatgattacaaatctagaagatactcaagaaacttatactttgtttggggtttacactctactagtagaaacaattcaagacgaaaaggttagggagccaatcctttcgaagttaacaacgttaactttacgaagaccggaaaatggtctgatcagcttgattgatttcgttttgggtgtgagagatgctgaagatatagatattgaaaagtttaaccgtatctaccaaattttgatgagtaagccaaaacaatga

SEQ ID NO: 80919 - DNA, 480 bp, Saccharomyces pastorianus
atgagcacactaaaacactgcgctcatgaatttatagttgatctaaaagaatacaaagctaaaggtgttgaagctatcgatgttgccaagagattgcaagactacggattccatgccccaacgttggccttccctgttcccggaactttgatgatagaaccaacagaatcagaaaacttggaagaattggatagattctgtgatgccatgatatccatcaaagaagaaataaatgccttagtagcaggtcaaccaaaaggacagattttgaaaaatgcccctcattcattggaagatcttattacttcctccaattgggatacgagaggttatacccgtgaagaagccgcttacccattaccctttttgagatacaataaattctggcctactgtcgctagactggatgacacttatggtgacatgaatttaatatgtacatgcccttctgtagaagaaattgcgaacgaaactgaatga

SEQ ID NO: 80920 - DNA, 993 bp, Saccharomyces pastorianus
atgcaccatagcgaaacagcaatgttgagatatttacataggttgcaatctcgtgatttatctcttgctaattctatgattcctttaggttcctgtactatgaaattgaacagtactgttgaaatgatgccaatcacttggccccaattttcgaatatccatccgttccagccatcaaaccaagtccaaggatacaaggaactaattacttcgttggagaaagatttatgcagcattacaggtttcgatggtatttctttacaaccaaattcaggtgctcaaggtgaatatactggtctgagagtaatcagatcctacctggaaagcaaaggtgaaaatcatcgtaacgtgtgtttaatccctgtatccgctcatggtacaaatccggcttctgccgctatggcgggtttaaaagttgttcctgtcaactgtttgcaggatggctcattagatctggttgacttaaagaataaggctgaacaacattctaaagaactagccgccgtaatgatcacctatccttctacttacggtttatttgaaccaggcatccaacatgctattgatatcgtacattcttttggtggacaagtctatttggatggtgctaatatgaatgcgcaggttgggctaacttcacccggagatcttggtgcagatgtttgccacttgaatttacataagacattctccattcctcatggtggtggtggtccagctggagctcccatttgcgtcaaatctcatttaataccccatttacctaaacatgacgttgttgatatgatcactggaatcggcggtagcaaatccatcgattcggtctcctctgctccatatggtaatgctttaatgttaccaatttcttatgcctatatcaaaatgatgggtaatgagggattaccattttctagtgtgatagcaatgctaaattcaaattatatgatgacaagattaaaagatcattataaattcttttcgtcaatgaaatga

SEQ ID NO: 80921 - DNA, 1764 bp, Saccharomyces pastorianus
atgcttaggacaagagtgactgctctcctttgtagggctactgtcaggtcaagcaccaattatgtttcattagcgaggactagatcattccattctcaatctattttgctcaaaacagccgctacagacataacgtctacacagtacagcaggattttcaatcctgacttgaaaaacattgatagaccgctagatacttttgctagacgtcatttaggtccttctcctagcgacgttaagaaaatgttaaaaacaatgggttatagcgatttaaacgcatttatagaagagctcgttcctcccaatattttgaagagaagacccttgaaactagaagctcctagtaagggattctgtgaacaagaaatgcttcaacatctagaaaagatcgccaataagaaccactataaagttaaaaatttcataggtaagggttactacggtacgattttaccaccggttatacaaagaaacctgctagaaagtccagaatggtatacttcttatacaccctatcaacccgaaatttctcaaggtaggctagaagcgctattaaactttcaaacggttgtttcagatttgactggtttgcctgtggcgaacgcctcattgttggatgagggtacagcggctggagaagctatgctcttgtcattcaatatttccagaaaaaagaaactaaaatacgtaatagataaaaaattacaccagcaaacaaagagtgtccttcacaccagagccaagccgttcaatattgaaattattgaagttgactgttcggatatcaagaaagctgtggatgttttaaagaaccccgacgtatctggttgtttggttcaatatccagcgacagatggttcaatcttaccgcctgactcgatgaaacagctatctgatgcgttacactctcacaagtctttgctctctgtggcctcagatttaatggctttgacacttctaaaaccacctgctcattacggtgctgatatcgtcctgggttcctctcaacgatttggtgtcccaatgggttatggtggtcctcatgctgcttttttcgctgttattgataaattaaacagaaaaattccaggtagaattgtcggtatctctaaagaccgcttaggcaagacggccttgcggttggccctccaaacaagagaacaacatatcaagcgtgataaggcaacttcaaatatatgtaccgctcaagctttactggctaatgttgcttcgagctactgtgtttatcacggtcctaagggcctacagaatatttccaggaggatatttagcttaacatcaatattggcaaatgccatcgaaaatgacagttgccctcacgaactaattaataaaacatggtttgatactttgactataaagttaggtaatggcatatcctccgagcagttattggacaaggccttgaaagaatttaatatcaatttgtttgccgtggacaccaccactatttccttggctcttgatgaaacaactacaaaagctgatgttgaaaatctactaaaagtgtttgacattgaaaattcttcgcagtttctttctgaggactattctaacagtttcccaagggaatttcagcgtactgatgaaatattgaggaacgaagtctttcacatgcaccatagcgaaacagcaatgttgagatatttacataggttgcaatctcgtgatttatctcttgctaattctatgattcctttaggttcctgtactatgaaattgaacagtactgttgaaatgatg

SEQ ID NO: 80922 - DNA, 444 bp, Saccharomyces pastorianus
atgcctgacagtattttaaaaaagatggcagcaatattaccaatgaatgattcggcttttgcaactttaggcacagtggaggacaagtatcgccgaaggttcaagtactttaaagccacgatagcagatcttagcaaaaagagatcaagcgaggatcatgaaaaatacgacacaatactaaatgatgaatttgtgaacagggccgcagcttccagcaatgggattgcccaaagtactggaacaaaatctaagttttttggcgccaatccaaacgaagccaaagaaaatgaacaaattatcaatcaaatcagacaaagccaattacccaaaaataccacaagcagcaaatcaggtacaaggtccatcagtaagtcgtccaagaagtctgctaatgggagacgaggttttagaaattaccgaggtcactacagaggaagaaagtga

SEQ ID NO: 80923 - DNA, 183 bp, Saccharomyces pastorianus
atgcactcatgttcttctcgtatttggggtaaacccctttataagttcgaaaatcgtcataacccgttcagttccttgtttatgtctcacatacctgtcttaacggccatttcttattgtgtttgctgtctttcttgtttctttgatacttgtaaatcagtactatactgttcaacatcctga

SEQ ID NO: 80924 - DNA, 327 bp, Saccharomyces pastorianus
atgctagtgaccttcttacctttgtttaaaccaatagcaattcctaaatataaggacacaggttgtcttcagttagtaacatgtgaagtaggcatacatatacacgtgtatatgtgtcggcgggaagtgacgtataatgtacggctttgtatagcatcttttgtgattattttccatggcaattcttacaatggtgcaactactaaaatgttccatttgaaggcgttttcgcaatactattccttttgtaaaatggacctcatcttcaaacacaatatttttttagataggagtgaagagataagcctgtgtatgcatattaaatag

SEQ ID NO: 80925 - DNA, 246 bp, Saccharomyces pastorianus
atgaccccagctccaaaaatctcttacaagaaaggtgctgcttccaacagaaccaagttcgtaagatctttggtcagagaaatcgctggtttgtctccatacgaaagaagattgattgatctaataagaaactctggtgaaaagagagctagaaaggtcgccaagaagagattgggttctttcaccagagccaaggctaaggtcgaagaaatgaacaacatcattgctgcttctcgtcgtcactaa

SEQ ID NO: 80926 - DNA, 174 bp, Saccharomyces pastorianus
atgcctggcggctccttcgctttagaattggctcagggctggattccatgcatgttgccattcggattcttggatactttctccagtactctcgatttatacactctatacagaactgtctacttgactgccagagatatgggtaagaacttgttgcaaaacaaaaagttctaa

SEQ ID NO: 80927 - DNA, 885 bp, Saccharomyces pastorianus
atgaatcctgcttttcaaacctcacacactttctctataggttcccaagcattgcctaagtacgcattctccgcattgtttgccaacgataacctatttgctcaaggtaatatcgacaacgatttatctgtttccggtagattaaactatggttgggataagaaaaacatttctaaggtcaacctacagatatcagatggccaaccaacaatgtgtcagttagaacaagactatcaggcttccgatttttctgtgaacgtaaagacattgaacccttcgttctctgagaagggcgaattcacaggtgttgctgttgcatcttttctacaaagtgttactcctcaattagctttaggtttagaaactttatactccagaactgacggtagcgctccaggtgatgctggtgtttcatacttgactcgttatgtctccaagaagcaagattggattttttcgggccaattgcaagccaacggtgctttaattgcatcgctatggagaaaagtagcacaaaatgtcgaggcaggtatcgaaactacattacaagctggtatggttcctattactgatccattgatgggcactccaattggtattcaacctactgtcgagggttctaccactattggtgctaagtatgaatacagacaatctgtatatcgtggtacattagattccaatggtaaggttgtatgttttctagaaagaaaagttctgccaactctgtccgttttattttgcggtgaaatcgatcatttcaagaacgataccaagattggttgcggtctacaatttgaaactgctggtaatcaagaattactaatgttacaacaaggtttagacgcagatggtaacccattgcaagctcttcctcaattgtga

SEQ ID NO: 80928 - DNA, 342 bp, Saccharomyces pastorianus
atggaaaaagtcacgcagatttttatattggagactgagaaggaggttgaacgagggacaagtgatcaaaagactgcaaaaaaaacatgtgataacaaaacgaaaatgaagtacgacgacctgttgaaaatagttcagtcatggtataacgatctggatgttaatgatgacagagcagtagtggagttcatagaaagaaattcgaaaaaaattgacaagaacattgaagagtttgagatctcgctgttgatcgatgagcttaagaaaaaatttgaagacagaaggggaaacattgtccttgaagagctaactaggttggtggacagtaagcgaaagagatag

SEQ ID NO: 80929 - DNA, 102 bp, Saccharomyces pastorianus
atgaatgattgtaacgatggtgtgcgagtaccattgattatcttagccaattggaggggattgtctgtcggtcaaagggatatgtactatgaagttacttaa

SEQ ID NO: 80930 - DNA, 333 bp, Saccharomyces pastorianus
atgaagttacttaagtacgggtcttttatcgttgacgctctggttgactacaaactacccatactgatatacattccgccctgtggtgaattaaggggcggatcatgggttgttatagatccaactattaatcctgaacaaatggaaatgtatgccgatgttgaatctaggggaggtgtgttagaacctgacggagtagttagcataaaataccgtaaggagaaaatgatagagacgatgattcgattagactccacatatggacatttgagaagaacgttgacagaaaaaaagttatctttggaaaaacaaatgatcttacgaagagattga

SEQ ID NO: 80931 - DNA, 1719 bp, Saccharomyces pastorianus
atgcatgatcaagttagccaagcttgctctgattcagaccgagaccaagactccacagctgaaaaaaatgttgagggatctgcaaaacataatttggacattcgggtgtccagttcggaaattgagtctgtggaaccattgaagccagaatctgatcgatcaaatattttttcatccccaattcgtgttattggagctgtagttaagggagtgggtaaggtagtcgacgtagctgaatcattcgtgaaaaaaattgatgttatggattctgagagtgatgataacgttgatattggtgattataatcaagacatttttaacaagtcgaattctaccgatgcatctgttaatatgaaaagtgcaagtagcaaagagagagacagcgatgaagatgaagctgtcatactcggaggagttaccgcagaagcacataatgacaatggtaataattctcatgtgataaacatcgatcccacgacaaacggtgctaatgaagaggactccgacgtgtttcgacagcaagtaaaggacaaggaaaatttgcataagtcggaagagccgctagttgaatgtttacaatccgagcaacatttcgaaaagaaagaccacagcgagaatgaagaagaatgtgataccatatatggagatataacatcagcaaatattcacagtaatgcccccgatgatattaagagacaacaactcctaaagaatctaagtgacctagagaattattctcagaggctcactgaagattccaggagaggaaaaaatcaagaagaatcagacgaagttaatacaagccgtgaacgggatctcacgtttgaaaagtccgttaatgagaaatatgctggagcaattgaagaagacactttttcggagttagatattagcattcaacaccccgaacatgaagaagacctggacctatcaaacaatcaggagaggtcaatagaagaactaaattcagagccagaagaagctgagttgtacgaattggaaatagagggccctacagagacagcagcttctagtaaaatgaatgatgatgaaaggcaacgcggaaatataccgtccacagatcttccatctgatcctccgtctgataaggaagaagtgacagattcttatccctattcaaattcggaaaatattaccgctgaaaagagtgcgccaacatcaccagaagtgtatgaaatattctcagacacgccaaatgaagtccctatggaaattaatgatgaaattcccgccaccacgcttgagaaacacgataaaaccaatgtaacatccgttttggatgatagatcagaacatttatctagccacgatgttgataatgagccacacgataattccattaacatcaaagtaaatgaaggtgaggagcccgaacatcaagcagtggatatacctgttaaagtagaagttaaagaagaacaggaggaaatgccttcaaaatctgtacttgaagaacagaaaccaagtatggaactaatcaatgataaaagttctccagaaaataataatgatgaggaaacaaaccgcgaaaaggacaaaactaaagcaaaaaagaaaagccgtaaaagaaactacaacagcagaagacggaaaagaaaaatcacagaaggcagttctgccgcatcaaatactaaaaggcgtagggggcacgagccaaaaagccgtggacagaatacgcatccaagtgttgacaaataa

SEQ ID NO: 80932 - DNA, 3207 bp, Saccharomyces pastorianus
atgtcaaaaaaaaaagaaacctttactcaaagggcaaataaacttaatctgacgaccccaagaagaaaactgaaaatactgtcatctctccttgacgcggacgaggattccaaaatgaaagatcaacatgggtactcaagggtccacagtgataaatacagagtagcaaagcctactcagcactcgactttacatgaatctatttcctccaggcgaagcagtcatattcataataaatcccttcatgaagatagtgcgagggcattaagctgggtagattctctaattaatagggggaaaagtatacttactacactagaaaaggaagatgccttgtttgagcgtagtcttgaggaggaaagacaacgttttcagcttcatgactctttaatgaacaagtacacaggaaacagtaaatctcatcagcgactaatcgatctcaggaagagccaatacggaacggatacttctttccaaaataatgatgaaatccccttagatagtttcataagttctcccttaccggacgctgaggacgagtcgtcctcaaatatcgactccgataaggatgaagatctggaaggtaaacaatctttaatcaaagatttcgatcttgaaaatgatgaatacgagctctctgaagaagaaaagaatagtgacggccaaagtagtccttcaataatgatattatcagatgaagaatatgcagaggaaggagcactacaagatgtatcgaatgatgaatatgccgaagaggaggggcaagttgagagaaagaatatagagcaagaacaggcaaatgtagagaatgctacacaaattagttcttctgattccagtgaaggacagaattattcagagggagtagaaatggaattagaagacgacattgatgtggaaagcgatgctgaaaaagatgaaagtcaggatgaagaaggaacagaacattcggtagatttttcaaaatacatgcagcctagaacaaataatactgagacccccgttatcgaaaaatatgaatctgatgagcaccaagcccatcaaggatattcagaagacggtgcatttgatttcggtccagtaaatatttcagttgacgatgagtccgaagatgatgaaagtcaagatgaaagttactcagcaaatgctgaaaatgtgtaccaccataatgaacatgaactggatgataaggaactaatagaaaatatagaatcttcagatagtgaatcccaaagtgcacaagaaagcgaacaaggaagtgaagatgattttgaatataaaatgaaaaacgaaaaaagcacgtcagaagaaactgaaaataccagcgaaagcagagaccaaggtttcgctaaagatgcttatactaagaacaaagtggaacagcaggaaaatgacgaagaacgtgaaaaagatgacattattagaagctctctagacaaaaattttcacggaaacaacaacaaaagtgaatactcggaaaatgttttggagaatgaaactgatcctgctatagtaaaaagagaaaaccaaattaacgatgttgaaagttatgacgtaacaggaaaaagtgtcgaaagtgatttgcacgagcattcccctgatcatttgtatgatctcgctgcaagggctatgcttcaattccaacaaagtagaaattcgaactgccctcaaaaagaggagcagatatccgaatcttatttagggcactcaaatggaaacaacttatcgggcaggtctttagacgaattcgaagagcaaatacccctaaaggacttcacaggtgaaaacaataataatttaaaaacagaccgaggtgatctttcatcttctgttgaaatagaggttgaaaaagtttctgaaaagaaactggacggttctacagaaaaagaactggtaccactatccacagatactgcgattaacaattcatcattaggaaatgaagacagtatctattattcactcgatgacgctgatgctatatcagagaatcttacggatgttcctcttatggaaatcaaaacaactccgaaatatgaagtagtaatttctgaatctgtgtatagttctacttcttacgaagataacgcagttgccatgccaccgcaagtggagtacacttcaccctttatgaatgacccattcaattcgttgaacgatgattacgaaaagaagcatgacctactgaaatcaacgttagcagcccttgctccagctttcaccaaaaaggatgcaaaatttgtggaagctggagtgacgaaatcatgcttgacatctacatctgggcacacaaacatttttcacacaagtaaggaaactaaacaggtgagcgatttggatgaatctacggaaaacgttacttttgaaaatgaaaatacagatgatgaaaataaaaatcaaagtaaaaattttccagccgtggctaacagtactgacaagtcaactgaagataacacggatgaaaagtacttttcagcgattaattataccaacgttacaggagactcttcctgcgaggacataattgaaacggcttcaaatgtagaagaaaatttaagatactgtgaaaaggatatgaacgaagctgagatgtcttctggcgatgaacgcgtaaaacagaatgatgatggcagtaaaactcaaatttcgttttcaacagattcgccagacaattttcaagaaagtaacgacaacactgaattctcttctactaaatataaagtaagagatagtgatcttgaagacgacgaatcactcaagaaggaacttacaaaagctgaagtagttgataagcttgatgaagagaacagtgaggattcatatgaacaagattatgcggatccagaaccaagcaatgatgaaggcagtaatgaaaatatagttaaaggtacaaaaaaggatactcttggaatagtagaaccagaaaatgaaaaatttaataaggtgcacgaagaagaaacactttttgaagccaatgtcagttcatccgtaaatgttcaggacagagacatgcacaccgacgtcatcaatcaagaggcgcaagcgaattacgaagctggtgaaagaaaatactatatccagaatacagatacggaggaagcacacatttccattatcgaaagaatagatgagaatgcgattggaaataatatggagatcctagaaaggtcgtgcgtggaaaaaacgcagaagcgaagtgctctttga

SEQ ID NO: 80933 - DNA, 261 bp, Saccharomyces pastorianus
atggtcatatcattgatttcagcgaaagttgctaggttagtacttgctgccattccaccaacgcaacgaaacatgggcacgcagattcaatcggaaattatctcagattacaataaagtcaagcctcttgtgaaagtaacctacaaggacaagaaagaaatggaagtcgatccatcaaacatgaactttcaggaattagccaatcatttcgaccgtcactcgaaacagctggatctcaaacatatgttggaaatgcattga

SEQ ID NO: 80934 - DNA, 4695 bp, Saccharomyces pastorianus
atggatagtgatactgatgctgctgatgagaaaaaatccaaagttgaagatgcagaatacgaatcgtccgacgacgaagatgaaaaattagataagtctaatgaattacctaatttaagaaggtactttcacattggtcaatggctaagatgctctgtcatcaagaatacctctttagaaccatcaactaagaaatccaaaaagaagagaatagagttaaccatcgaaccttcatccgtcaacacatacgcagatgaagatttggttaaatccacgtctattcaatgcgcggtcaaatccatcgaggatcacggtgctaccttagatgttggtctgccaggctttacagggttcattgctaagaaggattttggcaattttgaaaaattattgccgggggctgttttcttaggtaatatcaccaaaaaatccgacagatcaattgttgtaaatacagacttttcggacaagaaaaacaaaattactcaaatctcctcaattgatgccattatccctggtcaaatcgtcgacttattgtgtgaatcaatcactaaaaatggtattgccggtaaagtttttgggttagtatctggtgttgtcaacgtatcacatttaagaacattttccgaagaagatttaaagcataaatttgctattggttctagtattagatgccgaattattgcttgtttagaaaacaaaagcggtgacaaggtcttgattttgtcaaaccttccacacattttaaaactagaagacgctttgaaatctactgaaggtcttgatgcattccctatcggttacacatttgaatcatgcagcattaaagggcgtgattccgaatatctatacttagcattggatgatgatagattaggtaaagtacattcttcaagagttggtgaaattgaaaattcggaaaatttaagttccagggtccttggttatagccctgttgatgacatttatcaattatccactgatccaaaatacctaaaattaaagtatctaagaacaaatgatattccaatcggagaattattaccaagttgtgaaataacttccgtctctagttcaggtattgaattgaagatatttaacgggcaatttaaggcttctgttccaccattacacatttcagataccaggctagtttatccagaaaggaagttcaagataggttctaaggttaaaggtagagttatatcagttaattcaagaggtaatgtgcatgtcactttgaaaaaatcattagttaatattgaagacaacgaattaccactggtttccacttatgaaaacgccaaaaatatcaaagaaaaaaatgaaaagactttagcaactgttcaagttttcaaaccaaatggttgcatcatttccttttttggtggtttatcgggatttttacctaattctgagatctcagaagtctttgtgaagagaccagaagaacatttaagactcggtcaaacagtaatagtaaaacttcttgacgtcgatgctgacaggaggagaattattgccacatgcaaagtttcaaatgaacaggctgcccaacaaaaagataccattgaaaatattgttccaggcagaacaatcattactgtcgatgttatcgaaaaaaccaaagattctgttattgttgaaattcctgatgttggcttgcgtggtgtcatctacgttggtcatctctctgattccagaattgaacaaaatagggctcagttgaaaaagctcagaatcggcactgaactgactggtttggtaattgataaagatacaagaactcgcgttttcaatatgtccctcaaaagttctctgattaaagacgctaaaaaggagactcttccattaacatatgatgatgttaaggatctaaataaagatgtaccaatgcacgcttacattaaatccatttctgataagggtctctttgttgcgtttaacggtaagttcattgggttggttttaccaagttacgctgttgatagtagggatattgatatcagcaaggcgttttatattaaccaatccgttaccgtctatttattaagaacagacgacaaaaaccagaaattcctattatctctaaaagctccaaaggtcaaagaagagaagaagaaagttgaatctaatatcgaagatcctgttgattcgtctatcaaaagctgggacgatttgtctattggtagtattgttaaagcaaaaatcaagagcgtcaagaaaaatcaattgaatgttattttagcggcaaatttgcatggcagagtggacattgctgaagtgtttgacacgtatgaagaaattacagataagaaacagccgttgagtaattacaaaaaagacgatgtcatcaaggtaaaaatcataggtaatcacgatgtcaagagccataagttcttgccgattacacacaaaatctcaaaggctagcgttttggaattatccatgaaaccatcagaattaaaatctaaggaagtgcacacaaaaagtcttgaggaaatcaacattgggcaagagttaactggctttgtcaacaattcatcaggtaaccacctatggctaacaatttctccagttttgaaggcgagaatttctctactagatttagctgataacgattcaaatttttcagaaaatattgaatctgttttcccattaggttcagccctccaagtgaaagttgcctctattgaccgcgagcatggctttgtcaatgccattggaaagagtcatgttgacataaatatgtccacaattaaagttggtgatgaattgccaggtcgtgttctaaaaatagctgaaaagtatgttttgttagaccttggtaacaaagtgactggtatttcctttattacggatgcgctaaatgatttctccctaacattgaaggaagcttttgaagacaaaattaacgacgtcattccaactaccgttttatctgttgatgaacagaataagaaaattgaactatcccttcgttctgctactgcaaaaactcgttcgatcaaatctcatgaagatttgaagcaaggcgagattgtagatggtattgttaagaatgtgaatgacaaaggtatttttgtttacttgagtaggaaagttgaagcctttgtccctgttagtaaactatctgattcttacttgaaggaatggaagaagttttacaagcctatgcaatacgttttgggaaaagtcgttacatgcgatgaagattctcgtatttctctaaccctaagagaatccgaaataaatggtgatttaaaggttctaaagacctattcagacattaaggctggtgatgttttcgagggtacaattaaaaacgtcactgattttggtgttttcgtcaaactagataacactgttaatgttactggtttggcacatattactgaaattgcggacaaaaaacctgaagatctttctgctttgtttggtgttggggacagagtaaaagctattgttttgaaaacaaatccagaaaaaaaacaaatttcattgagcttgaaagcgtctcacttctctaaagaagccgaattggcttctactaccaccaccactactactacggatcaactggaaaaggaggatgaagatgaagttatggcagatgctggcttcaacgattccgacagcgaatctgatatcggagaccaaaacactgaagttgccgataggaagcctgaaacatcttcggatgggctatccttgagtgctggttttgattggactgcttccattttggatcaagcgcaagaagaagaagagtctgaccaagatcaagaagactttactgaaaataagaaacacaagcacaagagaagaaaggaaaatgttgttcaggataagaccattgatatcaacactagggcaccagaatctgttgccgattttgaacgtctacttatcggtaatccaaattcgtccgtagtgtggatgaactatatggctttccaactacaactgagtgaaatcgagaaggctcgagagctcgcagaacgtgcgctaaagaccatcaacttcagagaagaagccgagaagttgaatatttggattgcaatgctgaatttagaaaatacttttggtaccgaagaaactttagaagaagtgtttagcagggcttgtcagtatatggactcatatactattcatacaaaactgcttggtatttatgaaataagtgaaaagttcgacaaagcagcagaattgttcaaagctacagctaagaaatttggcggcgagaaagtttctatctgggtatcgtggggtgattttttgatcagccacaatgaagagcaagaggcacgtactattttaggtaatgctttgaaggccctaccaaagcgtaatcatatcgaggttgtccgcaagtttgctcaattagaatttgcaaagggtgacccagaaaggggtcggtcattattcgaaggtttggttgctgatgcgccaaagagaattgacctgtggaacgtttacgtagatcaggaagtgaaggcaaaagataagaagaaggtggaagatttatttgagagaataataaccaaaaaaataacaaggaagcaggctaagtttttctttaataaatggttacaatttgaggaatctgaaggtgacgaaaagaccattgaatacgttaaagctaaagctactgagtatgtcgctagccatgaatctcaaaaagcagacgaataa

SEQ ID NO: 80935 - DNA, 441 bp, Saccharomyces pastorianus
atggtagcttccaccaaaagaaagagagatgaagattttccactttcgagggaagactccacaaagcagccctctacctcatcattagtaaggaacactgaggaagtctcttttccaaggggtggtgcgtctgctttgactcctttagaactgaaacaagttgctaacgaagctgcaagtgatgtgttatttggtaatgaaagtgtcaaagcatctgaaccagcaagtagacccttgaaaaagaagaagacaacaaagagatccacttctaaagattccgaggcctcatcagcaaactctgatgaagctagagctggactaattgaacatgtcaactttaaaacgttgaagaatggctcttctttgcttggtcagatttctgatatcaataaacaagaatttatgtataacattcacagacggactttctggttcatgtga

SEQ ID NO: 80936 - DNA, 1203 bp, Saccharomyces pastorianus
atgaactcaaatggtacatcagacgcaatgagcgagtcttcagaggcatcccacgaacatgaagagcctacttatcatccgccgaagccatccattgttttcagttcattcgttacaaaaccttttgaatttgttgttttcttagaagcctgtttggcatgttaccagcagtatgagggttttgacgaagataggcaagtaattttgactactttatatgacttatatttgaatttggcgcaaaatgatgtacccgagcgtatagacgactggcgttcaagagcaactggcgtattgcgtgagagcaataaattggtgtattctgccgcaagtaataatactagcaaaagggtggataactcaataatgctgttaatttcccatatggatcaaagtagtgcttcagcaaaagataagacgaaaatttacatagcttcatttgccaatgataaccccgagatggatttgctgagtacatttagggctatgacgttaaatgaagaaccaagtacttgtctcaaattcctagaaaaatatggcacagaggaacccaagctcttacaagtagcattgagttactttgtttctaataaactaatcttcaaggagatgggcggtaatgaagtactgaaagaaaaagtattgaggccaattatagaggaggaaagaatgccactgttggatataattaaagcgctatcccgtacaaatgtagcccactttgggctgatacaagacatcattattgatcatgtcaaaaccgaagatatagaaatcaaaaggaacgaaaaactaattgaatcttacgataaagagttaaaggagaaaaacaagaagttgaagaacaccattaattcagatcaacctctccacgtacccctgaagaatcaaacgtgtttcatgtgtagactgacattggatattcctgtagttttttttaaatgtggtcacatttaccaccaacattgtctaaatgaggaagaagatactctagaaagcgagagaaagctctttaaatgtcccaaatgcttggtggacttagaaacctccaacaaactttttgaagctcaacacgaagtagttgaaaagaatgatcttttgaattttgcattaaacagtgaagaaggtagtagagaccgtttcaaagttataacagagtttttaggtagaggtgccatcagttattctgacatcactatttaa

SEQ ID NO: 80937 - DNA, 1647 bp, Saccharomyces pastorianus
atgaatttcaatcattttcctcatgattttcaaatcactttcttgaaagccatcaacggggaatttctcgtagcgttagctgaatccattggcaaaccttccctaataagagtatataaactagaaaaactgccaaatagagaacaactataccattcacaagtcgaactgaaaaacggtaataatacataccctatttcagttgtctccatatcaaatgacctttcctgtattatggttggattcattaatgggaaaatcatccttattagaggtgacatttcaagagatagaggatctcaacaaaggattatatatgaagatccaagtaaagagccaataacagctttattcctcaataacgacgcaacggcttgttttgcggctacaacttcaagaatccttttatttaatacgactggtagaaatagagggcgcccaagtttggttttaaattcaaaaaatggcctggatctaaattgtggatcttttaatccggcaacaaacgaatttatatgttgcttaagcaactttatcgaatttttcagctctagtggaaaaaagcatcaattcgcatttgatctatcgctgagaaagaggatattttgtgtagataaagatcacattttgattgtgactgaggaaacaggtgcaccaactacatccataagtgttaatgaactgtcgcccacaataattaaccgaatattcatcattgatgctaaaaataaaatcatttctttgaattttgttgtttctagtgcaattattgatattttttcaacctctcagagcggtaaaaacatcacttatctgctaacttctgaaggagtaatgcataggataactccaaaatctttagaaaatcaaattaacatcatcatccaaaaggaactgtacccttttgctttacaattagcgaaacagcattcattatcaccgctagatgttcaggaaattcataaaaaatatggtgattatctctttaaaaagggactcaggaaggaagcaacagaccagtacatacaatgtctggacgttgtggaaactagtgaaatcatttcaaaatttggtgtcaaggaggttcctgacccagagagtatgaggaacttggctgactatctgtggtctttgatcaagaattctatttctcaacgcgatcatgttacccttttgttaattgttttaatcaaattgaaggatgttgaaggaattgatacttttatccagcatttcgatagaaaaggcatttggaatgaaggtgttgtgatggacgatatggatgatgtgacgtttttttattcagataacgatttttttgatttagatttaatcttagagcttatgaaagagtcagattttaagcgtctctcatacagacttgcaaagaagtattcaaaggattcattaattattgtggatattttattgaatctattgcataaccctgtaaaagccataaaatacataaaaagtttaccaattgatgaaaccctaagatgccttgtggcgtactcgaaaaaattactggaggagtcaccgaatgaaactaatgctttactgatagaagtatttacagggaagttcaaaccatccacttttgaagtggatctgggaccggagagatacgacgggcgatttttctga

SEQ ID NO: 80938 - DNA, 222 bp, Saccharomyces pastorianus
atgtccctgagctcctggaggcaattccagcttttcgagaatattcccataaaagatcctaattttggaggagattccctattgtactcggacccaacactttgcgcagctacaatagtagatcctcaaactctgatcatagctgtaaattcaaatattataaaagttgtcaaattaaatcaatcgcaagtaatacatgaatttcaatcattttcctcatga

SEQ ID NO: 80939 - DNA, 321 bp, Saccharomyces pastorianus
atggctcaagaaaccattgaagtatccttcttaccggctatggaaaagggaaacttacctgaattggaaaagctagaaataaatggtaacagattagatgaagattctgatgctttagatttgcttcaaagcaaatttgatgatttagaggttgacgattttgaagaggtcgatagtgaagatgaggaaggcgaggacgaggaagacgaggacgaggatgaaaaactcgaagaaattgaaacggaaaggcttgaaaaggaactgctagaagtacaagtagatgatcttgctgaacgtttagctgaaactgaaatcaaatag

SEQ ID NO: 80940 - DNA, 546 bp, Saccharomyces pastorianus
atggctaccttgcacttcgttcctcagcacgaggaagaacaagtttactccatctctgggaaggcactcaagttaacaaccagtgacgatatcaaaccatacctggaagaattggcagctttgaaaacctgtaccaaattagacctttcagggaatacaatcggtactgaagcttcggaagcattagctaaatgcatcgctgaaaatacacaggtcagggaatctttggttgaagtaaattttgctgacttatacacttcgaggttggttgacgaagtcgttgattcgttgaagtttttattgcctgttctgttgaaatgtcctcacttggagattgtgaacctttctgataatgcgtttgggctaagaacaatcgagttactagaagattacattgcacatgccgtgaatatcaaacatttgatcttaagtaacaatggtatgggcccttttgctggtgtaaggattggtaaggccctatttcatctcgctcaaaataagaaagctgcttccaaaccattcttggaaacttttaatctgtggtag

SEQ ID NO: 80941 - DNA, 624 bp, Saccharomyces pastorianus
atgaagcagaagttcgcggtaatgatatatccaaagatgagatcaaagaggctatgcgaaagatggttggataatcttttcatgttactatacgaagatttgaaaacttacaccgattggcaatcagagcaattgtattttgatgctcaaaacagtaaatatcacaaattaactgttgaatgggaattattcggcctttgtgcgaaaagactgggacatcttccagaagctgcgaaggctttccaaattgggctttcccaaagattttctccagtatgcgcaaagaatctattacagttttacattgacgagcataagcgtattaggagggattcagtctcagcaaactccgagttaacctcttctcaaatattgtcaagtatcaatgacatcgacagctcaatcatcgatctagtagtcaagatttgttgctggaatcatcgttggtacatcgagttctcaataatattaatagatgctctgagtgttgcagtacaagatatgggcattactaaagtacataatgaaattgcctctagattttctgacccagtagcccaattgattgacgataacattctaaattttctgaagaatttcacgaatgacactttcgataattag

SEQ ID NO: 80942 - DNA, 1626 bp, Saccharomyces pastorianus
atgttgtctcaaacctccataccggaagtgaaagaagacgtgataggctatgcgctacaccagaggagagccagagtgggacaattccaagacttgggtccgcctgatttaattactttgatcaaatcgttaccttcatcctcgagcacaacaactgctactgcctccgccaacgataatggagcaacttcaaacatcaatggacaagatcctacgaccatagttacggagttacattcccatgacaaattaaaggggcagatcggcactttcttttactgtatgggtatcgatacttcggatccaacttctattacaatctttgccaaaaagataaccgatcttttcttagacacgccccaaatttggtttggtaagaagaagcactttcacgtatccaagatttctatcagttcttggaattcgtttaggaaatatgatgttaacattatagttcacattccaggaactgtgcaaacctatattataaatagcgacggtgaacaatcgcaacttccctctgtggcagaagcgtcatctggccgcaactcacaggatttaaacgtcaacatgatttgggcggaaacgtttatgagtggtattgtacgtgacattatgattatgaaagatagtcgtgcggatggagaatcccagaatttggtagaaacactaattttcaatccattaacctcgggtgagttggaagatgttgccaataacttcattaaactgttccccttggtctatgaaaaaggtgtttatttagatgcacctactcacgttttaaatccctcgttaaccaataattatttagtggaaactttagtggaaatagttaggttaactaagagtttggaagcatgtcgtaaaatgctcaagaagttaatagaaattcatccagaagcagtaataatattaattcgtgtttattttgcgtgcgatttagagatagatgcagttgacctgatcaacgagcaactaaattccccctcttcgttcttagccgacgattcaaagactagccatatccagctaatcttcaaatccgaattattaagtattcaaagtgaattcttactggatgtcaagagagattacaagcttgccaaggaagtagccatggaggctgttaattgtgcaccaaacgaatttaaaacttggtatttattgactagaatatacatcaaattaaacgatatgccaaatgccttgctatcgttaaacgcttgccccatgtcacaggttaaggagaaatatgttcttagaagaattgcgcctattacttcagatgaaaatcttcatctgccattaccattggatgcctcaattgaggagatttcgtcattgaaccgcatggatgtccagttggagcaaaagtccgcagatccaaacctagtcaatctctctgcgtcaagtttaaagtctactttccaactagcctataaattattgacagaaattgtccaaataacaggatgggagcagcttttgaaatatagatcaaaaattttcgttatggaagacgagtaccaaggctccacttcttccattgatgaagcagaagttcgcggtaatgatatatccaaagatgagatcaaagaggctatgcgaaagatggttggataa

SEQ ID NO: 80943 - DNA, 240 bp, Saccharomyces pastorianus
atggataccgttttggattcgttggagttgtttactaaaaatgtgcacttacaattttctggtttcgaggaatgtgccatatgttactctatactacatgccgtggataggaaactaccttcgaagacatgtccgacttgtaaaaataagttccacggagcatgtctttacaagtggtttcgatcatcgggtaacaatacatgtccattatgccgtagtgaaattccatttagaaggtag

SEQ ID NO: 80944 - DNA, 1002 bp, Saccharomyces pastorianus
atgtcgtttggtggaatcaatacatttcaacagtataacacagatttagggctcggccataatggtgttagaatatccttaaactactttgatggtttgccggatccaagtcttttaaactccttgtactcgaacgagctgaaactcattttcaaatctcttctgaaaagagatgaaactacaaaagaaaaagctttaatggatctttccaatttgatcagcgactttaaccagaatgagtactttttcaatgacatttttcttctttgttggtcgcagatatatgctaaactgataattagtgattacaaggtcatcagactgcaatcacatcaaattactataatgcttgtcaaaagccttcggaagaaaatatcgaagtttttaaaggattttatacctttgatacttctcggtacatgcgaactcgattatagtgtttccaaaccttctcttaatgaattaacagagtgtttcaacaaagacccagcaaaaattaacgccttatgggctgtttttcaagaacaactattgaatttagtaaaggagattgttgtaaacgagaatgaagataccatttctgatgaacgttactccagtaaagaagaatctgagtttagctaccacagagttatagcaagtgccgtattgctgctgattaagctttttgttcataacaaagacgtctcagaacgtaattcttccagtcttaaggtgattctttctgatgagtcaatctggaaactacttaacttaaaaaatgggcaaaatacaaatgcctacgaaacagttcttcgattgattgatgttctttatacaagaggttacatgccttcccacaaaaatataatgaagttagcggtgaaaaaactattgaaatcgttgactcatattacgtcaaagaatattctaaaagtatgccctgttctcccatcaatactgaaccttttagctaccttggatgactatgaagatgggacaatatggtcagggatactctag

SEQ ID NO: 80945 - DNA, 933 bp, Saccharomyces pastorianus
atggtggaaagtgagatttttaactctctgtcttgcgggaaatcttattctgagtacacaaaactgaaccagactcttagtggcgtctttccacccgctaaatgggagagagagattgaagattacttcacttcagacgaagacataagaaaaataaaggtgagctttgagaagaatctttttgctttattggttacttctcctaataacgaatccgcaattagtcgtttattcgatttttttgtgcaattaatcgaaacagatccctcaaatgttttcaacaaatacgacggtgtatatgatgctctcaattactttttagattcagatatgattttcttgaatgggaagatagggaaatttataaacgaaattccaacgttggtccaagaatcaacatatcaaaactttgctggtatcatggcacagtactcaaactccaaatttttcaaaatgaatactgacgcgattacttcgttggaagacttttttatcgttgcgctttcttttaacttaccaaagacaataattttagccacaatgaatgagttggacaatgatatttatcaacaattaatgaaatcagattccctagaattagaattgtacattgaagactttatgaaaaattataagtttgacgacagtggggaaatatttaaaggtaataataaatttttaaatcaaaggactataaccacactttaccgaagcgcagttgccaatggccaagttgaacaattttgtgctgttttgtctaaattagatgaaacttttttttcaacgttattgctgaataccgattttctttcttgtgcattgtatgaagtttcagaagacactaatgagaaactattcaagttgtcattacagttggctaaagggaattctgaaatcgactctaagttggcccaagtgatcttgcaacatgct

SEQ ID NO: 80946 - DNA, 2145 bp, Saccharomyces pastorianus
atgccagcaattgattataggtcatccttggtgaacagcttaagtactaacacgcatttgctccttacagatgataagcctatcaatttaaaaaatatgcaaaagctcatcaggtatgctctattcttagatgccctacttgatgctcttccagagcgcgttaataaccatattgttgcatttataactgtagtttctgagctcgtcactgattataattgcctttcagaggaaccaaatgatctttactatgattttgggcatacctttttcaaacatggcaaagtaaatttgaacttttctgatattgttggaaacgttattcagcctgctaatggtggtgatgctatgcttacttttgatattgctgaaagtaattctgtctactttttttattattcaagagtattatataaggttctattgaacagcattgatactgtttcatccaccacattaaatggactattagcatcggttgaaagttttgtcacgaaaactgtgagggatcaaaaatctactgataaagattatctcctatgtgctatattactattgatgtttaacaggtccaactcaaaagatgagatgacgaaattaaggacattgctggcatctcaattgattgggattagagaagtagaacttgtcgatcaagaattcaagtcgttagctcttttaaataatctgctggatatcccacaggcagataaacagtttgttcctatagcaccgcagagactgaacatgatattccgttcaatactaaaatggttggatagtgatcttgcctacgagcctagctttagcaccgttagattgttactactagattttttcaccaaactgatgaggtttgaaggagtcagagatatgggcataacagcttttgaactttcggaaaggttgctggcagactctctatcgatgtgtcaaattgatgacactttatatttgttagaacttcgctcttcctgtttgaacttatatgaaacattgtcgcaaggcgtttccaaaaatggcgaggaaatctcagaatatggtgatgaaattcaagaaaatttgattgaactgatgtttctcaactttaatcaagaaagaaataaccaagtatccacactcttctaccagaaattgtacaaggtcatttcctcaatggaactcaaaaagttagaatctcaatacaaaagaatattcgaggttgtattgaatgataaggatatcggtagtaatattaatcaatcaagattattaactactttgttgggttctttggtggtaaaaacacagcaggatattataattgagtatgaactgaggattcaaaaacaaactggctcagacgtagatggtagtgcatctgataatgatgtaaactcaaaatttaaactacctcaaaaattattacaaaaagttactgatgaggtgccaaaagaataccttgaatacgagaataaaaattcatttattaaatatctatggtattggcacttgatactgatgtacttcaaagatacgtcttataatatgagacaaatatttattgaacaattaaaggaagctggtttaatcaatagaatgtttgatttcataacagatcaaatagatttaagagatactgagttttggaaacaggtcgacaccaaggaaatttcggaatacaacattgtcggcaataatttctctccttataaagaagacatatttgaagaatgtaaaaaacttttgggccatacactttatcagttgtttaacaacgtcggttgtctaacgagtatttggtggttaaatataaaagataggacattacaaaatgatattgaaaagtttgtctcagagttcatctccccaattttgatcaaaaatgaatttgacgatatcaattctaagatggaccgcctgacttctaatgatgatgctttgactattaaattaaataatattactaatgaagtgaaggcaagctatctgattgacgaccaaaagttggagatttccttcaaactaccaaaaaactaccctttaacaaatatccaagttaatggcgtctctagagttggtataagtgaacaaaaatggaaacaatggataatgtctacacaacatgtaattacaggcatgaatggatccgatttggatacgtag

SEQ ID NO: 80947 - DNA, 1194 bp, Saccharomyces pastorianus
atggttatagaacatcgcagcgcctttaaatatattgtcttttatttcaatcttattccatttctctcttgcaaccacggcaaagctggagctatgtctgaaaaatcagctagcaataacaaagctgaattcaaaaggcagtcatcgccattcagagaaatcatctctgcggatcacccaatttataaacctgctaagggaaggtactggctgtatgtggcgctaccatgcccgtgggcacaaagaaccttgatcaccagggccctgaaagggctagcgcctataattgggtgcagtgtagcgcattggcacctggatgacaaaggctggcgattccttgaagaaggagatgggaaaaccaatgaaaggcactggtttgacattgcaggcggaattagctcagtaaatttaaataccagtactcccgtggctaacatacccaataatgcgcatcggttgttggttgacggaacagatgaaccgcattacgggtacaagagactaagcgacttctatttcaaaacaaagccagactataagggaagattcaccgtacctgttctttgcgacttggaaacgtgcactatagtaaataatgaaagcagtgatattatcagaattatgaattccgctgcgtttgatgagtttgtcggcgaagaataccgtcaagtccgtctggtacctcggtctctagaggcacagattacagagttcaactcttgggtgtacgataaaatcaacaacggtgtatacaaggccggttttgcagaatgtgcagaggtatacgagagggaggtaacaagcctttttcagtatcttgacaaattggaaaatcttctggacaagaagtacacagatttggaggcgaagtatggtaagaacaacaaggacaagatactagatcgctactttgccatcggagacactctgaccgaggcggacgtgagactctacccaacgatagtaaggttcgacgtggtataccatcaacacttcaaatgcaatctggccaccatcagagatgattattcccgtatacacacgtggctcaagaatatatactggcgccacgaagccttccagcgcacaacggactttacccacataaaactcggatatactcgctcgcagccacgggtcaacccgattgggatcaccccactggggcccaagcctgatatccgacctctatga

SEQ ID NO: 80948 - DNA, 1728 bp, Saccharomyces pastorianus
atgctgtttacctccttgcaaaatagaatttttggaaaagtgggcagaagcgttagtgcaaaattattctttaccaaatattctggcttgaggcaactgcttttgaatattctaaacagttctattgctcaatattcgggaagtgaaagaaaatcatatcaaattgaaagcattttcttggtccttaatgtgctactgaggttacggcctacagctggctatactggtctaaaagaattcaacgtttctgtttatgaatgtttatcaaatgagaactggaagatcagagatatggcctctagagtattgcatatgctgtcggaaaattttgaagaagagataagaaaattacttgacttggcttctatcgcgaagcaaaaccagttacatggacacttactagcactccaacaactagtaccacaatacctttcaggaactagagatatggagttgattcaaaggatacttgaaaagaaaaggatgcttctactagagaacaagtgctttatcactaaaaaggcctacttaaaattgacctgctgtatattggaaacatgcgacatacctgattctattttaaaagattatatcagcactttgcggaacacatttattgctgaaaataacgaatatgttgtggatggtagcaaacagctatatcttgcacaaatcttagacatgctcttaaaatatgaggatagtatatatctcgatgatatttgcttattaggattgtattctccattttatgaggttcagctcagtacactacagtacatgaatactaactttcactgggaaactacaagaaactcagaatttcttgaacaactacaattattactcagggttccagatttgctgcctatggctaaagctttagtagtgaaaattctctcaagaaaaaagaatactttatccctgacgacctgcactgatctcctaaaaacaaataatagtgaagatacaaaacttgctgccgtttcatcactaagtgctaaattgtcttcgcaaacctttcaccaggtatggaacttgttacaaggatttttcgccgattcttgttcaaaagattttagattggcatctttagaatgtttaactgcttatccagaaagttgtaagaactccagaatactattacaactgtacaacttcttatgggacgatgattctgaaataagagaaaaggcttctttttatttgaataagaactttattcaaactgcagactgggaatataacaggaacaccagtgtgaccgctcttatattcacaaaaaagtttgttgacgtattcacaagttctgaggtggtagaagagttgtgtttacagttgtttcaatatctaaatgaatatgatatgtttgctgccgaagaatcggcgaagaattgtctatttactatagaaaaggataaccagttcatcaacgaactacaaaaggcaatgcatatattaaatatgataaaattgactggaagggatatctcaaagtgttacaaagaccagatacatcacctaaaaagtgctctattggagcacttcaacaccgaggattttaaagattccccactcggctggtgctctaatgctgaaatattttcaagaataacgcttttaaaggaactgattcaacattattctccttctgattatgagaattttatcaatgttctgactaaacattctgttcatcccctaattatcagttattcccaattataa

SEQ ID NO: 80949 - DNA, 2283 bp, Saccharomyces pastorianus
atgactacggatgtgcaattttcaagtcaggaaatcgagcttttccgtgtcaaagaattcttgattgctaataatccagcaaagatcaacaatgaaaataaggatgctgttttaactcagattgagcatgatttcaggtatttaatacagtatatcaaggacggattaccgaacttaaatgagtccacaaggttaatttttccagataccttttcgatctgtttactgaggagccatcaaataattgcaagcaaaaaaattgactctcaagaatttttatcggcggtaaaagagcaactcttaactgaagcgaatgcaaatattatctttgaatatgttcttgacttttgggctgatggtggagccccactgatgaatgccttgagagatttattcagtaaactactgaacttattgaaaatcacatatcctatgtcaaccttgaaggatgttttatttaattggatgaatgaaatattagaagtaccatctacgttgcgtgttcagtattacttgattgatgccctttcttctgattttgacctttattatattatagaaaaaaagcctcatttcatcgataactctttttcattaatgaactctgatttgctagcaaattcggtaggtaaatgcattgttagtttgctgttaaacatttacgaaaagcatttcaaaaagaacgagtcttttgtacaagaatggatacaattatggaaaagttgtgctttaaagtacattcacgacaaacaatacaccaaatccattaatctgtatattatgattccattattcaaaaatatgccaaactcggccttcacacttttcctagaatgtatgtctaacaaagacccatcacttttgctctcacttttaaagattggccaagaattggggattgaagaagaaccattttgtgataataaatataccactgtagattctgttaacaaactcatagagcaaaatgagtataaacttcaggtatttgaaatactgaccttttcgacaaaaaagtcaaagcctattcgtcccttcgtcttcaaaactataaaacagtacctatatgtgttcttcgtggacactgaacttgaacgcagaaattacttttgcagttcgatgaaacactttatatttagaaccagagactgcgcatactctttagctagggatgccagaaagcttaaaaaggctgagaaatttccggacgaacagagggaaaagttggcgcaagttgaggaggctagagcctttttggtttggctatgcaattttataaaatataatttggcccctggtactttatatcaggcgaacgtgacctcattaaaacttatgcacattctgatcaagtctggtgttgataaatctactccacaaaaatttttagacaaccaaaataagagggaatatcctttttctatcccaattttacaggatgtcacatttttaaggttgctcattgaccttttggttagtaattatgctgacgtgcgcgaattatctaaagaaatgctatttataatgataagcgctgatgaatctagaggtctttttttggataccttagacgcaaatgctttgaagtggactgcaacctctcttttaagtgactatgagaaaggtgatgctggagctaccgtatatgagttcatattcacagtcatgggctctcaaagaagcttcattgaccagacaattgatatattagcgcagatggtacaaaatttgcaaaatgacagcattggttgtgcagaaaattcaatcggtcctcactttgctgcactaagcttgattttgaataagtttaactctgaagaaaaccatcaagatacttcaaaaataatctcaaaattaataaatcttgtactcaagagctgggaagcaacgagaaatgtagtatgtcatgattctgcccatggaatactacctgaaaaatatgctaattgtggtgtaccggaccaagttataataagtcacgcatttagggcgataaaagaagcatcatatttacttgaaacaatattaaaaaaataccctttaacaagagatcaattagacagtatcggcgatctttttattgttcagctttctactattcgtcatagtggcgccttccaagccgttttaccggggctaaaggcattttgtattcgttgtcaacttgaatttcccgctattctggaagaacttttaagcaagagtgtaaaatctttaaatccaaaactcaacatattacaagaaggtcaggaggcttgcctttcttggtcacaaccgtcttaa

SEQ ID NO: 80950 - DNA, 657 bp, Saccharomyces pastorianus
atggtgatggacatggtacgaaagaacaatagccaagctctcagcacttcacaaaagtttgatttaagacggactccaagacaaattggttatatcctttgcacggcatctcatcgtctattatcaatagaggtcatcaagtacttaaagcggcgtaaggggagaagaacgttcagacccaagctgtatgaacatcccttgtatataccgtgcgcagaacccggtaaagatatccctgcacttgaaatcgctaaggtatggtcaaacaatgacactcgcacgtttgattctgagaagaaagtacagcatatttcacaaattttttatctggaacagcctgggaagtgcatcgtacacttccaagtcacagaccttgccgtcatcgcgtcggcccaccacaacagaagaaagccattggaggtttatttcaaagccacacccgaaccaaacagatacactttcactctctttccagaatatatagtcactggtcatttttacaaaagagaccgaattgaagatttagaagtggtaacagagcgtctaataaactgcaaggaagatattcactgggttccgttagacaatacaataccaataaaggcatttttcgggcaatttgccaagttggcagcaataccgtgttccaatgcttaa

SEQ ID NO: 80951 - DNA, 549 bp, Saccharomyces pastorianus
atggaagaatttgaagaatttcgaaggaaaggggagatgtccagcagatgtggcaatcaccgtgtgctcagaaaatggaatagttgcgcttgcgagttggccgtgccctttgaggttcctgagcatgcgattacgaaattgcacatatacgacttcgacaatacattatttgcaacgccgggtcctacagagcaattgtatacacgtgagctactaaatttgttgacatcgagcacgctaccgaatggaggctggtggaatgagccggggtttctgcaggctgctattgagatctcgaagactaaaccgagaaggtattcgtggaatgcggatatcgttaaattggcggaggagtcatattctgccaaggatactatctcgatcgttttaacgggcagagaggaaagtaagttccataagttgattgagcatgctttacagacggcaaggagccattggaaatgctcagaaaatgagtttaggttccatgcagtttgcctaaaaaaaagagcaatttctgagtaccctagcaaatataaaaagagttga

SEQ ID NO: 80952 - DNA, 690 bp, Saccharomyces pastorianus
atgcagattctgcgtagtgatttcaagaaagatttttacgttgaccaaatccatagaccaagacattacggtaaggggtctgccccgctatttggtaatttcttggaaccattaactaaaacagcttggtgggttgttccagttgcttggttgcctgtagttgtgtaccacatgggtgttgctttgaagaatatgaaccagctatttgcatgtttcttgttctgtgtcggtgtctttgtttggactttgattgaatacggtcttcaccgtttcctatttcatttcgatgattggttacctgaaagtaacatcgcattcgccacacattttctactacatggttgccatcattacttgcccatggacaagtaccgtttagttatgccacctactctgttcgtcatcctttgtgctccattttacaagttggtatttgctctgctgccactttattgggcttacgctggttttgctggcggtcttttcggttatgtctgttatgacgaatgtcatttcttcttgcaccactctaaattgcctcccttcatgcgtaagttgaaaaaatatcacctggaacatcattataaaaactaccaactgggatttggcgttacatcctggttttgggacgaagtttttggcacctacttaggccccgatgccccattgtccaaaatgaaatatgaataa

SEQ ID NO: 80953 - DNA, 255 bp, Saccharomyces pastorianus
atgtcgactaatacttccaagactttggaactgttttcaaaaaagacggtacaagaacacaatactgccaatgactgctgggtcacttatcaaaacagaaagatttatgacgtgaccaggtttttgagcgaacaccctggtggtgacgagtccatcttggactatgctggtaaggacattactgagatcatgaaagactcagatgtgcatgaacaagcgactccgcgtatgaaatccttgaggacgaatatttga

SEQ ID NO: 80954 - DNA, 330 bp, Saccharomyces pastorianus
atgacaactgtttccattctgctgacaacatgcttccaaattttatacacaacactttttggagggttaaccaagtttgtattcgtaagaacaggcgggaacctatggtgctgcataatcctgcatgccctttgcaatatcatggggtttcctggtccttcaagattgaatttacatttcacagtagtagacaagaaagctggacgcatttccaaattggtctcaatctggaataagtgctacttcgcactgctggtccttggattaatatccctgaaggataccttacaaactctggtaggaactcctggttatagaataaccctttag

SEQ ID NO: 80955 - DNA, 495 bp, Saccharomyces pastorianus
atgctacaattctcaacatttctagtgctcctatacatctccatatcctatgtgctaccgctatatgcaacttcacaaccagaagggtctaaacgagataatcctcgaacgattaaatctcgcatgcaaaaacttacaattatgctaatttccaacctttttttggtgccttttttacaatctcaattatctagtaccacttcacatataagtttcaaggacgcatttttaggcttaggtattatcccaggttattacgctgcattgccaaacccttggcaattcagccagttcgtgaaagacttaacgaaatgtgttgcgatgttattgaccttatattgtggacccgttttagattttgtattatatcatttattaaatccaaagagctctatacttgaagatttgtaccatgaattcctgaatatttggagtttcaggaattttatatttgcaccaataactgaggaatattttacacgtcaatgcttttga

SEQ ID NO: 80956 - DNA, 138 bp, Saccharomyces pastorianus
atgcttttgactacgtacttaaacctaataccgcattcgcaactaagctatcaacagttattttggctaccatccgcttttttttggactttgcgcacgcacaccatgcttatgagcaattacaggaaggctccatga

SEQ ID NO: 80957 - DNA, 1026 bp, Saccharomyces pastorianus
atgtcctcttcctcaaatgcgggaaagaataatcatgatttaacgggaaataaagaaaggacagggctaatactagtaaaggcgaaaattccaaaacagggcctaccatattgggctccctcattattgagaaagaccaatgtttttgaatctaagagtaaacacgaccaagaaaattgggtgagattgtctgagttgattccggaagacgtaaaaaaaccattggaaaaacttgatttacaattgacttgcatagaatccgataatagcttacctcatgatccgccagaaattcaatcgattaccacagaactgatatgtataactgctaaatctgataattctatcccaataaaactcaattctgaactgttgatgaacaaagagaagctgacaagcatcaaagctttgtacgatgatttccattcaaaaatttgtgaatatgaaaccaagttcaacaagaattttcttgaattaaatgagttatataatatgaataggggagaccgtaggccaaaggaactgaaatttacagattttattacttcacagctgtttaacgatatcgaaagcatttgcaacttgaaagttagtgttcacaacttatccaacatttttaaaaaacaggtcagtaccctaaaacaacactcaaagcacgcattatctgaggattcaatatcgcacacaggtaacggtagttcatcgtcgcccagttcagcgtcattaacgccagtaacttcttcatccaagagtagtttatttttacctagcggtagctcgtctacttccctgaaatttacagaccagattgttcataaatgggttaggattgctcctttacagtacaaacgagacattaatgtgaacttggaatttaataaggacattaaggaaactttaattccaagttttgaaagctgcctatgttgtaggttttattgcgttcgagtaatgattaaatttgaaaaccatcttggcgtagcgaagattgatatccctatttctgttaggcaagtgacaaaataa

SEQ ID NO: 80958 - DNA, 1170 bp, Saccharomyces pastorianus
atggccaaagatttgaacgattcggggtttccaccgaagaggaagcctttgctgcgtcctcaacgatctgattttaccgcaaatagttcgacaactatgaacgttaatgcaaacacaagggggcgtggtaggcagaaacaagagggtggtaaaggcagttcgaggtcaccgtcgttacactctccaaaatcatggataagaagcgcgtctgctacggggatccttggactaagacgtcccgaactagcacattctcattcgcatgctccttccaccggaacgcctgctggaggtaatcgttctcctttgagaagatcaactgcaaatgcgacccccgtcgagaccggaaggtccttgaccgacggagatatcaacaatgttgttgatgtactgccctcatttgagatgtacaataccctgcataggcacattccgcagggcaacgtcgatccagataggcatgatttcccaccttcataccaagaggccaataattctactgcaacaggtgctgcgggctcgagcgctgatctctcacatcaatcattgtccactgacgcattgggtgccacacgttcttcgtcaacatcaaatttagaaaacttaattccccttcgaaccgaacatcacagtattgcagcacatcaatcaaccgctgtcgatgaagattcactggatatacctcccatacttgatgacttgaacgatacagacaacattttcatcgacaaattgtacactttaccaaaaatgtccacacccatcgaaatcaccatcaagacgacgaagcatgcacctataccacacgtgaagccggaggaggagtccattttgaaagagtatacgtcgggggatttgattcatggttttatcactattgaaaacaaatctcaagcaaacctaaagtttgaaatgttctatgtcactttagagtcttacatttccattattgataaagtaaagagtaaaagaacgattaaacggtttttaaggatggtagacttgagcgcttcttggtcatactcgaaaatagcactggggtccggtgtggacttcattcccgcagatgttgactacgatggttctgtatttgggctaaacaatagccgggttctggaacccggagtcaagtacaagaaattcttcattttcaaattgccactgcaatag

SEQ ID NO: 80959 - DNA, 603 bp, Saccharomyces pastorianus
atgtctgatgacaacctttcgatcaattacactattgatgcaaggattgtcggtaaagatcaaaaggcctctaaactgtatattatgaaggaaagagaatataatctaagagtaatcccttttggttttgacgccaatgtcgtcggagaaagaaccactatgagtcagctgaatgatatcaccaaactagtgcaggaaaggttggatgctcttagaaaaatctttcagagattagagaaaaaagaacccataacgaaccgcgacattcacggtgcagacttgagtggtaccattgatgattctattgaatcagactcccaagaaattttgcagaggaaattggaccaactgcacattaagaacagaaataactatttagtcaactataacgatttgaagttgggccacgatttggacaatggccgcagtggaaatagtggtcataataccgatacttccagagcttggggtccctttgttgaaagtgaactaaaatataaactgaaaaacaaatccaattcctcctcatttctgaacttctctcatttttttaaacagcagttccagctcaatgtcctcttcctcaaatgcgggaaagaataa

SEQ ID NO: 80960 - DNA, 588 bp, Saccharomyces pastorianus
atgggggtcgtttggtatttggacattctattatgtttccttccaactaaatttgaggcattacagtcctgtttggaccggaggtacgtatttcgttttcgtaattttcggatccatggctgcattcttcgttgccttttctatcaagagattaggaccagctctattactatgttttcactaatggcatttgacgctggttccataatgtttagtgtattgccagtggaacaaagctattggaagttgaactttgcgatgcaggctatcttatgttttggtatggacctgtccttcccggcatcatccattatattgagtgacgggcttccaatgcagtatcaaggtatggctggatcattagtaaacaccgttattaattattcagcgtctctatgtttaggtatgggaggcactgttgaacaccaaattaataaaagcggcaatgatttgttgaaaggttaccgagcagctgtatatctgggagttggactcgcttctctcggtgttgtgattagtgttacttacatgcttgaaaacctttggaatcgacacagaaaatctgaagatagaagtttggaggcataa

SEQ ID NO: 80961 - DNA, 1218 bp, Saccharomyces pastorianus
atgttttcaatcttcaaaaagaaaacgagcgtgcagggcacggactctgagatagatgagaaaattacagtgaaagcaaaagataaagtagtggtttccacagaagatgaagaggtgacaacaattgtttcttcaaccaaatcaactcaagtgaccaatgactcaccatggcaggaccccacttacttcagttcctttgggaaagaattaatgttcatagcgacatgcatgttggcacagttattgaatcaagcgggccaaacacacgctctctgtataatgaacgttctttcgaaatcctttaattcagaagcaaacaatcaggcatggttgatggcatcttttcccttggctgctgggtcgttcatccttattagtgggaggttaggagatatttatggattgaagaaaatgttgatcgttggttatgtcatcgtaatcgtttggtctataatttctggtctctccaaatactctaatagcgacgcgtttttcattacgagccgtgcgttccaaggagttggaattgcgtttattttaccaaatattatggggcttgttggtcatgtttataaggtcggttcattcaggaagaacattgttattagtttcatcggcgcatgtgctccaacaggcggcatgtttggtggattattcggggggttaattgtcactgaagaccccaatcagtggccttgggtattttatgcctttggtattgcaacgtttctaagtttattaatggcgtggtactccatcccaaacaacgttcccacaaatattcatgggctttcgatggattggactgggtccgcgcttgccattatcgggctgattcttttcaactttgtctggaatcaagcaccaatagttggctgggacaaaccttatatcattgttcttttgataatatctgtgatattcttggttgctttttttgtttacgaaagtaaatacgcagaggttcctcttctaccacgtgcaatgacgaagaaccgtcatatgattatgatattattggcggtattcctgggatgggggtcgtttggtatttggacattctattatgtttccttccaactaaatttgaggcattacagtcctgtttggaccggaggtacgtatttcgttttcgtaattttcggatccatggctgcattcttcgttgccttttctatcaagagattaggaccagctctattactatgttttcactaa

SEQ ID NO: 80962 - DNA, 351 bp, Saccharomyces pastorianus
atgaatgccagagaagtattgaatcctaccgactcaattttaagtcaagggatggtatcctccgtaagtacgagaaataccagcaatcaaagatctctttcatcgggcaatgattcaaaaggtgacagtagttctcaagagaactcaaagagtgcaactggcaaccagttggatacaccttctacactgtttcaaatgagaaggacctcttcagggccctcggcgtcccaccgtggtccaagacggcctcagaaaaatcgttacaatacagatcgatcaaaaagttctggtggcggaagttccaacacagataatgtatctgatttattccaatggcaaaacgccaaataa

SEQ ID NO: 80963 - DNA, 3774 bp, Saccharomyces pastorianus
atgatcaagacagcttctccgactcctttatctacacctatttacaggatagctcaagcttgtgacaggtgtcgatctaagaaaacaaggtgcgatggaaaaagaccacagtgttcgcagtgtgctgctgtcggatttgaatgcagaataagcgataaattactgaggaaagcgtatccaaaagggtacacagaaagcctggaagaaagagtacgcgaactggaggcagagaataagcgtttgctagctttgtgtgatatcaaagaacagcaaataagccttgtttcacagtcgcgaccacagacatcaacggataataccataaatggcaatttcaaacatgatttgaaagatgctccattgaatctgtcttctacaaatatctatttattaaatcaaacggttaataagcagctacaaaatggcaaaatggatggtgataatagcggttctgcaatgagtccattaggggcaccacctccaccgccacacaaagaccatctttgtgacggcgtttcctgtacaaatcatttacacgtcaagcctacttctacgagtttaaacgatccaaccgctatatcttttgaacaggatgaggcacctggtcttcctgcggtaaaagcattaaaatcaatgacggctcatcaacgtagcactcaattggcaactttagtttctttatccatcccaagatctactgaagaaattctgtttattcctcagcttttaacaaggataagacaaatatttggtttcaactcaaagcaatgtttgtatacggtttcattattatcttcattgaaaaatagattgccagcaccacggcttctagcaccttcaacatcaaccaagttaaaggagaaagatgaagataaaaaacttgatgatgattcggcttttgtgaaaatgtttcaaagtacaaacctctccgagtttgtcgatttgaagaagtttttaatttctttgaaatttaacattaactcgttttcaaagcaatcagaaaagccggctaatgatcaggatgatgaactactttccctcactgaaattaaagagcttttacacctttttttcaaattttggtctaatcaggtaccaattctaaacaatgaccacttcttaatatatttcaacaattttgttgaagtcgtgaagcatttatctacagaaaatttggagacgaataacactactaaaagtacagtcaccactaatcatgaaatatttgccctaaagcttctgatgatgttacaaatggggttactcgttaagattaaaatggaaaaaataaaatacactgtaccgaagaatccgaaggccaaatatgcgagattgatggcatattatcatcagctttccctaataattcctaaaaatccttattttttaaatatgtccacaacttcattaccatccttacaattgttatctttggcatccttttattatttaaacgtgggtgatatttcggcaatctatggggtaagaggccgtattgtttctatggcacaacaattgagacttcacagatgtcctagtgccgtattaagtgtacactctaacccagttctacaaaaatttgagcaaagcgagaggagattactgttttgggcaatttattacgttgacgtttttgcctcattgcaacttggtgttcctcgtttacttaaggattttgatattgaatgtgcattaccaatttctgatgttgagtataaggatcagttatctatggaaaatgaaaaagcagataaaaaagctaaaaagattcaactgcaaggtcaagtttcaagcttttcattgcagataatcagatttgcgaaaatattaggtaacattctagactcgatttttaagagaggaatgatggatgaacgtataacttctgaagttgcattagtacatgaaaacgcactggataactggagaaatcaacttcccgaaatgtactactttcaaataactgtaaacggaactgtgaatttagacgagattagagcaaccaatcaaagaaatactgagaccaaatttgataagaaagacataatattatttgaaaagaagattctattgctgttttatttcttggccaaatctatgatacatttaccggttattgcaaccaaacctttgcctaagaatgttgataatgccacaaagaagaaacagtcaatgttcaacaacgactctaaaggcgcaaccaaccaggaccacatgatattagatgttgatatgacttctcctgctataaggacatcatcctcatatatcattttacaacaagctaccaatgcaacgcttacgattttccaggccattaattccatgtatttacctttgccattgaatgtatcaagaacgttaatcagattttctttgctctgtgctagaggttctttggaatataccaaaggtggtgcgttattcttagataataaaaatcttctcctcgacaccatcaaagatatcgaaaacgataggcttttggatttacctggaattgcctcttggcacacgctgaaactgtttgacatgagcatcaacctgttgttgaaagcacctaatgttaaggttgaaagactggataaattcttggaaaagaaattgaattactacaatagattgatggggttaccaccggccacaaccacatccttaaaaccattatttggctctcaatcgaagaacagcctggaaaatagacaaagaacacctaatgtcaaaagagaaaacccagaacacgagtatctttatggaaacgatagtaataataacaataattctgaagcgggtcactctccaatgacaaatacaactaatggtaataagagattaaagtatgaaaaagatgcaaaacgaaatgcaaaagatggcggtatatccaagggggagaacgcacataatttccagaatgataccaaaaaaaacatgtccaccagcaatctgtttccattttcgtttagtaatacagaccttactgcgctgttcacccatcctgaaggaccgaattgtacgaatactaataatggcaacgtggatgtgtgtaacagagcttctacagatgccacggatgccaatatagagaacttaagctttttaaatatggcaccattcttacagaccggtagctccaatataggtcaaaacacgattgagaataagcctatgcacatggatgcgatattcagtctaccaagtaatttagatctaatgaaggataatatggactctaaaccggaacaattagaacccgttattaagcaaaaccctgagaattcaaaaaacaaccaatttcatcagaaaggaaaaagtacgaatatggaaaagaataatctctctttcaacaacaagagtaactacagcctaacaaagctaatgagattgctgaacaacgataattctttctcgaatattagtattaacaactttttataccaaaatgatcagaactccgcgtcagcggatccgggaacaaataaaaaagccgttacaaatgcaggtgccaacttcaaatcaccttcaactggcagtaataccagccaaggcagtatccttggaagtacaaagcatggaatggacaactgtgatttcaacgatttaggtaattttaacaatttcatgacaaatgtcaattattctggggtcgactatgattacattgtagatgcatcacttgggttggctcctttattagtggatacgcccgattatctcaaaataccaacaacgacgtctactaccgtcaaaatcgaagtacaaacagcatcatcctag

SEQ ID NO: 80964 - DNA, 141 bp, Saccharomyces pastorianus
atgaatacacatgcacaatacgtactagcgtttgccactatgctaaatgctcacgaatcccaagttgtgtggtttagatacggatggtggatattttccagatttgtcttcgttaatgaatttgatgtttatacatattag

SEQ ID NO: 80965 - DNA, 498 bp, Saccharomyces pastorianus
atgaagatgttgaggcgtacaaaggtaaatttttcaaaattgctttacaagattactaaactagcaatagtactgacgatcctatatatttattttacgcccaaaatcgtctcccgaaacaatgcatcattgcagcatatttttcctcataaatatggcgattatgaaatcaatttggtcatagcgcaccctgacgacgaagttatgtttttttcccccataatttctcaactgaattcgtactttccgagaaccgtcccatttaacataatctgcttatcaaagggcaacgccgaaggtcttggcgaaaccagggtaagagaattaaatgagtcggccgctttattgctacacaatgaaagagcagtctccgtacaggtgatggatttccaggatggtatggacgaaatatgggatattgattctataacttcttctctttcacaaaagataagatataaagaatcaaaacttgacccagattatcgttacctttga

SEQ ID NO: 80966 - DNA, 87 bp, Saccharomyces pastorianus
atgcccataattggtcccatactttctcacccagcaatcgctccaatagtagataaattagcgggagttagggttctgccagtataa

SEQ ID NO: 80967 - DNA, 1194 bp, Saccharomyces pastorianus
atgcatttcaaaaaaaaaaaagaagagcagataagtcatgaggctaagaaagataaagaaatctactggttgatgaacgtcatagatttaagtgatcctgccatcaatgtggattatgatagcttgattggcattgacaatgaggaatctcaagaaatttttgaaaatgaagtgaaggaagatggacaacaagaagagcaggaagaagcatcttcaagaaaagatgggctcatcgttgaaccagggagagatgttgagagtttgagaagggctattcgagatcagttgcttttcaagatacatagacaaaaccaatcagactgtgcagatgcgagaaagttgagtagcgatgaagaagatgaaagtcggcaacagaaattagaaagaataagagaagaattggaggagttgagaatagaaaatttaacatctgaaatgcaaactgaaatcaaggaattgtgcgaaattcaatcaaaattggcgacggaatcatctagtagattgacaaatttgaggaagaagcttctcgaaacatatgaaggccaagataccgtgatattgccaaacataattcttgatacgagcaatatcaaaagattgcaaaagttagatcagaaaatattcctgatggaacgttttgttggcataccagaagctttggaggcagaagaagataggaaatcggttcatagtaaagtcaatgaactatatcgaagtattcaacttttacaaggcgatgataaggcggaaggaaagctgcaaaagttccgggatagactcgtagaactgaacgaggaatttgaaaactcattgttaggcaagaaaatacaacaggacttgagattgaaagatgacaccgtgagcaagcttgttatgcccgaaaacaaagtaaaggagataaatagtatgtattccatgttcaagcaatatcaagattcactaccactgctggcggagaggatgaaaagtctcaataaaatgaacaacagggtgatcgaggtgtacgaaaccacgaaagggctggattcacaaataaccagcatccaaaaacaaggaaaagtttggctaaaggctttaaatgagctggataaaaaattcgatgaacaagaggttaaaattcgcgaaaatatggagcagatcaagcgtaaaattgataccctcgaagacgaagctctacagagaaatagcaaataa

SEQ ID NO: 80968 - DNA, 576 bp, Saccharomyces pastorianus
atgttagacttacaggcatttgtaagaagggtaaagtcaggagaagagccctcggaagcattagacaaaatgattgaacaggcttctgagcaaataactcaaatgtttttaagtgacaagattgacagcaataaaagtgcacaagcctgggaattaatcgaattattgagtgcgaacccagtcattccattccatgaaatcgttaacaagccattattcaaagccgcaccagaaacgggaatcatggaattggagaataatggtttaataactgtatctagagataggggtgttttacaggaaatcaggcctgccaaaccactatacagggcagcattcacatacttgatcaacgatcctgaactcgcaaaagtgctaaaaacccgttacttattaaaggttgtgggttttgaaactggtagaatcaagaaatgggaagaagaattaaaacctttggggaaagttcctgatcagaaacttttcaagaccagattggactatttatccggtaaaatcaatgccagtaatgcagtcattaccaaatgtgaagaagaaattaaaaatctatctaagtaa

SEQ ID NO: 80969 - DNA, 159 bp, Saccharomyces pastorianus
atgagcataaaaaggagcacacctagcatcacaaaatatagagagaaatattttgaaactatcctacttcttaatgctctctgctttcgagtcaaaattcttttatgcgcgataatacttcttggattcatccaaaatagcaccattatatgccagtaa

SEQ ID NO: 80970 - DNA, 204 bp, Saccharomyces pastorianus
atgagatatatatgtttaacgaatcaggtactcgtccgaagcatttcgagtaatgtaaccccacaagtgtccctcaagaattcactgggatttttgatgaccgaaagaaagctattgcagctgctacggcgtcctttcatctccctttctttattcacggccttaagagcttgtccgctttgccccaaaagcctaattgcttag

SEQ ID NO: 80971 - DNA, 66 bp, Saccharomyces pastorianus
atgtatgagcaggctctgacacccgagttcttccgtcaatggtgggatattattcaatccaaatga

SEQ ID NO: 80972 - DNA, 81 bp, Saccharomyces pastorianus
atgacagggtttaaagtttcttctttttttcatattctggcattgtcccgctttttcaacgcaggaagggaacgagcttga

SEQ ID NO: 80973 - DNA, 1908 bp, Saccharomyces pastorianus
atggccacttccaaaacctcatctacttcctccgacttgagtaggtctagtgtaatattcggcaatagttctaccgttacaacctctccatcagcgtctatcagtttaaccgcatctccacttccatcggtctggtctgatatcacctcttcggaagcttcatcaatttcctctaacctggctagctccagtgcgccatctgacaataattccaccattgcaagtgcctcgctaattgtcaccaaaacaaaaaactcagtcgtttcatcaattgtctctagtataacttcttctgaaactacaaacgaatccaatttggccacatctagtacatcgcttttgagtaataaagctactgcccgttctttatcaacatccaacgctacaagtgcttctaacgttccaacaggcacatttagctccatgagctctcatacttcggtgataactcccggcttttccaccagtagtacgccactcgcaattaattcaactgtcgttagctcatcattggcaggttatagtttctcgacacctgaaacctctccaactacttccactttggttacttcagaggctccttcaaccgtttccagtatgaccacaagtgccccatttatgaataattctacctctgctagaccttcgccaagtacagctagtttcattactgaatccacttcaagcatttccagcgtgccattagcgagtggcgacgtcacctcctcattagcggcccacaatttaactactttcagtgctccttcaacatccagtgcacaacttgtaagcaaatcaactacctctagctccatcctggtcacacccagcatcgacaggtctggaaattcctcaactgcctctacaattgcaacatcactccctaacaaaactacatttgtttcttccctaagttcaacatccgctcatgccagaagtatctttaattcaactgttctagctactgctaaacaaattgaaactttaacttcaacagtcaattgcagcaacgctactcctaattacaacataaccaaaacagtaatcgtaagtagggagactactgccataggaactgttacaagttgttcgggtggttgcaccaagaatagaaagtcaaccacacttattactataacagatattgatgcttctactgttactacttgcccagaaaaagaagtaacatcgaccacaagtggacatgaggcagaacataccactagcactaaaataagtaatttcgaaacgtccacgttttcggaaagttttaaggatatgaagacttctcaggaaactaaaaaagctaaaccaggatcagaaacgatgaggagctcgtcatcttttgtcgaaaaaacctcaccaacaacaaaggcttctccgtcaacttccccatcagaaagtgaagctacaggaaatacatccgttgcaacaaatgtttcaccatcaacttccccatcagaaagtaaagctgcaggaaatacatccgttgcaacgaatgcttcaccatcaacttccccatcagaaagtcaaggtacaggaagcacatctgtagagggagcaaaaagcaagtcaactaaaaattcagaaggagtatcaaccactaaagcgaaaaacacatcaactgttgcgaaatcttcaactgaaagtccgatcgggaggggcgaaactacccttgaaacgataattgtctcgggccaaaagtcgctattaacatcacaactaagttcatccactgaaaaggtaaacagatctaccaccaaacctacggcagcgattcatggaacatcctcatccgctaaacaaagcacaacatatactgtcagcacggcaaaagaaaataccggtgcatccttgaacattaacatgaaagcttttgttattggcgctattgctttggtagcttag

SEQ ID NO: 80974 - DNA, 468 bp, Saccharomyces pastorianus
atgggttcatctggttcaaaatcgaccacagccactaccacatcgcatagtagcacgactactactagtagcacgaccagtacaactacgcctactaccaccaccacgacaagcacgacaagcactaaagttacaactagcccagaaattattgtcagtagttctagcacattagtttcttctgttgtacccgagtttacttctagctcgtcgctctcctccgatacaattgcctcaattctatcatcggagtcattggtttccattttttcttctctttcttacacatcatccgatatttctagcacatcagtcaacgatgtcgaatcatcaacccctggcccctcaaactcatacagtgcgccttcctccacaaatgcacaactgtccagctccactacagagactgactccataagtagtagtgctattccaaacatcttccccgcaaaccagttcatcaaatga

SEQ ID NO: 80975 - DNA, 279 bp, Saccharomyces pastorianus
ctagaggatcccgcaccacatcattatgcacggcactgcctcagcggtttataccctgtgccatttacccataacgcccatgattatctacattttaatatctatatctcattcggtgcccccaaatattgtataactgctcttaatatatgcgttataccacttttacaccgtatactaaccactcaatttatatacacttatgtcaatatcacagaaaaatcacctccaaaatcacctaaacataaaaatattctattcttcaaccataatacataa

SEQ ID NO: 80976 - DNA, 732 bp, Saccharomyces pastorianus
atgaagttgcttcgtactgtttttttgccttgctcctcttcaaaagaatcaatcatgtcacagtacggatttgtaagagttcctagagaggtagaaaaggccattccagtggtgaatgcatctagaccacgggccgttgttccgcctccaaacagtgaaactgctaggcttgttcgggaatatgccgctaaagagttgactgcccccgttctaaaccactctttgcgtgtttttcaatatagtgtagctatcataagagaccaatttccagcatgggacttggatcaggaagttttgtatgtcacctgcttacttcatgatattgcaacaacagataagaatatgagagccacgaagatgtcatttgagtattatggtggcatactttcaagggagcttgtatttaatgcgacaggtggaaatcaggactacgcagatgcagtaactgaggccatcattcgtcaccaggatttgactgggactggctacattaccaccttggggctcattctgcagattgctactacgcttgacaatgtcggatccaataccgatctgattcatatcgatacagttagagccattaatgagcaatttccaagactgcactggttatcatgttttgctacggtggtgaacactgaaaactcgagaaaaccgtggggccacaccagttctttgggtgatgatttttcaaagaaagtcatatgcaatacatttgggtataactaa

SEQ ID NO: 80977 - DNA, 258 bp, Saccharomyces pastorianus
atgtgggtcaccgttgttagacagggcaacactgtcactgtgcaaactacttttgtccagcgtttctcctcccagtacgtaacagtcgcttctccctccgtggggtctattgggatgggtactttaaccggtactgtaggcgttattaaatctgcaataaagaaaacagtttcgcataatgaggcccagcatctaggtatgagttcgtttacttcaattttgggtgggctattaacggttttaatttggttcttataa

SEQ ID NO: 80978 - DNA, 294 bp, Saccharomyces pastorianus
atggaaatcggtagtgcttatgctttacaggtttgtcttttacaaatcccatccttagtcatttattccattttctatacgtggaatgttaaaaagtcgatgattaatatcagaacacagatgttcccattagtctttccccgttgggacatatttggtgctatgacgagtgttttcatgttcacctatttgtatgctgagggtaaaagtaactatttcaagggttccatgttgatattactatatatcattattgttgtaggattctacttccagggagctctttcggagtag

SEQ ID NO: 80979 - DNA, 2109 bp, Saccharomyces pastorianus
atggccaaaaataaccacatttctgccagtggtaacagtacctctggagaccatcgtcttaaagaggaggttctgaccccaactacatctgcctcgactcctcatagaatatttagcgtggacgatgatccaaaggagatccaaaacgatatcaggtatcttgagggtctgcatgaagggttgaagttcgccctgcatgccaataaatccaagcgatctgtgagctcgcaatcaccaatcgtacatagcagcaacaacacgctgcaccaccacgagcaccaacaacacttgccgcccacactagagtcgctatcctccaagtcgcactctgtgccagacttaaatacagctactcccagctctccgaaacgaatgcattcatctatccgggaattacctcatgatgacaatgatgacgaggacgccaatgatgacagtcggttcattatacacgactcgcacggccatgatttacttatagacgagatcaattgccagtcgccttcacacttggaaaacaatgaccaggcgtctaatgcttcgtccacagagtcattcactttacgagaaagacaggacgccatcaacgagacccaccccttcggtatcaggatatggaagcctgctttatataagaaacaccgttcagttcaaagaaccgcggcgcaagacattcacgagactcagttgaagactattacctgggaggtgacttgttccaatgtgctatggtttattttgttcggtttccccattgcgatactcttctactcggcggctattgtggtatttttactaggcggcggaggactggtaacgaactctgcgaaggagtactccaagtgtctgtataaactcgccaattatttcctttggccttttggcaaaatggtatacttgttgcaggacgagcaatatttacaagaagataaggatgaaggtattagtatgcagcaattctacaattgggtgacttcatactccaacaggctggtcttccaccagtctcaggccaagtttcagcaaagagaggaccatccggcccctgcaacggaatcttcgtctttgatgccgcccgctaacacaacagcaacaccgcttaactcgaaccatccatcatataattctattagacacgaaattccgcacgcagcggctcaaagacggtactttgggagaggaaaatggagctggggtcgtgttcttttctatacaatcttccatctcgtcttgcaacccatccttgccgtcttatctctttgcctctggctcctggtgtttaccattcccatgagtaatgttctttggcaaattatgtatcattgcagaagacatccgcttgcattaggcttcaaatatgtcgagaactcctcccaatcgcacgaaaatgaaataacccagcagcaattgaacaaaaatatcctcttatgtacgttccgtgccgctggctggcattactacaagtacacagttgatggtacaaatgttattgttgtgaatttaatatccatcgttttctttacaattttcgacttttatgttttgaaaaatttcctgcattggaaaacgtggttcacgtacgaatcctcaatattcattctttgtttgacatccaccatcccactagcattttacattggacaagcagtcgcatcgatctctgctcaaacttccatgggtgtcggtgctgtcattaatgcatttttctcgaccattgtggaaattttcttgtactgcgttgcattacaacaaaaaaagggtcttctagtggaaggatccatgattggttccattctaggtgccgttctattattaccaggtctgtccatgtgcggtggtgctctaaataggaaaacacaaagatacaaccctgctagcgctggtgtctcttccgcattgttaatattttccgtgattgtaatgtttgtccccaccgttttatacgagatatatggcggctactcggtaaactgtgcagacggtgctaacgaccgtgactgtactttctcgcatcctcccctgaagttcaaccgtttattcactcatgttattcaacctatgtccatatctgtccagtgtgttcgggatcctctagagtcgacctgcagc

SEQ ID NO: 80980 - DNA, 1005 bp, Saccharomyces pastorianus
atggccagcaagactttgagggttctttttctgggtcccaaaggtacgtattcccatcaagctgcattacaacaatttcaatcaacatctgatgttgagtacctcccagcagcctctatcccccaatgttttaaccaattggagaacgacactagtatagattattcagtggtaccgttggaaaattccaccaatggacaagtagttttttcctatgatctcttgcgtgataggatgatcaaaaaagccctatcctcacctgctccagcagatactaatagaattacaccagatatagaagttatggcggagcaatatgtacccattacccattgtataatcagcccaatccaactaccaaatggtattgcatcccttggaaattttgaagaaatcataatacactcacatccgcaagtatggggccaggttgaatgttacttaagctccatggcagaaaaatttccgcaggtcacctttaaaagagtggattgttcttccacatctgaatcagtgaaccaatgcattcggtcatcaacggccgattgcgacaacattctgcatttagccattgctagtgaaacagctgcccaattgcataaggcgtacatcattgaacattcgataaatgataagctaggaaatacaacaagatttttagtattgaagagaagggagaacgcaggcgacaatgaagtagaagacactggattaccacgggttaacctactcacttttactactcgtcaagatgaccctggttctttggtagatgttttgaacatactaaaaatccattcactcaacatgtgttctataaactctagaccattccatttggacgaacatgatagaaactggcgatatttatttttcattgaatattacactgagaagaataccccaaagaataaagaaaaattctatgaagatatcagcgacaaaagtaaacagtggtgcctgtggggtacattccccagaaatgagagatattatcacaaataa

SEQ ID NO: 80981 - DNA, 285 bp, Saccharomyces pastorianus
atgatgaaacaacctttggagagtgcatccaacaacaatgggcaatcattatttgtcaaggatgataacgatacatcttccggctccagtccgttacaaagaattctagaattttgtaagaagcaatgtgagggcaaagacgctaattcattcgctgttcccattccattgatctcgcaatccttgaatttggatgaaactaccgtcagaaactgctgtacgaccttgactgaccagggttttatctacccaacttttgatgacaataacttctttgccctatga

SEQ ID NO: 80982 - DNA, 1263 bp, Saccharomyces pastorianus
atgtctcaaccccagatgtcccctgaaaaagagcaagaattggcctccaagattttgcatagagctgagttggctcagatgacgcgtcaattaaagcttggtttaagtaatgtcccatcaacaaaacgaaaacaggactctacaacaaagaaaagaagcggagaggatgccgaagatgttgatgaggaccacaaaactcttttggaagccatatcgcctgcgaaaaagcctctccacgatgatacaaataaaatgactgttatatcgcccgtaaaatttgtagagaagccaaatactcccccaagttcacgccaacgaaaagctgaagaccgctcacagcagatcaagcctaggaaggaggacactccatctactccgagggcttctgctacacctataatcttaccacacgcttcgtcacactaccagcgcccccatgataagaatttcatgacgccaaaacgtaataataacaacagcagtaaccatagcaataacaataataatatcaagaagaaggcagcaggctctaaggatgctccacaggacagcgacaacactgcgggcgctgatctcttaatgtatttagccacaagtccatataataagtcatcacatcatggaacaccgatggccgtaaggatgcccactactccacgctcttatcattacgcgtcgcaattgagtttgaacggtaatacagcaagcacatcaaacgatgcagtaagattctctcatatcaaaccttcagcgtcttctccgcagtccactttcaaatctaatctgttaccgaattttccggacgaatctctcatggattctccatcactatacttgagcaataataacggtagtgtccaggcgacactatcgccacagcagagaagaaagcccgccacaaacacattgcatccacctagtaacgtacctaccacgccttcaagagaattgaacggtaccaattttaacttactcaggacgcccaacttcaacatgggagactatctgcataatcttttcagcccttcaccaagggtccccgcccagcagggagcgtcaaacacgtcagcttcaattccttctgttccagcgatggtgcccggatcatcttccaacacttctgcgatagcaacagctgctatatcaagccacaccacaaacaattttctagatatgaacgcaaacgggatcccgctcattgtaggacccggcaccgaccgtataggcgaaggggagtccattgatgacaaactcactgattga

SEQ ID NO: 80983 - DNA, 117 bp, Saccharomyces pastorianus
atgcaagaaaaaaaaattacaattatgaagtgcagaaggaaccaaaaatatcatcgaaagaaggagtacgtagagcgttactattttcaatcagtgttcccattgtgcatacaataa

SEQ ID NO: 80984 - DNA, 1254 bp, Saccharomyces pastorianus
atgtctcagagaaagcgatactcattgaacgtcgtcacgtccccgtcgataccgtcaccgacacccagtgcaccgatacggactaacgaatccaattgggaagccgcttcgccagcgagtgctgcatcttcatttctcccgaatgttcatcatggtggcacggttttgaatcctgggttgggcataatgaggtcaccttcgttgaacaagtctggtgcgtttggccggtccggcagcagtggttccagtacagtaatagaaccgtccaacataaagttgctgctaattggagatgcaaacgtagggaagacagctatgattttgagctattgccgggaactgctgacacgagcggaaatgtcacgatcggtgcgactgaggcaccagcagcagcaacagcataaagacttaggattgaagaaaactgtggtgaaccatagattaagcatgaaagagaaaagaaaacggtacagctctaacgattttgaaaaggagttcaaagatattaatcattttgcagacgaaacaagcgatttcggaaacccgaacatcggtgatgataacaaccacgaaatggcggatcctaatgagattgtcatcgaaaccagaagtactatcggaatagacatcaagacgaacttggtcaacatagataaccggttttttaatgtcatactgtgggacactgcgggacaagaacggtaccaaaacgcaatcattccatcactgtacaagaagactaatgcggtgatattaacttacgatataacaaatgcgaagtccttccaaagctgtatggagcggtggatagttcaggcgttggaaaacttttcttcccaggatttgttaaaagcaagattttttctggtgggtaacaagattgacctttataaggaaaggcaggtaacccattatgatgtggtgcaaatggttcaggaaatgcaactgaaacatggtattaaaatttcgggaaactttgaagtaagctgtaaatgggtcaacgtggtggagagaaccatgaatatgataatactagacctggttgagaacggatgtttcgaaaacaatgatccttgtgtgtcgattacaacatctgacgacgtccagggacatgagcaagaattccacgatacagtagaagagcctttcaatttcactcggcaacgtcaacatcaacttgaaaaaaataatacagtggatattacaaaacctaatgacgacattgcaaataatcaatcaatttgttgcgtttag

SEQ ID NO: 80985 - DNA, 303 bp, Saccharomyces pastorianus
atgccaccacaagacgctgaaggttggttctacaagcgtgctgcctccgttgctagacacatttacatgagaaagcaagtcggtgttggtaagttgaacaaattgtacggtggtgccaagagcagaggtgtcagaccatacaagcacattgatgcttccggttctatcaacagaaaggtcttgcaagctttggaaaaaatcggtattgtcgaaatctctccaaagggcggtagaagaatctctgaaaacggtcaaagagatttggatcgtattgccgctcaaactttggaagaagacgaataa

SEQ ID NO: 80986 - DNA, 99 bp, Saccharomyces pastorianus
atgggtccacacaagggtaaggctccaagaatcttgtccaccggtagaaagttcgaaagagctagaggtagaagaagatctaagggtttcaaggtgtaa

SEQ ID NO: 80987 - DNA, 123 bp, Saccharomyces pastorianus
atgggtattgatcacacttccaagcaacacaaaagatccggtcatagaaccgctccaaaatccgataacgtctatttgaaattattggtcaaactatacactttcctagctcgtatgtattga

SEQ ID NO: 80988 - DNA, 2400 bp, Saccharomyces pastorianus
atgagtcaactggatttaacatcagcgtcccatttaggtacaagtacctccaaaaaaaaaagcgggtgggtgtcctacaaagatgacggtatactttcatttatatggcaaaagagatacctgatgctacacgattcgtatgtagccctttacaagaacgataaacaaaatgacgatgcgatcttgaagataccactaactagtattataagtgtaagcaggacacagttgaaacaatattgttttgagttggtgcgctgcagtgaccgaaattctgtatcatcaggatcctcgtcctctttgaatgtatcatcagacagtaactccaaaaaatcaatatacattgctacaaagacagaaagcgatttgcatagttggttagacgccatttttgctaaatgtccattattaagtggtgtatcttctccaacaaacttcacacataaagttcacgttggttttgatccagaaacaggtagttttgttggtatgcccaccaactgggaaaaattattaaagcactccagaattacaggagaagattggaacaataattctgcggctgtcattcaagtgttgcagttttatcaagagtataatggagtcggaaatcccacaaatactttagacaagcctcaaagtggtgaaacttcctcctctcaaaaatcgctgccaaacagctataatgataacaaactcagaaataattcagtaaattcaaagtcatcttcaggcgtttcttcaagtatggtatcacagaggaaaacctcacaaccatcaaataccaaatcgcctgtttctctaggaagcggctcactgccaccaataaatacaaaattgcccactagtcagtcaaatattccaagacacttacaaaacgttcccaaccaacaatatcctaagatgagaaacggacactccccaaccaatggccaatttcctaggggacctatgcatccaaacaattctcaacgatctttgcagcagcagcagcagcagcagcagcaaaaacaacagcatcaacaatatccataccaccatcaaggaccatctccatctccatctccatctccatctccgtctccattaaacccttataggccacatcacaatatgataaatccttattccaaacaacctcaatcgccattaagttcacagtcgacccaaaaccaagcaattccacgttatgcacaaaactcaagtcctacagccgcacactttcaacctcaaagaacagctccaaaaccaccaatatcagctccaagggcgccatacccatcaaatcaaaatgctactagtaacacacatgtacagcctgttgcacctaagaatgaccagtcaaccccacaaacaatgaggcaggccccaaagagaccggatgcagatgtcgcacaaccgggtggtgtggccaaaccgaagaagccagcaaggcctaccatgtcaactgcagaaataatgagtaagctgaagaaagtcaccgtaaatgtggatccatctcaatgctttaaagtgatcgagaaggccggtcaaggtgcaagtgggtccgtctatcttgcagagaggacgcatattccgacagaaagtaatatgatcgaactcataaacaatgatattgatgagccgcacgtaggagataaagttgctatcaagcaaatggtcttatctaaacaacctcgtaaagaactcatagtgaatgaaattttggttatgaaggattcacgtcataaaaatatcgtcaattttctcgaggcttatttgagaacagacgatgacctatgggttgtgatggagtttatggaaggaggttcactaacagacattatcgagaatagtcccaccaacgataattcacattcaccactaacagaaccccaaattgcatatatcgtacgagaaacttgccaaggcttgaaatttctacacgacaagcatatcattcatagggatattaaatcagataatgtcttgctggacactagagctagggtgaaaattaccgattttgggttttgcgccagattaactgataaaagaagcaaaagagccactatggttgggacaccttactggatggcacctgaagttgtcaaacaacgtgaatacgatgaaaagattgacgtatggtctttgggtatcatgaccattgaaatgctggagggtgaaccaccatatttaaatgaagatccactaaaggcgttgtacttaattgcaactaatggtacaccaaagctcaagcatccagaaagtttgtctttagaaattaaacgctttctaagcgtttgcctttgcgtagatgttagatatagggcatcaaccgaagagcttttacaccacggttttttcaatatggcatgtgatccaaaggatttgacatcactgttggagtggaaggaatga

SEQ ID NO: 80989 - DNA, 123 bp, Saccharomyces pastorianus
atgtctctttcagctgcagcgaataagatatctgacaacgatttccaaactatcggaccggcacctagacctcccagttcaaatagccaggccgtacttgctataatcaaacgcaacctataa

SEQ ID NO: 80990 - DNA, 180 bp, Saccharomyces pastorianus
atgcgtgattttaagaggtgtctagatcaaaattccacccttggcaacaaacaaattggagttgaaaatctacaaacattaagtccgttgattttaagaacgatcccagtatctcataaaatggatggcctccaagataaagttttggaattatcacttggatttacgaaactagactag

SEQ ID NO: 80991 - DNA, 990 bp, Saccharomyces pastorianus
atggccatgaacactggagggtttgactccatgcaaaggcaacttgaagcagaattgcgttctttatcttccgaatcgaaaagaagaaattcaaccattcgccatgctagtgataaatccattgagatattgaaaagagtacatagttttgaggagctagaaagacatccggatttcgcactccctttcgtgttggcttgccaatcaaggaatgctaaaatgacgaccctggcaatgcaatgcctacagggactgtcaaccgttccatctattcctcgaagccggctgtctgaaattttggatgccttcattgaggctactcatctcgcgatggagattcaattaaaagttttacaggtggtacccattttttttaagacatacgggaagttcatctatgggccgctttgtaagaagttgttgctgtgttgctcaaatctgctgcatgtacctaataaggcacccgtagtagttggtactgcgagtgccactttacagcagcttatcgatgaaatatttgataggctttccattgaatctgtagtggatgataaacaatatgaagtcctcataagtaatagtgagtcaattaaggtcaatgtttatagatacgatgctaacaaattgttcgataatatctgttcattaaatgaaataagctcaaatggggcagttagtgacgaggagatgctgttagacattggggacatcccaatagactatggcctggaaatccttgaatcgattttgaagaatagtcagaaaaatcttttagaatgccaagatttacaatatctactgagagttaaggcgattccattgcttctacgttgcatatcttcttcgagacacttctccaccgctgtaaggagttgtcgttgtttgaagttgttgataagaaaagagtatctaagcatactcgagttagaattagaggtcatcttgtcactgttaatccatggcatatctgtcgaatccaatttaagttga

SEQ ID NO: 80992 - DNA, 1689 bp, Saccharomyces pastorianus
atgcatttattggacaaatcaaacgctccgtccattaatattacttacattatatcactaattctgaccatctgtaaccacttatgcgaggggttgaacaaatcggctctggtaagctctcccctagagaagaaaattgaggacaaagaacgtgaagagggaactggaaatgattcgacagttgtaaaggtttatagcggcctgttttctggcctatttgagctaaacaaactctttttatattcgacctccttagagacatcgatattccacttggtggttagagcttttcaaaaattagctcatagtgccggcgttctgtcactaaaggacaaattaagggcatgcatgaaattgttttcgattttgataacaaacaacgttacatcatccaatcaatatccttttaatgatacaagtaagtcagcaaaaaatcaacatacaagaaatatatccacatctagtgtcacgaccagtcccgtagaatcaacaaaaaatccaagtaggtcgattgcagattctgcgcaaaataaggaaatgaaaaggcgtttgcaccccaggaatattagttcaagacaagttagtttactaagggcattaatatcattatcaatatcactaggtcctattttcgattcagaaagctggaggtacacttttttaacctggcaatggatatcttactacatatatggtccatcagcagatttcaaagagagcttttactctgaagatattcctccacctccaatactgactaaatcagacgttacatcaattgaaagctctctaacgaaattttttgaaagtacaagcagctattcgtgctcaacttttcatttggtattaaccagattaattttggactcaaaaaataccctcactttagaacaaacgaacctcaacctgactaatgacattggctatcatcctttagatgcaaaagatgaaattataccatgcatttacaacaaggcgttttttgttaacaaaattggtgaactggcaacttataattgcaaaaaatttctctttggaaaaaatggtaaagaactttggagtttgatttccacctatatgatcaaattgatatcaaaccgtgaaatggataacgattctttacgtttatacacagtgagagtgtttacagatatcatcaaaaaggctactaatgaggttggtaattccgatgagcaagataataaagtgaaacagtttggtacattggaaaacttagtcatcgatagcttgatggcaacgataaactcgataaaacagttggatattggtaagcaggaaatatacaatgggacgatcaatgttgaatcagatattctttttcaattgctactaactttaaaagagattctgaacgaatttggtgaactgttaatgaactcttggaccaatattttcaacatcattaattcaccattcgagtggacagttgaggatactgatttttccgtgaatgaggatatagatgattcatctttatttgaaggtatcgttcagaagcataagaacatgatccaagtgtcatacgatgtttttaaactaatttctgatgatttcttacagagtttacctatgagtgtcattaaattcgttattgatacgcttgtcaatttcgtaagtcagaagcgaaatcttaatatctccttttcttctattagtcagttctggtag

SEQ ID NO: 80993 - DNA, 1248 bp, Saccharomyces pastorianus
atgttattagagtttttgaaaagattgttgtcttccacttctaataataccaagaatgctgtaatattaaattatcaaaccctgctgaaagaaatcatcactattgaggacgttccatcagatatattgaaaaagtgctgcgaaatatttaccgactacaatattacgtacagtgatctctccacaaacgcatcgagcaaaactgaatacgattgtatatacgaactaataaccggatttcctcctctttaccaattaatatcgaaatacgatgcgatgacagatgaatttgtggaaaaagttcttcttttattcaattctgccataaaatatcctctcttacctgagtttgtccaagacaaaactaaaccgtcctctatgcaaaaggccatattgtctggacttgatatatttatgacaaatgattctaaagatacagaaattttgattcttctccagttaagtacaatatcgatattggcatttgatacaagggaaaaaataacaaaaaaacttggaccaaagcttccaaaagcatcacttaacaggttaccaacttttgaggcaatcagctatatgtcatgttctaacctgagaaatagaatagcaaaaatagatcaatttggtatatccacactgaaagcaaagcatattttaagaatattgaaaaatttggctgaaatcatcaagcgaaaatcgcttattacagggtcagagagtgatgaaattcccatatgggttcttgcttccaattgcttctgtgatttgtcgaacaaaattttcaaatcactccaagaagatgcagaaaatccattaaaggataacttttgtgatttatttataaatgttattgttgtcacattacaaagaatcaacccagagctcgataatttaaccgagatagacgatttgaatgagtattccaaatatagggagatattgctggaaaacagaatcattgatctcttcaatgaaaggcaattagacactttcatttatgccgtctgggattgttcatttttatatgaattcgatgaattagaaaatgctttgatgcaagactgtggtacgttttctgaattgtcccaaaaactatcttcgttcgatttttcatgtatatttggatccaccacaaatcctcgctttcagacaaaatataagtgctctttagagtgcttgcaagatttggttaattttatgttgaactcaaacgagaaacttacgacagttaactgctccttatctttc

SEQ ID NO: 80994 - DNA, 189 bp, Saccharomyces pastorianus
atgcattggttaagatacaccaagaggcacaataccttttgggggaggactataaataaggacgttcaagtcagcttcaatgacaagtatgttgttactaggagcggcgtgaggtatacgaggtatcccactaatttgaatacacaattattggaaactgcatttgaagaatgggactactatgagtga

SEQ ID NO: 80995 - DNA, 192 bp, Saccharomyces pastorianus
atgaaaaaaaccaaacagagaaaggccatggtcaggaaacggttgggattagacaaaccaggcatatacatttattcgacaaaggatgtcgttttcaattcagatgaagatgacgatgaatatgaagttggcagtgaaggcaataacaatagctctgccacttttatcagcgaccatataggccatatttga

SEQ ID NO: 80996 - DNA, 228 bp, Saccharomyces pastorianus
atgaacttgtggagacatagtccagaagaattggctgcttacaatagctgtcatccaatgaagctaggttcaggggtgctgatacaattgcctctttatgacaattcggcagtatatgcagaagatattacttttaggagtttctgctgtgaaagagtgcccgtttatgtatctacggtgctaagaaactcttccccatataggtatcttgatgaggtgatcaactga

SEQ ID NO: 80997 - DNA, 984 bp, Saccharomyces pastorianus
atgcacatcttttccgatgatatgacatttgttgtcttggatttcttggctactttaatgttccaattttgccaagtcggcattgtcattaggctatttcaaagagctcaggaaaagagaataattttttttattggggtgatattaacaataaccgcaaatattttatgggtaattccaccgtttgctaaccatactacaaaacacagaaatgactggcagattctgcggccatttgtttaccttttccgtattgccatcgccacgtcatatgcatcaatcgtcatttatcacatctggcagaaaaaaaaattgtggtttaaattcaatcaaatgggtttacttacgctattgactattcttgtggtgcttctattaccgggtttcttccttgccgatgtgtcgaacttatggatatcggaactgggcgaagtgtttaacacgacatgctatgtcacttcgaccgtgatcacatgggagtggctggatagattaaatgttttggaaagaaaagaggaagcgcaaagcattttgggaagacctatcttcgaggaagagcaacaagactatcggtttgccaagtacgccttaagggttcaaaacgctttaaccaggagggaatctcaggacgcatcaacggatcggcacgatacgtcaagtaattcggaagtatgtgatttacagaccatatcacgctacgaaccagaagatcagatatcagtgggcagaagcattgatcgaatgcatttcaatgataggggaacttataaagatgtagcgctgaagaaattaggctatgcgcgtgataaaattttatactttacagaccaaatcgtccagaaaagcgtaggccacaataatagcagcagctcgaaaaatgaaaaaaaccaaacagagaaaggccatggtcaggaaacggttgggattagacaaaccaggcatatacatttattcgacaaaggatgtcgttttcaattcagatga

SEQ ID NO: 80998 - DNA, 180 bp, Saccharomyces pastorianus
atgtgctatacattagtacgaaattgcccaagcgattttcaattttcctgtccgaatgatcttactacggaagatcttctttatcaaagttacaatttctatatggacactgactactcaacctgtaattatataggtaactcatccttgatggtaattcatccattggacgatacgtag

SEQ ID NO: 80999 - DNA, 1287 bp, Saccharomyces pastorianus
atgatagtgtggcaagcactattcgtggtttactgcctatttaccacttctattcacggtttattccaagacttcaatcctttcgcaaataagaatatttccttaaagtttcccagcctaaatagatgggagaaaaacgttatggctactggtcaacaaacaatcatcaattcggatagcatttatgaatggaccccgatcttatctaacataacagcgggcaaaaaagacagttttgtatttaccattgacgcagaagcctccggttatgggtttgctcccacgtatgaagtgttagtgtttattagcggcaatatatgccaaatgcccatgaatagatcagatgtggatttaacaatatactactcttttaatgaaacggttttagagaacccaaatataggtcaaagtgcagtttttcaggatggctacatccaagcattagccatcagtccagtgcagtcttctagctcgaacgctacctccacgtattcaaatctttatgtggtcgctgagctagtgaattccactacggagcaacctctgtccagttccgacgcctctgaaaattgggaatatagactgagtatctctgagaacgatttggtttttcagtgggatgtaaggccttgggtagaggtcctggacactgatatgaattctgcattactatcaacggggaatgtcaccgcagacgccaaagtttatcacaattattcaatatatgatccatccttgtacgatctgtatgtttactcgcacgaagattctgttcaactaaaccaaaactataatttatctctttgtgctgtgaaaaatggaccatatttagtgtcttcccaaaatacatcaaatgcaacagttacgtcaaatagtacaaatcctttagagcgtactgacttggcgattcaaaaaaaaattacagaatatggtggtagcgtgacagaaatgttttacgtgacaggactgaatgcctcaacaacttatgtagcgtacctgacaaagaaaatcagtaatggtgatgggttgtcaagtgtgggcggcattttattttcacatgtttattttaccacaagaagtaccgatgtctgctctttgatctttggtttggacttctgcagtgacgtcgcttactctgttcctacatcctcattttctgtgggtaataaaactctcatggcgcagacatatgaccacattgcagaggcactatatgcaaattttagcaaagctctacagttaatatcctgtgacgcagacaagacgcaagagatcctccggtcatga

SEQ ID NO: 81000 - DNA, 2145 bp, Saccharomyces pastorianus
atggcgttactaaaattggttagacatttctctgaatacaattctatgaaaaatcaattggccaaggtagaattggtcaagattgtcaacgatttgatttatagggatcctcaattatttagtcaattcaggccacttttgtctgattggctatccaacaagttcgaatctgttcagttggaaacggcgaaattgattacttctttcgctactcgcaattcccgcttagtggctcccgagttatatgcggcagctatcagtgctttacagtccttactgaccgttcctcgtgtttcttctagattcgctgcattgagaatcttaaatagaatatccatggtttcaccagaaaagattgttgtttgtaatcctgaactagaatctttaattaatgattctaatagaaacatttctacttatgcaatcaccactttattgaagacaggaacttccaaaaatatttcatctctgatttcgactattactaattttatccatgatgtcagtgatgactttaagatcattattattgacgccgttcgtacgttgtctttgaacttcccacaggaatggaagtcaattttgaacttcttaatcgatgttttgaaaaatagtgaaggtggattcaaatttaaaaacagtattgtcgaagcattaatcgatattgtttcatttgttccacagtctaaagaactcgccttagaaaacttgtgtgatttcatcgaggattgtgaattcaacgaaatactagtgagaatactacatcttttgggtaaagaaggtccatctgccccaaatccatcattatatgttagacatatttataacagagtggtgttggaaaattctattattagatctgctgccgttgtagctttatctaagtttgctttgacgaagaacgatcctaccttatatgagtcaatcataagtttgttaaagagaatcgctaatgataaagacgatgaagtcagagacagagccaccattgcactagaattcattgattcggctaggaataaagatgatgttatagcacaaaatctaatcgaatccaaatatttttacgatattccatcattagagtcaaaattaagttcttacatttcctcaaatactgattcatttgcaactgcatttgatgtgaatcaagttcgtaagtttactgaggatgaaatgaaggcaataaatctgaagagaaagcaagaacaaattttcaatcaaaagtctgaaaccactttggatactacaccagaggcagagagtgttccagaaagaagagctgacgctaattcatttgctggtccaaacttggacgaccaccaagaagatctactagctactaagtacgctgacgaattgctatccattgaacaaattaaaccatttggtcaattagtaaatagttctagggctatctcattaactgagccagaagcagaattcgttgtacgtggtgtcaaacatctcttcaaagacaatgttgttttacaatttaatattacgaatactctgacggatattgccctagacaatgtttctgtagtctgtacccctgaaatttctgatgaagctgaattagaagagctattcaccctacaagtggacagattattaccatccgaggaagcagcttgttacgttgcattcaaaaaacttgatgaaattgtaatggaaggtttcttgaacaacttaacattcactacaaaagaaataaaccctgacactaatgagccatttgatggtgatgaaggtttccaagatgaatatgaaattgactcgattttcttgaatgctggtgattatgttaagagttctttcactggtaacttctccgctacatttgatgagttgccatgcgaagaagttgctgttttcaacattcaagaagatttatccatacaagaagtagtagataagattattttgaacagtagctgcttaccggtggaaagtacccaatttgctccaagtgattcaaactcccacaccttgaaattatttggtaagagtgctttaactggatctaaagtagccctacagattaagatgatcaagagttcgaaaggtcttgctttgaaagttcatggtaaaggtgaagacagcttattatgctctgatctggtgaatggtctaatgcagtaa

SEQ ID NO: 81001 - DNA, 516 bp, Saccharomyces pastorianus
atgtctgcacatacttacaaaaagtttgaaaactcgacctcgggcgatttacctgataaaatgaccatttatcaggattgtatgaacacgtttaacgaatcacctgtcaattccaagagatgtcgtttattgatttctcgcttgctgagactcttggcccagggcgaaaccttcccacagaatgaagcaactgcattatttttctctatctccaaattatttcaacaccagaacgatcctttaaggcaggctgtttatttggcaatcaaggaattgagtggcatttcggaggatgtgttgatggcaacctcttcaatcatgaaggacgttcaaaacggttccgatttgattaagcctgacgctattagatcgctgacttatgtcttggatgaatctactgctttttccgctgaaaggttattaaaaagtgccgtggtaagtagacatccttcaatatcctcagcagcattatgtacttcttatcatttgctggccatttcagaagtcactatcaga

SEQ ID NO: 81002 - DNA, 1176 bp, Saccharomyces pastorianus
atgaacgtttatatcaataacgctgcttctaccgcggactcaacttcatctactgctacctcaacatcgacaacatcttcatcaagcacaagtgttagttcaaaaacgtccacgaaattggacacgaaaacttcaactagttcttctacgcactcatcctcttcctcgtctacaacctccactaccacttcctcttcagagacaactacttcctcctcttcttcatcctcttcctcttctacgtctactacttctactacttctactacctctagtactacttctacttcttcttctccttccaccacttcctctagcacttctgcctcttccagttcagaaacgtcctctacgccggcaacttcttcatccaccacatcgacctcatcctcaacttcgacagcaacggtcacttctaccccctcatcgacttcaacaggtacttccacgcattacactacccgtgtggtgacgcagtccgtggtttctcaagctaaccaacaagcaagcacgatctttatcaccaggacctctgtttatgcaacagtatcgtctacgtcctcctctactagttctctcttaaacgggaaatcgagctcgtccaagagcaaaggcttgagtggtggcgccatcgcaggtgtcgtagtaggtgtggtttgtggtacagttggcttgttggctctggcgttattctttttcgtatggaaaaaacgtcgccaatcttctcagcatgtggacttggaagagacaaagcagtaccagccgtactcactgggtgatgctgacgctaaccctgttattccaccgtctgcttcgagcactaactggcacataccctctaggaataatacagcattgtccaagaatacagcgtctacttttgccacttatgatctgccgacaagggcgccgggcggcagagattctattattactggtgatgcacataatatcagcaaaagaagtcactttccctcggtggtgtacgaggagcctccttcgatctataacggggaccaaaggttcagtgctacttcgctgcccgatatgatggaagaaagacaactacacattgtcaaccccgataatgtgagttcaaatattaggagtaatgtctcagatggtgatgatgattacgatgatgcaaaggattccaataatagttctttgcgctga

SEQ ID NO: 81003 - DNA, 246 bp, Saccharomyces pastorianus
atgcagctagatctcatacacaagtccttcatcttagtgtggctcatatatatacgagccgcgttggctgaccaattcacatataaagcttgctattcagctagtgatatacgaaaattggggttgacttaccagggtgtttacgagtatcaatcagtttcctactgtcaaaatgaatgcctggtcaggctgtcgttgctcttttcaacgtacaggttgctactgtggtggttccgcagctcagtt

SEQ ID NO: 81004 - DNA, 735 bp, Saccharomyces pastorianus
atgcctgcaggtccactgtgtgttcttggaattggacttttgggaattttagtgtgcatatgccaatttgtcatgatagcactgttaaaacacaagataagccattcattgacttctaatgatggtgacggcgttcaaaatttgctgaagtctagcactgccgtcgatatagagaaccaaatgagcctttggagcgttcagactaataaatatataaatactacggagaccaatatcaatcaggaagtattcgggtggataaacacgacaacactttctgtgaacaatacagtggccaccatgatttctgatatagacacaactttagcagatgtattcaatggaacactgctatataacccaatgaaaaccgtggtcggatgtgccattgaaaataagctctacacaatagagaaggcaatgacgtggattcacgacaaggctcagctgcatatcccgagaattaatgggacacaaatcaagcaagctctggcaaagcaaaccgacaacagcactatacccactgcaagctccacttctgccgccacagaaaacttactggagaaccttgtgaatgatatgagagaaggacttttaaaaattctccgagcttaccaccgtataactctgggagaactcacggtagccttggtcattcttgcggtgtggctcgtacaattgcccatagctctggtaattctccgattacgtcttcgcaaagccacctttgactga

SEQ ID NO: 81005 - DNA, 105 bp, Saccharomyces pastorianus
atgatcagggatggttgttggatggtagaaaggacctcagtgatgtcatctactctgtctcttgccaaatcgtgcgtatccagtttacgtgtgatggcaatgtaa

SEQ ID NO: 81006 - DNA, 267 bp, Saccharomyces pastorianus
atgtgtggtatctatccctaccagttggtaacttcttcggcctcaccaaagacagacgtcttcgtttcatcgttaccaacgtcgcctccccaagctcttggagcggcatcggtaatggccttgcagttggtttttaaaaattgtactatcagtttgtttatcagcttaaactccaataggaaggcatcgtggccttcgggagattcaatgtttcctaagtgcgacttcggtatgtgctcagccaaaaatcttgttctgaatatgtga

SEQ ID NO: 81007 - DNA, 735 bp, Saccharomyces pastorianus
atgcatcagataaacttaaaggtaccaaactcagtaaagggattgcgaggtccaaaaaaaaaagataagaggaagcgtaggaaaggagaagccaagactaatttgccaatgtttggtgaccaggatgatgaacgacctcagaccgttagagaacgccatggcgtatacagtaaagagtttattagtgattcagaagatgacgaggatttgatgaaccctatattttttgaaaacgaaacatatttgagatggttactagataaaaacaatggtcagttgaccgaggatagatatatccagtttgccaaatttgccgcggaaaggatgaataatgggggtgttgtgacaggagattatacgaacttgtttggtggatccataccaagtattgaaagcataagagctacagaaagtagttcctttgcgccagatagaagcctcatttctttagcaagccacgtggcatctgaaatgtctattttcgatgtaaataataacaataataatcaactctctgatgacgatgtcaactcggaatcaagaaatagtttgggctcatcacagccatcaaattcgcaaaatatgttccaatctgaggtgtatagcagaaaagaatctacaaagcgttctttggaagcgaatgcagccgatgaaagcgatgaagatgaagaggccatccgcctttttggcaaaaagtctagagttgttttgagccaaggtgatagtgatgattga

SEQ ID NO: 81008 - DNA, 867 bp, Saccharomyces pastorianus
atgtctgcggatttgcaacaaggcactacaaatgcggctgatttctctctgacggtacttagagcaagaattgctttattggcaactgccatcggtgggccggattatacttcccagatagacccacccccttataagcttggcgatgactgtttggcgtgcttaaaagatctgaaaagatggtttaaactagtggatgaccagcagaaaagatgggatgtggcaatggcagtagctgaatatcgcatcttgacggatgatctgttacctattctcatagattgggaaaacaaatgttctcttgcagcaaagcttgcaaagaacaacccagaccatgaagagtttagaaacaaagcttattacgataaaattgcgctaaattgtctacaactattggtccttatgacttggcctttaattgtaactgaacagtcttcatcaaatcaaattactctctatggtgagctaaagaagcatcaattggtatacaagaaaacgattctgtctatggaaagtggtaaagtgttaagagctgccattagattggctctggatgttatcaaaatcgaccgattatcaagaactcctagggacaatatggttctcaaattggttttgaattttttcagaaatgtcattgctatagaacccggtgaatttactatcaatactaagaaaagcatgcctaagaaaggtatcacatctatcgatactttgccaccaaacgtctctatggatgacatctctttaaatacggttatttcctcattccataaaaacaaggtattcggtttcctcttaacgctgaccagctcctatcaaaagagtttgaccaggacttgggatcctctagagtcgacctgcagc

SEQ ID NO: 81009 - DNA, 1455 bp, Saccharomyces pastorianus
atgattgcatttaatgaactgttgaacctcgtttcccgtacaaaggccgctcaagaagaggattcgaccgatatagaattcattgtaagtaggcttttcagtgacgagagaatacaattactgtcaaatctgccgaagattggttccaaatactcgctccaattcatgaaaagttgcattgaactaacacactcggtattgaaagtattagagcaatactctgacgataaaacattagttattgaaggcaaatcaagacggcaaaaaaagtttaatatttcagaagatgatattactaaattgatagaagaagaaaatgtagatagagatgaagcgcttgatattctaacctcttctttaagaagtatagaagtcaattttcaaaaggtgcaagccaactatatgacagaaccggtaatagaaacgtacattaatttccttgaaagatttcgtgagcttgaggacgattccattaaaaaagtattttcctttttccatagagtatttgtccaggcaaaagaacaggcattgttatttagatttgatttgataatattattaagagaaatgctttcacctgacggattagatagaatgtctcgttcaaggaaatatgtgagtcaattttcagactacttcctcgccaggttgaagaaaaggttaaagaaatcacctgcttggtttgttggattacttttcccgccattacacaatagtgaagtaggattttaccaaagatatggtgaatataatgtacttaataatgaatcaatgtatgccgctcctgcatcacagttcaaaccaattcccgatgaagaagccttaccaccttcgattttgttggatatgaaatatggtattttagtttccacattacttgatgatggaaaaactgaactattggaccaactgctcaagcatataacccacacactagatatttttaagtcgtggctaaccgtaaatgttaatgctgggaaagaaacagttaatccacccaatgaatatttcacattgacaggtgtactcaacaacgaccctatttttaaagataaggactacagggctttattgttgctgataggatactccattccacgtaaaatcaatgaaccttgttttttaccggggactgttgaagtttctgacctgactgtttcttgtgaactagtgaaaaaatacttatcaacaccatttgaaactccaaacggactgccttcttcttcctatcttctacgagttcgttcagaaaaggatagtttttctcacaatgaacaagatggatgggaaggagacgatgattatgattacaacgatccctacattgttccagatgatcaaattctatcgaaaagcgacgcagcatacttcaaggatttagataacaatgcatcagataaacttaaaggtaccaaactcagtaaagggattgcgaggtccaaaaaaaaaagataa

SEQ ID NO: 81010 - DNA, 111 bp, Saccharomyces pastorianus
gtaaacgacggcagtgcaagcttgctgcctgcggtcctagaaaaattgagggcccgcaaggaaagatccataggtgaggctagcacaggtaacaggctaagtttcaaataa

SEQ ID NO: 81011 - DNA, 1635 bp, Saccharomyces pastorianus
atgacttatacgataagggttgttcttgctgatttagaaaaggcctttgtcgctagggaaattaaatcattagcaagcaagcgcaaggaagatctgcagaaaattacatttttatccagggatatttctcaacagtttggtatcaatttgcatatgtattcatcactttcggttgccgatctggtgaaaaagattctaaactgcgatagggattttttgcaaacaccgagtgttgttgagtttttgtcaaaacctgaaataattgaagtttctgttaatttagctaggaattacgccccgtattcgacagactgggagggcgtgaggaatctcaaagatgccaagcctcctgaaaaagatccaaacgatttacaaagggctgaccaaatttatttgcaattgatggttaatctagaatcatactggggttcacgtatgagagctctcacagtggttacttcgtatgaaagagaatataatgagttattggcaaagttaagaaaagtcgacaaagctgttagcgcgcttcaagaatcagataacttgcgcaatgtctttaatgttatcttagctgttggtaatttcatgaacgacacttctaagcaggcacaaggtttcaaactttcaaccttgcagaggttgacgtttatcaaggatactaccaatagcatgacctttctaaattacgtcgaaaaaattgtcaggttaaattatccaagcttcaatgactttctaagtgaattagaacctgtattggatgtcgtgaaagtttccattgagcagttagttaacgactgtaaggactttagccaatcgattgtaaacgtagagcgttcagttgaaattggtaatttaagcgattcctcaaagtttcatccattagataaagttttgataaaaacattgcccgtgttaccggaagccagaaaaaagggggacttgttagaagacgaagttaagctgactatcatggaatttgaaagtctgatgcatacgtacggtgaagattctggtgataagtttgcaaaaatctcattctttaagaaatttgcagattttataaatgaatacaaaaaagctcaagcgcaaaatctagccgcggaagaagaagaaagactttatataaagcataagaaaatagtggaagaacagcaaaaaagggcacaagaaaaggaaaaacaaaaagagaacagcaattcgccttcatctgaaggaaatgaagaggatgaagcagaagataggcgcgctgttatggataaactattagaacagttgaaaaatgcaggtcctgctaaaagtgacccatcttccgccagaaagagagccctagtgaggaaaaaatatctttctgaaaaagacaacgctccacaattactcaacgatttggatactgaagaagggtctattctttattctccagaagctatggaccctactgccgatacagtgattcacgctgaatcacccactccgcttgccacaaggggtgttatgaatacctctgaagatttaccatcgccatccaagacatctgcgctggaagatcaagaggaaattagtgacagagctagaatgttattaaaggagctaagaggctctgacacaccaagtaaagcaaaattccatactcgatga

SEQ ID NO: 81012 - DNA, 3813 bp, Saccharomyces pastorianus
atgttgaagaattcaggctccaaacattcgaactcaaaggaaagtcattcgaattcgagttctggtatattccaaaatttgaagcgtttggctaactcaaatgcaacgaatagcaatacgggttctccgacctatgcatcccaacaacagcactctccagtgggaaacgaagtgtccacttcacctgcatcttcgtcatcttttagaaaactgaatgcaccttctaggtctacatctactgaggcgaggccgttgaataaaaaatcgacattaaacacacaaaacttgtctcaatatatgaatggtaaattaagtggagatgttcccgtatcctcacagcacgcaaggtcgcattcaatgcaatcgaaatattcgtattccaagaggaattcttcacaggcgtccaataagctaacaaggcagcataccgggcaaagtcactccgcatcaagtcttctctctcaaggttcgctaactaacttgagcaaattcactacacccgatggtaaaatttatttagaaatgccgtcggacccatacgaggtggaagttttgtttgaagatattatgtataaaagaaatatttttcagtctttatcagaggacaaacaagaagctctgatgggctacagcattgagaagaaatggctgattgttaagcaggatttacaaaatgagctaaaaaaaatgcgagcaaacactacatcttcttccactgcctccagaacttcgatggcgtcggaccatcatcctatccttacggctaattcatctctttcgtctcccaaatctgttttgatgacaagcgcctcttctcccacctcaactgtatacagcaacagtttaaatcattctactactctttcatcggtaggtacgtcaacctcgaaggggaaaaaattagtgagcgggagtttgaaaaagcagccatctctaaacaatatttatagaggtggggctgagaacaatacgagtgcatctactcttccaggagacagaacaaacagaccaccgatacattatgtgcaacgaatcctggcagacaaacttactagcgatgagatgaaagatttatgggtaactttaagaactgaacagttagactgggtagacgcttttatagaccatcagggtcacattgctatggctaatgtactaatgaactctatttataagactgcaccccgagaaaacttgactaaagaattattagagaaagaaaattcattttttaaatgcttcagagtcttatcaatgctctcacaaggtttgtatgagttcagtacacataggttaatgactgatactgttgcagaaggtttattctctacgaaactggccacaaggaaaatggccactgaaatttttgtttgtatgctagaaaaaaaaaataaaagcagattcgaagcagttcttacctcactagataaaaagtttaggatagggcaaaatcttcatatgattcaaaacttcaaaaaaatgccccagtatttctctcatttaaccttggaaagtcatttgaaaattattcaagcctggttatttgccgttgaacaaactttagatggaagaggaaaaatgggttccttagtaggcgcgtcggatgaatttaaaaatggtgggggtgaaaatgcgattctagaatactgccaatggacaatggtttttatcaatcatttatgctcttgctctgataacataaatcaaagaatgctattaaggacgaaactagaaaattgtggaattttacgaattatgaacaaaataaaactgctagattacgacaaggtaattgaccaaattgagttatatgacaataataaacttgacgattttaacgttaaattagaggccaacaataaggcttttaatgtagatttacacgatccactatcattattaaaaaacctttgggatatatgtaaaggtaccgagaatgaaaagcttttagtatctttagttcaacatcttttcctttctagttcaaagttaatagaagaaaaccaaaattcctctaaacttactaagcaattgaaacttatggattctttggtgactaatgttagtgttgcctcaacttctgatgaagaaactaatatgaatatggctatccagcggctttacgatgccatgcagactgatgaagttgcacgtcgagctatattagaaagtagagctctaacgaagaaattggaagaaattcaggcagaaagggattctttaagtgaaaagttaagcaaggcggagcacggactcgttggacagttagaagatgagttgcatgagagagatcgtattttagctaagaatcagagagttatgcagcagctggaagctgagttagaagagttgaaaaagaagcatcttttggaaaagcatcagcaagaggtagaattgagaaaaatgttgactatattgaattcgaagcctgaagaaagcttcaataagaatgaaggcaccagaggtatgaactcgagcctaaattcttcagagaaagcgaatatccaaaaggtgttacaggacggattatcaagagcaaaaaaggattacaaggatgattcaaaaaaattcggcatgacacttcaacctaataagagattaaaaatgttaagaatgcaaatggaaaatattgaaaatgaagccaggcaactagagatgacaaattttgctgaatttgagaaagatcgtcttgaacctccaatacatattaagaagcccaaagtgaagaagatgaaaaataaggataggaaacctttagtcaagcctcaagaggcggacgtaaataaactaaatgacctaaggcgggctttggctgaaatccaaatggaaagtaatgatatttccaaatttaacgtcgaagaacgtgttaatgagctatttaatgaaaagaaatctctggctttaaagagactgaaagaactagaaacaaaatacaaaggatttggtattgactttaatgtcgacgagattatggacagtccaaagaaaaatactggggacgtggaaacggaagaagacgctaactatgccagtcttgaccctaagacatatcagaacaagttagacgagattaatagaataacggaccagttgttagatattcagactcaaaccgaacacgaaatacaagtagaagaagatggggaaagcgatctttcctcttcaagttctgatgatgaaagtgaggaaatataccaagacgcatctccaactcaagaactaaggagcgaacactcagagctatcttcaggatcaggtcctgggtcttttctcgatgccttatctcaaaaatatggtactggtcaaaatgttactgcatcggctgcttttggagagaacaataacggttcgggtattggacctctacatagtaaagttgaaaagacctttatgaacagactcagaaaatccaccgtgtcttctgctccatatttagaggagttaacacagaaggtaaataaagttgaaccatatgaacaaaatgaagatgaaggtttagataaaaaatctttaccggaaaacagcacggcaagtgcagcttccgcctttgacaaagctgagaaagacatgagacaacatgtggaaaacggaaagcaagggcgtgtggtaaatcatgaagaaaataaaacagcggatttcagcgctgtgagtaaactgaataatacagatggcgcagaagatctctctactcaatcatctgtactctcctcacagccgccatcgcctcctcctcctcctcctcctccagttcccgccaaattgttcggtgatcgttggagaaagagaaaagtcggagagaggggatcctctaga

SEQ ID NO: 81013 - DNA, 1134 bp, Saccharomyces pastorianus
atgaacatgtttcccgtaaagtattacggagaatttgagttttgtattgcctccataaaggtcatcgcgttgctcggttttatcattttctcattctgtgttgtgtgtggtgcgggacaatctgatggacccatcggtttcaggtactggagaaatccaggagcctgggggcctggcattatctccagtgataaaaatgagggccgttttctcggatgggtttcctctttgattaatgctgcatttacgtaccaaggtactgaactggttgggataaccgctggtgaagcggctaacccaagaaaagctctcccgagggcaataaagaaagttgtagtgaggattctagtcttttacattctttcactatttttcattggccttttggtcccatataatgacccaaagttggatagtgacggtatatttgtctcttcatcgccctttatgataagcattgagaattcaggcacaaaagttctcccagatatatttaacgcggtcgtgctaatcaccattctttccgcaggtaactctaatgtgtacattggctcaagggtactgtatagtctgtctaaaaatagcttggcgccaaggttcttgtctaacgtgaccagaggtggtgttccatacttttctgttctatctacatccgtgttcggatttttggctttcttagaggtttctgcaggcagcggcaaggcctttaactggttattgaacataactggtgtggccggtttctttgcctggcttttgatttcattttctcatatccgtttcatgcaagccataaggaaacgtggtatatcgagggatgacttaccttataaagctcaaatgatgccttttttggcatattatgcatcttttttcatcgctctaattgttctgatccagggcttcaccgctttcgcacctacttttcagcctatagactttgtcgctgcatatatatcaatattcctatttttggccatatggttatcattccaagtttggtttaagtgccgcttactctggaagctgcaggatatcgatatcgattctgaccgccggcaaatagaggagttggtatggatagagccagaatgtaaaacaaggtggcaacgagtttgggatgtcctttcataa

SEQ ID NO: 81014 - DNA, 1911 bp, Saccharomyces pastorianus
atgttaaaagcaaattattttcgttgcgagacacaatttgccattgcactagaaacaatatctcaaaggctagctcgagtaccgacagaagctagattgagtgccttacgagccgagttgtttctattaaacagggacctaccagcggaagtagatatccccactttattgcctccaaataaaaaaggaaagttacataaattagtgactattactgctaatgaggcacaagttttgaactctgcagaaaaagttccatatttactcctgatagaatacttgagagacgaatttgattttgacccaacaagtgaaaccaatgaaagattattaaagaagatcagtggtaatcagggaggcttgatatttgatttaaattacatgaatagaaaagaaaacaacgaaaatagaaatgaaagtactcttactagcaacaacactcgatcttcggtatatgatagtaactcgttcaacaacggggcctcccgcaatgaaggtctatccagtacctcaagaagtgattcagcgtccacagctcatgttaggactgaagtcaataaagaggaagatttaggtgatatgtcaatggtaaaagtcaggaacagaacggatgacgaagcgtatagaaatgctttagtaatacagagggccgcaaatgttccaattttacctgatgatagtcaagacagaagcccagagttgaactttggctcaaacttggacgaagtactcatcgagaatggaattaatagcaaaaatatacatagccaaactgacgctttagcagaccagatgagagtttcagctgttatgttagcacaattggataagtcgccacaacagttatcagaaagtaccaaacaaatccgcgctcaaattatttcatcaatgaaggaggtgcaggataaatttggttaccatgatttggaagcccttcatggaatggcaggtgagagaaaattggaaaacgatttaatgacgggtggtattgacacttcatatctaggtgaagattgggctaccaagaaagagaggatacgtaaaacttcggaatatggccatttcgaaaactgggatttatgttctgtaatcgccaagacgggtgatgatttgagacaggaggcgtttgcataccagatgattcaagcgatggccaatatttgggttaaagaaaaagttgacgtttgggttaaaagaatgaaaattttaattactagtgcgaatacgggacttgtggagaccatcacaaatgctatgtctgtgcatagtattaaaaaggctttaaccaaaaaaatgattgaagatgcagaactagatgacaagggtggtattgcctctttgaatgatcacttccttagagcttttggtaatcctaatggatttaagtatagaagagcacaagacaactttgcttcttcgttagccgcatattctgtcatttgctatctcttgcaggttaaagatagacacaacggtaacattatgatcgataacgaaggccatgtaagtcacatcgattttggatttatgctatcaaattcacccggctcagtgggctttgaggccgcaccattcaaattaacttacgaatatattgaactgctaggcggagtagagggagaagcgtttaaaaagtttgttgaactaactaaaagttcgttcaaggctctgagaaagtatgctgatcaaatcgtatcaatgtgtgagattatgcaaaaggacaatatgcagccttgtttcgatgctggcgaacaaacaagtgtacaactacgacaaaggttccaattggacttatcagaaaaagaagttgatgacttcgtagaaaatttcttgataggtaaatctttgggtaatatttacaccagaatatacgaccaatttcaacttattacacagggtatatatagctga

SEQ ID NO: 81015 - DNA, 1146 bp, Saccharomyces pastorianus
atgcataaagcatccagttcaaagaaaagctttgatgatactattgaactaaaaaaaaatgaacagttactgaaactgatcaactctagtgaattcacccttcacaattgtgtggagttactgtgcgaacactccgaaaatattggtatacattactatttatgtcagaaattggccacatttcctcacagcgaactacagttctatattccccaactagtacaggtcctcgtcaccatggagacagaatcaatggctttagaagatttactattaaggttgagggcggaaaaccctcattttgcactactgacgttttggcagttacaagcgttactaacggatttatctactgaccccgcttcttatggcttccaagtggctagaagagtcttaaacaacttacaaaccaatctctttaacacaagttcaggtagcgataaaaatgttaaaatacatgaaaacgttgcaccggccttagttctttcctctatgataatgtcggctatagcattcccccaattaagcgaagtgaccaaaccattagtggaatctcaaggtagaagacaaaaagctttcgtttttaaattggctagaagtgcaatgaaagattttaccaagaacatgaccttgaaaaataccctactaaacaagaaaacttccagatccaaaagagttagctcaaatcgcagttcaactccgacttctccaatagatttaatagatccaataaaaactaaagaagatgcatcattcaggaaatccagacatagtgaggtaaaattggatttcgacattgtggatgatataggtaaccaggtctttgaagaaagaatctcatcttcaatcaaactcccaaaacgtaaacctaagtatttggataattcatacgttcataggacatatgatggcaaaaatataaacagggacggaagcatttcaaataccgcaaaggctctcgatggaaataaaggtgattatatttctccaaagggacgtaatgatgaaaataatgagatcggtaacaatgaagatgaaactggtggtgaaacggaggaggacgcggacgctttaaactctgatcacttcaccagttctatgccagatctgcataatattcaaccaaggactacttctgcttcatct

SEQ ID NO: 81016 - DNA, 81 bp, Saccharomyces pastorianus
atgttagaagacgacgaagataaggaattctccagcttactatatggcacatcgtatgttttcgcgatttccttcaaataa

SEQ ID NO: 81017 - DNA, 846 bp, Saccharomyces pastorianus
atgtgtattcaaaggttaagatatgctcaagaaaagcaacaggcgattgcaaagcagtctcgaagacaggttgcacaactgttactgacaaataaagaacagaaggcgcattatcgtgtggagatgctgattcatgacgatattcatattgagctactagagatattggaactatattgtgaattactactggctagagtgcaggtaataaacgatatctccaccgaagaacagcttgtcaaagagcatatggatgatggtattaacgaagctatcagatccctaatctatgcgattcttttcgttgatgaagtcaaagaacttagccaattgaaagatttgatggcctggaaaataaacgttgagtttgttaatggagtaatagcagatcatatcgatgtccctgaaaagattataaaaaaatgctctccctcagttccaaaagaagaactagttgatctttatttgaaggaaatcgcgaaaacatacgatgtgccatatagtaagctggagaattccttatcttcgtcgtcttctaacatttcttcagactttagtgacccctcgggagatatcgaggataatgacgaagaaaagcctattttagccttagataatgacgataatgacaatgcagatgctaaacaccctatcactgttaaaaagcctaggcagaatagtgaaaatatcaagaacgagctcaagattccgaaagatatcaaaaaggaagtgatcgaaaagaaacaatcagaaaagaaaactacaaaaagaaagactaagaaggagcaagaaaatgatgaactagatgagttgaagaaacggtttgacgctttacgcagaaaataa

SEQ ID NO: 81018 - DNA, 564 bp, Saccharomyces pastorianus
atgaaaaatggtcgtcaaaacacagaatcttcctttagacaagtccaagaattagtctacatgatggaaactgcgacaactgtagctccccaaggtgtagaaaagatcacagtcttggtagatttcaaaagttataaagaacctggtattatcactgataaagctccacccatctctattgctaggatgtgtttgaacgtcatgcaagatcattaccctgaaaggttagctaagtgtgtcctgatcaatatcccatggtttgcgtgggcttttttgaagatgatgtatccgttccttgaccctgccactaaggcgaaggctatctttgacgaaccatttgaaaaccacatagagccatctcaactagatgctctatacaatggtctgttagacttcaagtataaacatgaagtctattggccagatatggttaagaaagttgacgatttacgattgaaacgttttgatagatttttaaagtttggaggcattgtcggattaagtgaatatgacaccaagggccaacatgacgaattaaaatatcctgttgatatggtcatttga

SEQ ID NO: 81019 - DNA, 105 bp, Saccharomyces pastorianus
atgaccttgacaagtgggacacatgccaatgacagacccttgagtgattgggagaagttttggctttctaggggagtgttttctaagatacctaagagccaataa

SEQ ID NO: 81020 - DNA, 165 bp, Saccharomyces pastorianus
atgggtcttttttcaagaaaacgggaccatacgcctgctgtgcctaaagagaaacttattccatgtgataagatattcttggaccctcctgccaagtttggttacgcacctctactggaacccatctccgaagatcaaaacgaaaaatatagagctgtcttatga

SEQ ID NO: 81021 - DNA, 489 bp, Saccharomyces pastorianus
atggattttgataatttactaaacctagaagaacagtattaccaagaaggttttctggagggccagaatgagaatataaagcagagctttctagaaggtaaacagtatggtttacaagtgggattccaaagatttacgctcctgggacaaatggaaggtttgtgtgatgttatagaatcgtatggattgcatagtccaacactagaaaagaatatacataccattcgtactttaatgaaaggtttgaaaatgaataacgatgatgaaagtgtgatggaatttgagagggtgttaataaaattgaaaaataagtttagaaccattctaataactcttcatcgattagttaaagataaaagaacccccaccgtgacatttgaagtctttgaagacgtttcaagggccattgccggagaaattagaggttttgtagaaaatgaagacatcgcaaagaataagacaaaacaaaatcaggctcaatcctggtaa

SEQ ID NO: 81022 - DNA, 2508 bp, Saccharomyces pastorianus
atgtcaaaggatatcacgttggtctttcaaacttcaaattatctagatttgaaatcatggttaatagcttttgaagcgacaaaaaagtatgtcatgagtatacaacatgatagtcttgaatatgagctggcgtttaaaagattttctcccaagttttttgaatttgcctctagtacaaccacctccatagatcaattaatcacaacatttgacaaagaaaccgagtccttgtatgaaacgctgaactgctcaatctctgaatatgatattttgactttaggagaggagaaggtgtttcagttccaaatgccaacaacaccaatatctacaaaaatgacacaactggctattctgtctaatttcctcacaaaaggtagctggttccctaatgctgttcttgcgaatatatggggcacgaccgattggagtgaatatactatattgccaggaaagggaaagaaaccctcctctttattaacgatcgatggcaaaaggcttccaataagaaactccactatatatcctcaatattattctaatgagttgaaagtgcttgatctacagttcaagtcattagtattttctccggaccaaaggttggagaagctaccggaagagcttttacttttcaagtttgaagcattttggtgtcctaacaaaaagcagaagttctcagctacctgcttttgcacaaaagactacatttattgctacatgaattctatggaatttatctgtcttacaaagatcagcttgtctgaaatcgtttctgtagaagccgacagatcatcaaagaagaccttaaaactttacgatgccagcggtctacaaatgaaagcaatcgttttattttctgactataagcttattgcatctaagttgcaatatctgttagaaaacaaggctataaaaaacccaaatagtaacgaagagattttagtaaagtttgaacagatggaaaaagaatctcaagaaaaaaaacaagaagaattatataagatagaacaagaaaactcctttgatcgtaaggccaccagcatatccaaaatcatcaaatcacgtgtgacattttgggagatgtccgatgatgcatctactttattaaacagactcaaaaaacttcagacagagtactcgattacttacaatcatgaatatgaaatatctagtaaaggactagcccacatactatttggagataaatcgaatgcttttccaaaatgcctgtttttagcaagaaaagatggggaagaacacgggaaacgtttttggtataaaaacaaagacatcaacgggaaatcacaattagttcgaaagataccatttcgattggatatgaccggtaattttttaaatactggtaaatatcatagagataaggaatctaaaatgatttttgctacacagaggatagtcaaaattgttgataacaaatattatgaagtcgatttagatccttttttcgttaaagtgccattttgtcatttattgaagctttcaattaaatttgtcataactgagtcatatgatatagataaccatcttgaaataaagttgaatatgacggcgagcagttcatcgcttcatgtcctatacaaactagaatatattgatagtagaactggcaaaacaatagaaaagctatctttggctgaaataatatgccaaacatgggccttgaaatttgctcatagtgaattcctactgataagaagggtgttacggtactacttggaaaagattggcaaacacggaaaagttatcaaagctatcaaactatgtggtatattaggtgttctcagcaacaaaagtgaagaacctgctactgaaaaaaatggcaactccaaagagagtgaaagtatgcaatatgacatcaggtattcttgtactatccttttcctagtgtttatcaaactaatggtttacagagtaacgaatttgacgtttgtattcttcagaatacttatcggtattctattattatgtgctgaaaagttctcacggattaatcgaatgatggtggtcggattattagcatctattatgataaacatacttttatcagaaaaagcatcagtgccctactggtcaataaagagagctgaaaaactgttccacgaccgtcttggatcagataaattcacaatgcaaagagccatttacataagtgattcggacttgctaagtagtcaactgtcagtgccgtcaaataaccccatttttgagaagttcagcgaggacaatttcaataaggactatcagtatagcgaaacgagaaaacagttggctatgaggagaaatgaattgctaattgaacttagaatactccaagacatggagaaacaattagtgcatgacgactacgaaaaattcttgctggaagaagtaaataaatgctcgatggtgtctatagagatgactgatctttggtttaatgacactcaattgcaaaattactgttctatttgtaacgaagaactcgagaagttaagaccaccaataacttga

SEQ ID NO: 81023 - DNA, 1002 bp, Saccharomyces pastorianus
atgtccgttcacgggagggatcccaaaaagaggcagttaaggctaatatcggttgcattcaaagaagcatcaattgactctccttcctttcgtgcatccgtaaatttcttccaaacaagggtggatgcattagaggattggatagagaagactgtcgactttttcgatcagaaatataaggtttcatttgaagattttcgaagagcaaaggaaactctcctatcccaattgttacctcctccagccttgctgagcaacggttttgtcagtaaccaatcgtttactcccaggctgattgatagttttaacaaggactattatgacttttctatgaaattactgcaaattgtaaagggtgatgactctagccactcaaccgcgctattagaacttatgactactgcaattgaaccctacagaaacgtgagaaaaaatttcgatttttaccaaggtaaatatgacagtatgctggcatcctaccaggctataagaatttcaaaaaccagtttagagccatcttctatcaaaagtgatgccttacaattatttgaagtgcaaaaaaactaccttaaggcctccctagacctcataagtgccatatcagcagtaaaattaagcttagataaattcatactagagtcaatgaaagtattaaagtcaagaagcatttttataacgaaagattctggaaggaaaatagatttatctccttgcattaatgagtatttagacaattacgcaatatgggtagaaaattccatcgaaggatcgaaagtattggattctgatatcagtaatgcaaaaaagcaagcatataggtataccttgaaacgaattacgccgtcaagtgacacaagtgattacaatataagatcaatacattcctcgaagctgctatcaaaggatacgcaagtgcctccaaaatcgcccgaaaagtctgggtggatttatatgaaaacacaggttggaaagcctaccagggacatatgggtgagaagatgg

SEQ ID NO: 81024 - DNA, 156 bp, Saccharomyces pastorianus
atggctaaggactgtatgaaagaggacggaattagtggattgaaatgttacacttgtggtcaagctggccacatgtccagggactgtcaaaatgacaggctttgttacaactgtaacgaaactggccatatttccaaggattgtccaaaggcttag

SEQ ID NO: 81025 - DNA, 114 bp, Saccharomyces pastorianus
atgtctcaaaaagcttgttacgtttgcggtaagattggccatttggcagaagactgtgattctgaaagactatgttacaactgtaacaaacccggtcacgttcaaacggattga

SEQ ID NO: 81026 - DNA, 813 bp, Saccharomyces pastorianus
atggtactaccatctccgatactagaatctggagtatggggaccttttgatactatacttgacaacaggggtgatttttctgtttatgctgcgggccagtcgtgtactggtaaattaattgaacatttatttgagagtcatccatgtgccaggaaaattctgaaagatggtgctgatatctatcaagtactcgaacaaaccattcgtgacattgagaagaacaatggtctctcaattcatattcttacgaaagatatgtttttctacggtgattacgagggaaataggactccttttgcagatccacggataaagggttctttcattggcgagtccaccgatacatcaatgttgaatcttacatataaatatatttgtatcttggaatttttatcatttcagacaaaattgataattgatacatttcaaaatgaaaattcaaatatacatatcaacgagttaaggatatctggtagtcaagcgaaaaatgaaagactattatcattgatttccttggtcaacaacggtgtagcaataattaaacctaaagagaatgtcgatatgatgggtatcaaaggtgcttacgtgcttgctaagtctgcaaaggaaaagaaacaactagctgacgttataacagagagagatattagtaatgatagcgaaaaattccaatctcttgctgaataccgacttggaaacgatagcatattactaagaaaattgctttgcgttaaatatcatatacacttagatatggctaagcaacagaagcgttatcacaaactcgtcgacgaagtatttcagcacctctaa

SEQ ID NO: 81027 - DNA, 693 bp, Saccharomyces pastorianus
atgaatagcagtctgcaagttggcatcggaattgatgtaggttcatcaagtgctagaataggtgtatataattactacaatgatgcgctgttagaaatggcgcaggaaccagtcccatactaccaggattcttcaaagaagtcatggaaattctggcaaaaatcaactgaaataattaaagcccttcaaaagtgtcttcagaaactgaacattagagaatatgaggtaaagtcatgtggtgtttctgcaacgtgttcattagctattttcgaaagggatcgcacaagtaacatgctgataccgtatccaaatgaagataatgtcatattttggatggactcttctgccgtaaacgaatgtcaatggctaaatatgcaatgtccacaacagcttttggattatttgggaggaaaatttgtacccgaaatgggcgtccccaaattgaagtactttttagatgaatactctcatttacgagacaaacattttcatatctttgatcttcatcaatacattgcttatgaactgagccgcttgtatgaatggaacattgaaggacttttgggaagagaaaatcttaatggtataggcaatgatggagaggtatctggctggtcatcttcattttacaaaaacattataaatttaccatctaatgtaagcattggaaccactagttcttgttgccaataa

SEQ ID NO: 81028 - DNA, 297 bp, Saccharomyces pastorianus
atggaaattgtcaagctaaacgaggagaaacatgccaacgaactagcaaagaaacaaaagaaattggaacagcagaaattaagagagcagaaggaaaacgagaggaagcagaaagctcaaattaaaccacaagatatgttcaaggatgtcacattgtacagtgcttgggacgagcaaggccttccaacaaaggacaaagacggtaatgatatcaccaagagtatgaccaagaagttgaagaagcaatgggaacaacaaaagaagctacatgaagagtactttggtgaagacaaatag

SEQ ID NO: 81029 - DNA, 771 bp, Saccharomyces pastorianus
atggtcagtgcaaaagcattcttaggattggctaaatgcgaagaagaggtggacgctattgaacgtgaggtagaattatacagattgaacaaaatgaagcctgtttatgaaaagagggacgcgtatattgacgaaattgcagagttctggaaaattgtgctttcacaacacgttagttttgcgaattacataagggcttcagattttaaatacattgacactatagataagatcaaagtagaatggctggcattggagtctgaaatgcacgacactagagattttagtataacattccatttccatggaattgagggagacttcaaagagcagcaagtcaccaaggtgttccaaatcaaaaaaggcaaagatgaccaagaagacgggatactgactagtgagcccgttccaattgagtggccccagagttacgactcgataaacccggacttgatcaaagacaaacgcagtccagagggtaaaaaaaagtacagacagggaatgaaaaccatatttggctggttcagatggaccggcctaaaacccgggaaggagttcccgcacggcgactcattggcgtcattgttcagtgaagagatctaccctttttgtgtgaagtactatgctgaggcccagagggacttggaagacgaagaaggagaatccgggttaagcgcagatggcgacagcgaggatgacgatggcagtctcggtgaggtggacttgccactatccgacgaggaaccaagctctaagaaaaggaaagtttag

SEQ ID NO: 81030 - DNA, 117 bp, Saccharomyces pastorianus
atgagtaggtttagggtaactaaacaacaaagaagaactccagactcaacacaaaaaagagcaatgtcgcaacgagggaaaccgttgtccaagcccgctccggacctagactactaa

SEQ ID NO: 81031 - DNA, 141 bp, Saccharomyces pastorianus
atggggtcgggcgatttgaatctgttgaaatcatggaatcccaagcttatgaaaaatagaaaaaaagtatgggagaccgaacaggatctaattaccgaacagcagaagcttaacacgcgattgaaagaaattgaaaaagaa

SEQ ID NO: 81032 - DNA, 723 bp, Saccharomyces pastorianus
atggcgattgggtcaggggtgaagaccctagtcacagtactaatgtcagaatacaggcaagaagggcatttgggaaggagtctgaaaaagggtggcaatgtcttcttgaaaacgacaacgggagattttgtgaaattgggagttaaattaacttcagggacacaggcgatattggagaacaccgaggaactattcggtggtgttggttccaatggcagggtgtacgatgcatcgaaatttggctccgctgatggtgcagacagtgatactgcagctgtattagacttggatactttattcgaggaggatcagttagttggtagtaaatattccaggataagagatcatgagcccacggcagtagtcatcgatatgtcttcaccgggggatcacaacgaacccacaatagtgagtctgtacgcagatcagcccctcgacctgcccacgggtttgaaggaggcgtatagttcattagaaaagcatatgcatattgcgtacgatgcggtatggagggcaaagggacagatgaaggatgataaacggggagggccgagcgccgcagcagtttatgttgctagagctgcacctgtggcaattattcggccgttaattggggccactgaggcagtgtctaagactttacagggaatagctaatcaagtggataagacgcataacgagcaaatcaatgataagtacaagtccaatcggactgattcgtaa

SEQ ID NO: 81033 - DNA, 1452 bp, Saccharomyces pastorianus
atgcttcctacttctgtttcccggtccttgtatctcaagacgtttagaagccaccttttacgagcaccacaaattgttttaaaaagaatgtcctcttccatcgatatcagtaagatcaactcttggaacaaagagtttcaatccgacttaacccatcaattggcaaccactgtccttaagaattataatgccgatgatgcactgttgaacaagactagactgcaaaagcaagataacagggttttcaacactgttgtctctactgattccactccagtcaccaaccaaaaaagctctggtagatgttggttgtttgccgctaccaatcaactgcgcttgaatgttctttctgaattgaacttaaaagaattcgaactgtcccaagcttacttgttcttttacgataagttggaaaaggccaactatttcttggaccaaatcgtctcctcggctgatcaagacatcgactcacgtctcgtgcaatacttgttagcagctccaacagaagacggtggccaatacagcatgtttttgaacctagtcaagaagtatggccttatccccaaagatttatacggggatctaccttattctactactgcgtccagaaaatggaattctctgttgactactaaactgagagaatttgccgagactctaagaacagctttgaaagagcgttctgccgatgattccataattgtcactctgagagagcaaatgcaaagagaaatcttcaggttgatgtcgttgttcatggacatacctccagtgcaaccaaacgagcaattcacttgggaatacgttgacaaagacaagaaaatccacactatcaaatcgactccgttagaatttgcctccaaatacgcaaaattggacccttccacgccagtctcattgatcaatgatccaagacacccatatggtaaattaattaagatcgatcgtttaggaaacgtccttggcggagatgccgtgatttacttaaatgttgacaatgaaacactatctaaattggttgttaagagattacaaaataacaaagctgtcttttttggatctcacactccaaagttcatggacaagaaaactggtgtcatggatattgaattgtggaactatcctgccatcggctataatttacctcagcaaaaggcatcgcgtattagataccatgaaagtttgatgactcatgctatgttgatcactggctgccacgtcgatgaaacgtctaaattaccacttcgctaccgcgttgaaaattcctggggtaaagactccggtaaagacggattatacgtgatgactcaaaagtacttcgaggagtactgctttcaaattgtggtcgatatcaatgaattgccaaaagagctggcttcaaaattcacctcaggtaaggaagagccgattgtcttgcccatctgggacccaatgggtgctttggccaaataa

SEQ ID NO: 81034 - DNA, 273 bp, Saccharomyces pastorianus
atgcacagtcttgtatacatggttggccatcttttggtttggatgctagtgggtacaatagtcttatcactcgatattatatttcctgctcttgtgacggaaccgcacctactgcatctcttaagtttcccatcggatatttctgatacactcagtttgtcacaggttacatcgtcgtacagtaatttgctaaaagatttggaggttctattttttatgggtagtttatctgtatcaataattaatccctcttctaatggttgcaataaatga

SEQ ID NO: 81035 - DNA, 129 bp, Saccharomyces pastorianus
atgcgtacccttggtattctagaagaaagaaattccagacactgtcactctcatttctttttattaagtcgagaagtgaaatgtttaaaacaattctatacaaaactatgctatagtactaataattag

SEQ ID NO: 81036 - DNA, 1362 bp, Saccharomyces pastorianus
atggaatttaaactacatcgtgaaattgcaggcagcttggcattgcaaatcgcaaatatttggattattttccaattgtttaatccgggctggttccatgcatctgtggaattattgccttctgccgttgccatgttgttgtatgtaggtgccaccagacactctctacgctatctgtccactgggtctacttctaactttacgaaaagtttagcgtacaatttcctggctagtacactaggctggccatttgttttaattttaagcttgccattatgtttacattaccttttcaaccatagaattatttctaccatcagaaccgcattcgactgctgtttgatattttcattgactgcatttgctgtgattgtcactgacagtatattttacgggaagcttgctcctgtatcatggaacatcttattttacaatgtcattaatgcaagtgaggaatctggcccaaatattttcggggttgagccatggtactactatccactaaatttgttactgaatttcccactgcctgtgctagttttagctattttgggaattttccatttgagattatggccattatgggcatcattattcacatggattgccgttttcactcaacaacctcacaaagaggaaagatttctctatccaatttacgggttaataactttgagtgcaagtatcgccttttacaaagtgttgaatctattcaatagaaagccgattcttaaaaaaggtataaagttgtcagttttattaattgttgcaggccaggcaatgtcacggatagtggctttggtgaacaattacacagctcctatagccgtctacgagcaattttcttcactaaatcaaggtggtgtgaaggcaccggtagtgaatgtatgtacgggacgtgaatggtatcacttcccaagttctttcctgctgccagataatcataggctaaaatttgttaaatctggatttgatggtcttcttccaggtgattttccagagagtggttctattttcaaaaagattagaactttacctaagggaatgaataacaagaatatatatgataccggtaaagagtggccgatcactagatgtgattattttattgacatcgtcgccccaataaatttaacaaaagacgttttcaaccctctacatctgatggataactggaataagctggcatgtgctgcattcatcgacggtgaaaattctaagattttgggtagagcattttacgtaccggagccaatcaaccgaatcatgcaaatagttttaccaaaacaatggaatcaaatgtacggtgttcgttacattgattactgtttgtttgaaaaaccaactgagactactaattga

SEQ ID NO: 81037 - DNA, 705 bp, Saccharomyces pastorianus
atgatattgctgggtgactttattcacaagggcccggactcagacaaggtcgtgtcgtatattctaaatcacaaggatcaagtcaagtgcgttttgggcaatcatgaaatattggtcatgatggcctatttaaacccagacttctcgaaatgggtaagacgccccaaattaatgacacctttaactttcagtacggagactaatttcataccacaagacatctctaaaatcagcaacgcacatggacggttagctcgcgaacttgggttttccaaattaagtcagctagcggaacattgttctatggccatagaactagatctggatattaccggtgatatactctttggtgcacatgcagggatggttccgggagacttcatgaagcccaaccaaattccgggcgtgagctctctgtcaaacatgaagtacgttgataagaagaactggtcaaaaacatcacgtgaaaaggaaaacaagaattatgtgagatggtacacactgtgggacaaatacggagaccactttagtaacgccaaagtattttacgggcacgatgcatccatgggactaaacctacggagacagaccaaaggtttggacacagcatgtataaagaacaatctgctttcatctatgaaagtgaagtacgatattaagaaggggcaatatgactatgaattaattcaagtacaatgctcttaa

SEQ ID NO: 81038 - DNA, 366 bp, Saccharomyces pastorianus
atggaagataagcggaaaagacgagccgctacacttagtacagcattgatattatttgtggcatgctgcgtttatacactatatatattcaagtttgataaccctcggttgtctccaccagtttccttattgcctacaattagcaccttgaagaaaattgagcatgtaacagatttaaataaggagtacgtttttgttggtgacgttcatggtaactatgatgagttcatagaactcattgatgacaagattggaggactaggagaaaatataacaatgatattgctgggtgactttattcacaagggcccggactcagacaaggtcggtcgtaattctaaatcccacggatcagtcagtgcgttt

SEQ ID NO: 81039 - DNA, 1413 bp, Saccharomyces pastorianus
atgttaaaatttaaggacttagataagtgtattcaattcaggtttgcttgggttaaatgtttatggatgactttgaacaaagaaacgtggaccgacgttcctgaaaaggagaaagattatattttagattcatcatccgtgccattggaaaagcaatttgatgacattttacacatagatgacagatcaaatgaggaaagagataaagaatcaagcgaaagtgaaaatgatagcgaagatgaggatgacgaaaacgatcactccaaaagaatcatttcatctgaagcctttgaagaacctaggcgtgcgacttccaaaggaaatagttcattgactgtcgcctttaggaacaacaggtcatatgttacaagagataacagaattggtgtgttcaaaacggatgatgaagacgattctctagaatttgtagctgccataaagaatatttctaatttaggtggtaaaagcattgatcctcataagccaatgttgtatatggaagatcgtaatttaattttgactgatggcgaaaatgagaacaaactttataagatggatatagaaagaggaaaggtgattgaagaatggtctactggtgacaagaatgttgttcaatatggtccaaccaaaaaattcgatcaaatgacgcctgaacaaacaattgttggcgtttcacagaaaggtgtctttaaaattgatcctagaattaacggaaaaaataaaatagccgtcgatgaatcaaaagattacgtgggtaaatataactttagctctattggaacaacagagagtggttatattgctattgggtcagaaaaaggtgacataaaactatatgataggctcggtattagggcaaaaactgctataccttcactaggccaagcaatcaagtttattactacctctgctgacggtaaatggttattggcgacttgcgagagtactctgcttcttatggatttgaaaattaaggatggaaaaaatgctggcaacattggatttctgaagtcgttcccagccagtgaaaatgttaaaacatatgtattaaaaatacgaccagaacattcggcatcaatcttaacgtacacaaaaaaaccaatccgatttacgaaggcttattttaataccggtataggccggcaagaacaaactattgttacatcgacgggtccttatgcgatttcttggtcattaaagggcattttaaatcaagatggtagtaataattatccttacagaatccgtaggtacaatgctgatgttgttgctgataattttgaatttggttcagacaaaaaggttatcgttgccttgaaagacgatgtctctctatcgaaagtgaaatcctttaaacagccaagcaaaggagtcttgatgccaagtgcttccctccaagatttttatggctaa

SEQ ID NO: 81040 - DNA, 813 bp, Saccharomyces pastorianus
atgaacattttgaagaagtttatggagtctggtaacaagccagagctcatcacgataccttctgggcagtttaatcttttgaggtctaagaattcccctaaagctgctttagaatgtatttacaacaatgcaactttaagcgtacgtaaaataggcaaatttgattatgagttggcggtttatagggtagaggacgatagtgaaggaggcacgggagatgaggctgagaattttgaagacgacaccatcagtgttttatccacacagtctaaaaagaaagaagaggagtggagcgttgaaatatcggataaaatcatgtttcacaaaacatgggataaacaaggaaacgtggcgcttgtgtgggagaacttaagaggtgatgaacaagatgaaaaggttcaatttgttgttgccgctgatgtgtcgttttctgatgttgaacagtttatccaaactgtttaccgatgccaattcgaagtaaggaataaaaaatcctctctcactgcctcagcagatgacttaaaggaaatagagcatagatcaaccaggctctttgttcaagatgatgatgacgagttagattcaagctcagatgactttcaagatgctaaagacacctcttttgagcacgagaaggaaagtgaaatattggaaagaactccttctccattgaaaaaagttccagaaggggaatattgttgtttagtgatgtctagcctatacatgtatgatccaattcaagaaaaatttattctgcaggagcccgtggtaaaggtagcaattattgatacaggcaagtacgaatttggctag

SEQ ID NO: 81041 - DNA, 237 bp, Saccharomyces pastorianus
atgtgcttcgttgaattcgatgatgtcagttttgcaaccagagcgttagctgaattgtatggtagacagttacctcgctccactgtgagcagtaagggaggtatcagattaagcttttcaaaaaacccactgggtgttaggggcccaaacagcagaagaggaggcagtggtaacccaaatcctaatgtaaatatgctttccagttacaattctaatgttggtcatataaaaaactaa

SEQ ID NO: 81042 - DNA, 804 bp, Saccharomyces pastorianus
atgctagtagggctctcatcatatctatctgacggaccacaagaagctattcaagcagtgatcgatgttagaattcctaaaagacttgttgaattactgagccatgaatcgactttagtccagactcctgctttaagagctgtaggtaatatagtcactggtaatgacttacagactcaggtcgttataaatgctggtgtcttacctgcgttaagacttctgctaagctctccaaaagaaaatatcaagaaagaagcgtgttggaccatttccaatattacggctggtaatactgaacaaattcaagcggtaattgacgcgaacttgattcctccattagttaaacttttggaagttgcagaatataaaactaaaaaagaagcttgttgggctatttctaatgcctcttcaggtggtttacaaagaccagatatcataagatatttagtatctcaaggctgtataaaaccattgtgtgatttgctagaaattgctgacaacagaataattgaagttaccttagatgctcttgaaaatattttaaagatgggtgaagctgacaaagaagctcgtggtttgaatatcaatgaaaatgccgattttatcgaaaaggctggtggtatggaaaagattttcaactgtcaacaaaatgaaaatgacaagatttatgaaaaagcatacaaaatcattgaaacctactttggtgaagaagaagacgccgtagacgaaactatggctccacaaaatgccggtaatactttcggctttggttctaatgtcaaccaacaattcaattttaactaa

SEQ ID NO: 81043 - DNA, 822 bp, Saccharomyces pastorianus
atggataatggtacagattcttccacgagcaagttcgttcccgaatatagacgaacaaactttaagaataaaggcagattctctgcagatgaacttcgtcgtcgtagagatacacaacaggtcgaattaagaaaagcaaaaagagatgaagctttggccaaaagaagaaactttattcccccaactgatggcgctgattctgatgaagaagatgagagctccgtttctgcggaccaacaattttacagccagttgcagcaagaactaccacaaatgactcagcaacttaactctgatgatatgcaagagcaattgagtgctactgttaagtttagacaaattttgtctagagaacatcgccctccaattgatgtcgtcattcaagccggtgttgttccaagattagtagaatttatgcgtgaaaaccaacctgaaatgttacaattggaggctgcttgggctttgactaacatcgcatcaggtacatctgctcaaacaaaagtggttgttgatgctgacgctgtacctcttttcattcaactattatataccggctccgttgaagttaaagaacaagccatttgggctttaggtaacgttgcaggtgattcaactgactacagagactacgttttacaatgtaatgccatggagccaattttgggtctttttaactccaataaaccatctttgatcaggaccgctacgtggactttatccaatttatgcaggggtaaaaaaccacaaccagattggtcagtggtctcaccagcgttgcccaccttagcgaaattaatctattcgatggatactgaaacttaa

SEQ ID NO: 81044 - DNA, 552 bp, Saccharomyces pastorianus
atgggagggcaagctctctcaagaggatctctattgtgtggcagttatgcgaatgaaatgtttcaggtagactgccgtcatcaacgactagagagactgaactacacccgcacagttgcaggtgggattgtacaaatccttacaagcgataacgggcgttacgtgtacgttgtcagacgcaacagtgacgcgattagtatttacgatcggcgaaacctgcagcacgagcttaacgtattgcgcctaccgtttcggatccaccacaactctgcaaagttgaaggcatatatagatacggcttacggactaagtatggggacgccgcagggaacaatattgaactggggtcgagaccttgtggaatttggaggtgttccctcacacaatagtgttgaagacccactaatcacgtctatcccgccagagtcagagtggcgcactaaccttgattctactattcctgccacggtagtgaagaattgtcctggggatcccgaactgttcgccctatctcatgggggcacaatttcattatgcaggttcggcggctaa

SEQ ID NO: 81045 - DNA, 555 bp, Saccharomyces pastorianus
atggtacaagggcattatgagtccttgaatagaaaaaatgatgaaagaatgaatgcaattccgtattgcgacactggcgaagtgttcgaggctgagacgatagcgaatgtatggaaaagagaagataaggaatggttaaaaaggactcaaagtgatcgaagtggatacgagtatccacgactaggagaatcaccatatatcaatatgacagaggacttcagaatggaaaagaaggtaatatgtcaagatatcttttggtcatgtgatggtacatcgtttgtttctgtgcataatgattttggcatcagacaatatttagtgccggaggaaggtaatacggacaagctaaacagaaacctccttctaccatttactaggttttttagaaaccagtctattgtttcatgtgcaatagacccgttttactcgctttataacgagaattccgacaggttagctggtgacagaatcgtggttggaggaaaaaatttccctctacaactatactctttgatggacgggcagtgtatcctcagctatgacacgatgaactaa

SEQ ID NO: 81046 - DNA, 261 bp, Saccharomyces pastorianus
atggagataaaaatattcgagaacaaaaacagcaaccacaccataataatagtacagatagtactcttccgaaaggaagcttacagcaggagaaggaagatctcaatatcaaacccacaaaaaagggacaaaagacaaaattcacgagcatcaaaaagcaaaggtagtaaaattgcctcaaataatcatcacaacaagcaagctaaaccaaagacgagaaacgacaagaagaaaaagaagtcaaagtgtgtaatactttaa

SEQ ID NO: 81047 - DNA, 900 bp, Saccharomyces pastorianus
atgaggtctattaaatgtgtgataattggtgatggtgcagtaggtaaaacgtcacttctaatatcatatactaccaattcgttcccaacagactatgttccaacggtttttgataattattctactacgatagctatcccgaacggaactgcgagtagccccctagagcttgacaatggtaatgataaaagaggttcgctttcatctgccagttctttaccaagtacggacagaaaactatataaaatcaatttatgggacactgcaggacaggaagattacgatcgtttaagaccgttatgttatccccaaacagatatttttttaatatgtttctcagtaagcgaacatgctagttttgccaatgtcacagaaaaatatctacctgaactgaagcagacttccaatattgaaggtacctctctttatactaagttagggaagtatccaattctattggtaggtaccaaaagtgacctaagagatgatccggcaactcagaaaaaattgcaggaagcaaactccgattacgtgtctcaagaggaaatagatgaactcgtacaaagatgtgggtttatgggctataccgaatgttcagctgctaccaaagcaggtgtccgggaagtctttgagcaggcggtgaggtacgctatctacgaaccagaatcccctaaccaaaaatcagcaaatcatactctaactgatgaattaacgactgcaacaaccaacaccaatggagataaaaatattcgagaacaaaaacagcaaccacaccataataatagtacagatagtactcttccgaaaggaagcttacagcaggagaaggaagatctcaatatcaaacccacaaaaaagggacaaaagacaaaattcacgagcatcaaaaagcaaaggtag

SEQ ID NO: 81048 - DNA, 432 bp, Saccharomyces pastorianus
atgcatggttactttccactggaaataaatttcactaaggactactcagcttctgatttttttagtggcggtacaattatttatatacaaagaaaatccgaaagtgttttcgagaacaaagcctcttttaggaacgtagaagatattcatgtggcactcaaaagaaaggcagcagaatctaaaaattattcaagattaaacctaaaaaatgaacaaggaaataccacctcttcgcaactggttgaaagtttgggtattcaagatttgacaatggtagaactcgatactcttttgagtgcaggaaataatacagcattaacagattcagaatcttataatttaggtttgctgtgttcagataaaaacagtggagatattttggattgccaactcgaattgtggtacaaaagctttggaccacatgatgaataa

SEQ ID NO: 81049 - DNA, 156 bp, Saccharomyces pastorianus
atgcctgtagagcctcggtgccttgttataaaggacatttccactggtgacgcagtaaacaacgttcctattgaattggtggtcgaggaagacgtcgaaaaagaagaagtaataagagagatgtctacaccttgcctgcttcctgatttctcctaa

SEQ ID NO: 81050 - DNA, 165 bp, Saccharomyces pastorianus
atgaccattacggtaagtttatttcgaccaaatcttgcactgggttttcttttccttgggtctggacaatacgctctcaatacttctactttagaatctatcgctttcttaagcatgtccgttttacccacatatacaacgtccacatcccttagcaagaattga

SEQ ID NO: 81051 - DNA, 1362 bp, Saccharomyces pastorianus
atgagttcaagtatgaagggtagtatggactctaaactaatcaaagttattagtgtacacctagtggcctttctcccaagcggatctagcgatttgaatatagatctaaaactacaaactgctggtattatagggatgggtatgttatatttaaactcaaggcataaacgaatgagcgattcaatttttgcccagctggtgtcactgctcaatgtaaatgatgaaatggttgctgacgaagaatatcgattagcagcgggtatatcgctgggcctcataaacctaggggctggtcagacgaaactgagaaagtgggattcatcattgttgggcttgggggacgatcttccggaagatgtttatgactctagtgatgttgaacaaaatgtaatgtatgaagacctgactacgaagttattagagatcgtcacaagcacatacgatgtagaaaacgattggataccagagaattcgcaaattggagcagtaattgcaatcatgtttttatttttgaagtcaaacaattttggaatttccaacatgcttaaagttgacttaaaggaaatattaaaagcaaatattaacacccgccctgaattattaatgtaccgagaatgggcatccaatatgattttatgggaatttataggcgacgacctatcgttcatcatgaaagatgttgatattggagtaaaatttagtgaacttaataccgatttgcttcctatatattacactatggcgggtaggatcttagccatgggtattagatttgcctctactggaaatttgaaaattcggaatatactactttctctcgttgataagtttctgcctctttatcagtacccaggaaagcagaatctagactttaggttgacaatttctgttattaacgttttaactaatgtcatcgttgtttctttgagcatggttatgtgtgccagtggcgatttagaagttttgaggagggtcaaatatcttcatgaagttgtatctggtccatattcagacttatttcaagaaattcctagttctaaaagtgatgtttcaggtgtaacacaggtgacttcaaacactaacacacctggaaatagtgatcgtgaaagggttgatgagaccgctgcttctctcgatgacgaaaggtcctcaaatggcagtgatattagtgatccaacagcatatttagaagacaaaaaggatatagatgaccattacggtaagtttatttcgaccaaatcttgcactgggttttcttttccttgggtctggacaatacgctctcaatacttctactttagaatctatcgctttcttaagcatgtccgttttacccacatatacaacgtccacatcccttag

SEQ ID NO: 81052 - DNA, 2667 bp, Saccharomyces pastorianus
atgacttctaagccgtctactagaaatgattatttaccaagggaaactcacaatggcgaatatactggtgattctcccggatggcagttgcaggttaatatcacaaacaaaataggtggtataaatggagatatttggttgtcaagggacggaaggagtgttaaatggtgtattgaagaccagtacttacgtcagtttacttataatcaaaagatcatcaaagctgggtacattgattttgaaaagacaccagattgttttgtggtagttctctctgatattgcgcatgtatatatgttgaaaaatgggggttctacgactgtatgtttcccattccagataggtaatgcattctggtatgcaaatggagtaattttagagagagagacttcagcgtccttcatggatggtggctacgatttaaaacccattgagttcgatttaaaacataaatacatcactttgacggatccgatggcgcctttcggcttgatttcaatcacaaatacctttaaaggcggtataaatagcgcttcaggtaacaaaacggatatcctgcaagactttcagctcgtgctcttcccgagtgacaaggacaagtgtatagctgtttttttagatcgaaattccaaagtgttgcgattttattacagtagaattctatcatcagatcagtcacggaagggagagctaacaatttcctcgaccaaaaaaacaggtttggacgcagcaggcaatagtcaaaagagtggcgggattagcaaagatttgcgtaagttttcacatttgacgcgccggtcgacgtctataaactctaactctcatgatttcaatgcagccgaaagagtacttagtggcaatgttggcaacgcttcaggcagaacagatattttcgctttaccttcttcttgttcaagaagaagcttatctgcgaccctagatagaatggggaacaatattgccccgaccaatagagctacaccttctggattttttgactcgtcatcagcaaatactgctactcactctaatattactcctgtatcacaaccaatgcaacagcaacagcaagaatatttgaaccaaacagcgacctcttctaaggatattgttttgacggaaatatcgtctttgaaattaccggatgatatcatttttacttcacgacgcttgagctctattttaagtaaattaaagttcctatcgttgagatttgaacgtcgagaaggacttttaatatttcatgagcccacacatttctgcaaaatctggttgattgatcttttacccgatgttctggattctattccattcaaaatatacgggaactctccgcaaaacatgatcagactagagaacttaaagcttaaggaaccctcaagaatacaagctatgtatattcatgaactccttgaaagttgcctgattttggtgtcggagggacagaataaggaagaatacaaagcatgtctatatgaccccttcgttaaaattacatccccttccaaaaatatctccgaagagctcactaaacaaaattctcttccttccttacagaaactattcccttatcccgagactagtttcaccaaactgtgcttcgaagccgtcaagtatattacttctcctgcattcaatatttcatttatatttctatggcaatctgcatattcgatgcttctttcaagggctaacgacgtagttgggggtttgaaaatggagcacgatgctttttcactggttctttcattgctgattttaccgatacctagctcctctgctcaagaataccaggagtacaaagaaatatatgaacgcgacctgtttcagcatttaaagcaggactcagaaataacaagctctgtgctaccaagaattgttattggattgcatttaataagggaggaatattccctgaatgtattgtgtcgaaatgagcatgcgttgttaggacagtttctaagattcgctactgccgcgatgggctggcctgatctgtggcaatcttactatgtaccgaaaatggattcagaatcgaaaactttcctacatccaagggaacaaaattccactttttttcatcccttagatgaaccgccatcgattaccaagtcgttatacagcataactgaaaacagttcaataccattatgtccgttcattagtttctcgagacttgttgcaaccgatacacaggtcgaattacgcattactccaagaagtttcaaaatcttgggcttgtatgaactcgtacactctccaaattttttaccggattatgttttaggcatcctttccagctttaaagtggataaagacgagttacaaacatatcccttaggcattttggtgcctttacaaaacattttaaaaattctggaagataagctatctgaagtaagagacaacttggagttattagatagggccgatttacaaaggtgtagtgccattatcaatagtataagaagtgattctaaagaagttctcaaaagaggccaaagagatagttatatgttatacaaagtgccactcgccaagaatagaagctctttgtctaagaagcccagtgacatatattcaatattatccgagattgtgaaaagtgcaagtcaagttccactggatggatcagactatgcaggatgtcgcaatattcaggcatga

SEQ ID NO: 81053 - DNA, 372 bp, Saccharomyces pastorianus
atgtcagtattatcaaacatgaagcaattgatatgtgaaacgaatttttaccgaaggggaggcaaaaacccaagggacgacatggatggccaagaagacagcttcaataaggacactaacgttgtcaaaagcgaaaatgcgggctgtccttccgttaattcaagaccaataattctagataaaaaatactcactgaactctggagcaaatatcagcaaaagtaacacaactactaataatgtgggaaatagtgcacagaatataatcaattcatgctactctgttactaatccattggtaataaatgcaaattccgatacccatgatactaataagcatgatgtactatccactctacctcacaataattga

SEQ ID NO: 81054 - DNA, 1236 bp, Saccharomyces pastorianus
atgtcaagcgaggaacgctcgagacaaccaagtactgtttcaactttcgatttagaacccaatccttttgaacaaagcttcgcctcttccaagaaggctttgtcacttccaggcacgatctcccatccgtctctaccaaaagagccttcacgaaacaattctacctcaacgataacacaacattcccaacgttccactcatagtttgaacagtattccagaagaaaatgggaattcaaccgttacagataatagtaatcataatgacgtaaaaaaagactcacctagttttttaccaggccaacaaagacctactataatatctccgcctattctcacacctggtgggtcgaaaagattaccacctctactcctttctccctctattttatatcaggcaaattcaactacgaatcccagtcagaattcacattctgtttcagtctctaattcaaaccctagtgcaataggcgtttcttctacctccggatctctgtatccaaacagctcttctccttcagggacttcacttatacgccagccacgaaactcgaacgtgaccacaagtaattctggtaacggcttccccacgaatgattcacaaatgcctggctttttattaaacttgtccaaatctgggttgacacctaatgagtccaatatcaggaccgggttgacacccggtattcttacgcaatcttacaattatcccgtattgccgtcaattaataaaaatactataacaggtagcaaaaatgtcaacaaaagtgtcacagtgaatggaagtattgaaaaccaccctcatgttaatataatgcacccaactgtaaatggtacaccacttacgccgggattgagttctctgctaaacttaccatctactggagttttggctaatccagtattcaaatcaacacctacaacaaataccacagatggtaccgtcaacaacagcatcagtaattccaatttttccccaaatacttcaacgaaagcggctgtcaaaatggataatccggcagagttcaatgccatcgagcactccgctcataatcacaaggagaatgaaaatttaacgactcaaattgagaacaatgaccagttcaataacgatacacgaaaaagaaagagaaggatgtctagcacaagttctacttctaaggcttcaagaaaaaattccatatcaagaaaaactcagcagttacgactgcaccagcacaaaaagatgatgttgtaa

SEQ ID NO: 81055 - DNA, 867 bp, Saccharomyces pastorianus
atggaaggaaaagctttatcaaatgcacggttagaagagctcaaagatgctcttcctaagatggactcgttgagtttggaagatgaacttgcgaaaatagatggccaaagtgcataccatattgattctgcagaggaaaaggaaacctttgaaagtaaaataggccaaatagcttctagaaatagtgcagacttcataatagaggaggacttgcaaaatattttagatgatgatcttaaagactcagaacttaacttggatggcgaagaagccgaaataattttcgattatgagagccaagaactggatacaccggatggtataggggaaaagatttctcaaatgatagaatcggtgttaccgggagggtttggaagtgaagaacagggggggttgcgaactgtaacaaatgtagaggatttagatgttgcagaagaagtcacagatatcgatcatgataccgttgacgcagctcgtttgcatggagacggtcaacattccatatcttctagaaagcacagcaggtcaaagaactcgaaaaagaatgggcatgtaaggcgacatgacttttatgacgaatctagagaccataaaagttgttgcccgcatcatcattatgaaaacttatccaaactacgaaactactattatcatgattttgaatatatttccaaaacggaaaaccgtgttccagatttctctgtcctagttaacgaatcaagtcccatgtgtttattttgcgagtactacatggtgtttggtgaaccaccacgtaacatgataaagtggtataatcgtacgtttggttacaatcgtatgccgaatccaccaagagatgaacaagatagtaggaaaaggaatagatag

SEQ ID NO: 81056 - DNA, 1572 bp, Saccharomyces pastorianus
atgcaaatacaacaacaacaacagcagcaacaacagcagcagcaatcacaatctcccgttcagagcggctttaataatggtaccatatcaaactatatgtactttgaaagacgaccagatttgttgactaaaggaacgcaagataaagcagcagctgtaaagttgaagattgagaacttttaccaatcctctgttaaatacgccattgaaagaaatgaaagaagagtggagttagaaacagaactaacttctcataattggtcagaagaaaggaaatctaggcaattgagttctttgggtaaaaaagagtcacaatttttaaggctgcgtagaacgagattatcgttagaagatttccacactgtgaaagtcattggaaaaggggcatttggtgaagtcagactggttcagaagaaagacaccggaaaaatatatgcaatgaaaactttattaaaatccgaaatgtacaaaaaggaccaattagcacacgtcaaggctgaaagggatgttctggctggaagtgattctccatgggtggtttcgctatattactcattccaagatgctcaatacttatatttaatcatggaatttttgcccggtggtgatttgatgaccatgctaatcaggtggcaactatttacagaggatgttactagattttacatggctgagtgtattttggccatcgaaaccattcataaattaggattcattcacagagatattaaaccagataatattttgatcgatattagaggtcatataaaattatctgatttcgggttgtctacggggttccataaaactcacgactcaaactactataaaaagcttttgcaacaagatgaggcaactaatggtatttccaagccaggtacttacaatgcaaatacaaccgatactgcaaataaaaggcaaacaatggttgtggattctattagtctaacaatgtcaaacaggcaacaaattcagacatggagaaaatcacgtcgtttaatggcatattctaccgtaggtacaccagattatattgctcctgaaatatttttataccaaggttatgggcaagagtgtgattggtggtcacttggagcaattatgtacgagtgtctgattggttggcctccattctgttccgaaactccacaggaaacgtacagaaaaatcatgaattttgagcaaactctacaatttcctgatgatattcatatctcttatgaagccgaagatctaatccgtcgactattaactcatgcagaccaaagacttggtagacatggtggtgcagatgaaataaaaagtcatccattttttcgcggtgttgattggaatacaatcagacaagtagaagcaccgtatataccaaagttgagctccatcaccgatactaggttcttcccaaccgatgagttggagaatgttccagattccccagctatggcacaagctgccaaacaaagggaacagatgacaaagcaaggtggaagtgcgccagtcaaggaagatttaccttttattggctacacttactccagatttgactatttgacaagaaaaaatgcgttgtag

SEQ ID NO: 81057 - DNA, 537 bp, Saccharomyces pastorianus
  modified_base (498)..(498): a, c, g, t, unknown, or other
atgtataatagcagcagcaatcatcatgagggtgcacctacttcaggacatggctattatatgtcccaacaacaagaccaacagcatcaacaacaacaatacgccaacgaaatgaatccgtatcagcaaattcctagaccgcctgctgcaggatttagtagcaactacatgaaagagcaaggctctcatcaatcgttacaagagcatttacaacgtgagacaggtaaccttggcagcggttttacagacgttccagccctgaattatccagccacaccaccaccgcataataattacgcagcttcaaatcagatgatcaataccccaccgccgtcgatgggtggtctttatagacataataataattcccagagcatggttcagaacgataatgggagtgggaatgcacaattaccccaattatcaccgggccaatattctatagagtcagagtacaatcaaaatttaaatggcagttcttctagtagtccgttccancaaccgcaaacgctacggagcaatgggtcatattcaagc

SEQ ID NO: 81058 - DNA, 564 bp, Saccharomyces pastorianus
atgaagctgaatggtggccgtggttgggatttgtcgataaacaaaaagccgaacttacatggttatggtcacccaaatccaccaaatgaaaaatcaaaaaggcatagaagtaaaaaccatcaatattcatcacccgatcatcaccatcattacaatcaacagcaacaacaacagcaggctcaggctcaagcacaggctcaagcacaagccaaagtgcagcaacaacaattgcaacaagcccaggcccagcaacaggccaatcgttatcaattacaaccatatgactcgcactatgacgaagaaagagaggcgtcgaagcttgatccaacttcgtatgaagcatatcagcaacaaactcaacaaaaatatgctcagcaacaacaaaagcaaatgcaacagaaatccaaacagtttgccaatacaggtgccaatggtcaaactaacaagtatccatataatgcgcaaccaacggcgaacgacgaacaaaacgctaaaaacgcagcgcaagatagaaatagtaacaaatcatcgaaaggttttttcagtaagctaggatgctgttag

SEQ ID NO: 81059 - DNA, 927 bp, Saccharomyces pastorianus
atgtctcaagtgcaaagtcctttgacagcaacgaactctggtttagctgtcaataataacacaatgaactcacaaatgcctaaccgtagcaatgttagattggtcaatggtactttacccccatccttacatattagctctaacctaaatcacaacactggcaatagctctgcctcctattctggctcacaatcacgcgacgattccactatagtcgggctgcactataagataggtaagaaaatcggtgaaggttcatttggtgtactttttgaaggtacaaacatgatcaatggattaccagttgctatcaagtttgaaccaagaaaaacagaagccccacagctaaaggacgaatatcggacctataaaattttagcgggaacacctggtataccacaagaatactactttggtcaggaaggattacataacatattggttattgatctgcttggtccttctttagaagatttattcgattggtgtggaagaagattttcggtaaaaactgttgtacaagtcgcagtacaaatgataactttaattgaagatttgcacgctcatgatttgatataccgtgatattaaacctgataattttttgatcggaagaccgggtcaaccagatgctaacaaagttcatctaattgactttggtatggccaaacaatatcgtgatccaaaaactaaacaacatattccgtacagggaaaagaaatcattaagtggcacagcaagatacatgtcgataaatacacatttgggtagagaacaatcgagaagagatgatatggaagctatgggtcatgtcttcttttatttcttgagaggccacttaccctggcagggtttaaaagctccaaacaataagcaaaaatacgaaaagatggtgaaaagaaaagatctactaacgtttacgatctag

SEQ ID NO: 81060 - DNA, 222 bp, Saccharomyces pastorianus
atgggtggtaaattagttataggtgtcctaaaaggctatgatcaactgatgaacttggtacttgatgatacagtagaatatatgtctaatcctgatgatgaaaacaacactgaactgatttctaaaaacgcaagaaagctaggtttgaccgtcataagaggtactattttggtctctttaagttccgccgaaggttctgatgtactatatatgcaaaaatag

SEQ ID NO: 81061 - DNA, 105 bp, Saccharomyces pastorianus
atgactattacaaagccaggaatgatttcgatggccgacatgaattacgtcgtttccaagaacagaagcttaaaccgtcctgctgagcggggcgataatcggtga

SEQ ID NO: 81062 - DNA, 195 bp, Saccharomyces pastorianus
ggtaaacccgtaaaccccggaaaaaaaaccccaagatttttttttgttattgggaaaaaaaaaaaaaaaaaaaaaaaagatgtcttatcttatctttcttatcttaaagacctaccatttgttccttttctattttggcagcccgggtattcgcaaagggaaaaaacccaagacagcattccttgttcattatga

SEQ ID NO: 81063 - DNA, 1293 bp, Saccharomyces pastorianus
atgatggcttccgccgtgtgtattttccaatggtttttctggggatactcattagctttctcacacaacactagaggtaacggttttattggtaccttggaattctttgggtttcgtaacgttttaggagccccatctagtgtcagttctcttcccgatatactgtttgccgtttaccaaggtatgtttgccgcagtcaccggtgccctaatgctaggtggtgcctgcgagagggcaaggttgtttcctatgatggtgttcttgtttttatggatgactattgtttattgtcctattgcatgctgggtctggaatgccgagggttggttggtcaaattgggtagcttggactatgcaggtggtttatgtgtccatttaacatctggacatggtggtctagtttacgctttgatactgggtaagcgtaatgaccctgttacacgtaaagggatgcccaagtacaaaccacattccgtcacctcggtggttttaggcacagtgttcttatggtttggttggatgttctttaacggaggctctgcaggtaatgcaactatacgagcatggtactctattatgtccacaaacttagctgctgcttgcggtggcttgacatggatggttatcgattatttcagatgcggaagaaagtggactacagttggtttgtgttcaggtatcatcgctggcctagtgggtatcaccccagccgccgggttcgtgccaatctggtcagccgttgtcattggtgtggttactggtgcaggatgtaaccttgctgttgacttaaagagtctattgcgcatcgatgatggtctagattgttactctatccatggtgtgggtgcttgtattggttgtgtattaactggtatctttgctgcagactatgtaaatgccactgcaggctcttacattagtccaattgatggtggctggatcaatcatcactataaacaagttggttatcaattagcaggtatgtgcgctgcactagcctggactgttactgtcacatctatcttgcttctaactatgaatgccattccatttttaaaactaagattaagtgctgatgaggaagaattaggtaccgacgctgctcaaattggtgaatttacatacgaggaatccactgcttacatcccagaaccaatcagatctaaaacatcggcacaaatgccacctcctcatgaaaacattgatgataagattgtgggtaacacagacgcagaaaagaattctacgccttccgacgcttcttctactaagaacactgaccatatagtataa

SEQ ID NO: 81064 - DNA, 2562 bp, Saccharomyces pastorianus
atggatatctcaaatataatcacctatattttaaagacgttgcataatgggaatatcatagcagtttctatcctaaaggaattaattattacagtcgggggcattagagacttaaacgaagttaatatgaagcaactattaatgttaaactcaggatcaccattaaagcaatatgcaagacatctcatatatgattttagagatgataattcggttatttcgtcgaggctaacctcatttttcactgatcagagcgctatttctgagattattctcctgttatacactttaaacctgaaagcaaatacgcaaaattctcattacaaaattttatccactagatgcgatgaaatgaatacattgttatggtcgtttattgagttaattaaacattgtttgaaagggaaagcatttgaagagaatgttctcccatttgtagaattgaataataggttccatttatcgacaccgtggactttccacatatggagagactacttggataatcaattgaactcaaatgagaatttttctattgatgaattaattgaaggtgcagagtttagcgatgttgatttaacgaaaatatcaaaggatcttttcactactttttggagactttcattatacgatatccatttcgataaatcactatatgacgagcgtaagaatgcactatccggagaaaacacaggccacatgtcaaatagaaaaaaacacctgattcagaatcaaatcaaggatattttggttactggaatttcgcatcaaagagccttcaagaaaacttcagaatttatatctgaaaaatcaaatgtctggaacaaagactgcggggaagatcaaattaagatattcttgcagaattgtgttgtgccaagggttttattttctccttcagatgctctcttctcttcgttttttatctttatggcttttagtacagaaaatttgatgtcgatattgaatacttgtattacatcaaatattttaaaaacgttgctgttctgttgtactagctctgaagcaggcaatttaggtctgtttttcactgacgttcttaaaaagcttggaaaaatgagattaaatggcgatttcaacgaccaagcttctcgaaagctttatgaatggcattcagtaattaccgagcaagtcattgaccttttatccgaaaaaaattacatgtcaattagaaacggtattgaattcatgaagcacgtcactagtgtcttccctgtagtgaaagctcatatccagttggtttacacaactttagaggaaaacttgataaatgaagaaagggaggatattaaactaccaagcagcgcattgattggccatttgaaagcgcgtttgaaggacgctttagaattggacgaattctgcaccttaactgaagaggaagctgaacaaaagagaatacgtgaaatggaattagaagagatcaaaaattatgaaacagcttgccaaaatgaacaaaagcaagtagctttaagaaagcagttagagcttaataagtcgcaaagacttcaaaatgatccacccaaaagtgttgcaagcggcagtgctggattaaatagcaaggatagatatacttattctcgtaatgagcctgtaatcccaacaaaaccttctagtagtcaatggtcatattccaaagtcaccaggcacttcgacgatataaaccattatttggccacgaaccatttacaaaaggcaatttccttagtagagaacgacgatgaaactcggaatttaaggaaattatctaagcaaaatatgccaatattcgactttagaaattcgactttggaaatattcgaaaggtactttaggacactcattcaaaatcctcaaaatccagattttgcagaaaaaattgattcgcttaaaaggcatatcaaaaatatctcgcgcgagccatacccagatacgactagctcatattctgaagcttctgctcctgaatataccaaaagatcaagtaggtacagcggaaatgctggaggcaaagatggttatggtagttccaactatagaggaccaagcaatgatcgttctgcacccaaaaatattaagccaatcagtagttatgcacataaaaggtcagaactaccaactagacctagtaaaagtaaaacatataatgatagaagtagggcacttagacccacaggtccggacaggggcgatggttttgatcaaagggataaccgcttacgtgaagagtataagaaaaacagttcacaacgttcacaattacggtttcctgaaaagccatttcaagagggcaaagacagcagcaaagccaacccttaccaagcttcatcttacaagcgcgactcgccttcagaaaatgaagaaaagccgaataaaagattcaagaaggatgaaacaattagaaacaaatttcaaacgcaagattatagaaatacacgagatagcggtgctgcccatagagccaatgaaaatcaaagatacaacggaaatagaaagagcaatactcaggcgcttccgcaaggtcccaagggtgggaattacgtcagtaggtaccagaggtaa

SEQ ID NO: 81065 - DNA, 1926 bp, Saccharomyces pastorianus
atgtttatcgccgtctcaagcactgttccaaatataaatgatctaacaaccatatcattatgtaaactaataccgtcgttgcatgaagaattgttcaaatttagttggatatcctctaagctgctcaacaaggaacaaaccaccttattaaggcatttgttaaaaaagtcaaaatacgaactgaagaaatataaccttttggtagaaaattcagtgggttatggtcaattggtagccttattaatattggcgtattatgatcccgacaatttttccaaagtgtccgcatatttgaaagaaatctatcatattatggggaaatattccttggattctattcgtactttagatgttattttgaacgtttctagtcagtttatcactgaagggtacaagttctttattgctcttttacgaaagtcggatttttggccatctagccatgtagctaacaattccaattattcttctcttaatgaaggcggtaatatgattgcagcaaacattatttcattcaatttatcgcaatataacgaagaagtcgataaggaaaactatgaacggtatatggatatgtgttgcattttactgaaaaatgggtttgtcaatttttattctatttgggataacgttaaaccagagatggaatttctacaagaatatattcaaaacttagaaactgaactggaagaggagtccactaaaggcgtagaaaatcccttggctatggcagctgctttgtccactgaaaatgaaactgacgaagacaacgcccttgttgtaaatgatgatgttaatatgaaggataaaatctctgaggaaacaaacgctgatatagaatcaaaaggcaagcagaaaactcggcaagatattttattatttggtaaaataaaactcttggaacgcttactcatacatggttgcgttattcccgtgatacatgtgttaaagcaatatccgaaagtgttatatgttagtgaatccttatctagatatttgggaagagtatttgaatatcttttaaatccattgtacacatcaatgacctcatctggtgaatcaaaagatatggcaactgctttgatgataacccgtatagataatggtattctagcccataagccaaggttgatccataaatataaaactcacgagccatttgaatcccttgaattgaattcaagctacgtcttctattacagcgagtggaattccaatttgactccttttgcttctgcaaatgatctatttgaaaactcgcatatctatttatctatcataggaccgtatttggggagaattcctacgcttttgagtaagatttcacgtattggggtagctgacattcaaaagaaccacggttctgagtctctgcatgttacgattgataagtggatagactatgtaagaaaattcatttttccagctacctcgctattgcagaacaatccaattgccacatcggaagtttacgaactaatgaaatttttcccttttgaaaaaagatattttatttacaacgaaatgatgacaaaattatcccaagatattctaccgcttaaggtgagcttcaataaggccgaaagagaagcgaagagtattttgaaggctttgagtatagatacaatcgcaaaagagtccaggagatttgccaaattaatctctacaaatccattggcctcactggtaccagcagttaagcagattgaaaactatgacaaagtttctgagcttgttgtttacaccacgaagtactttaacgattttgcgtatgatgtattgcaatttgtattattgttacgcttaacttataacaggcctgctgttcaatttgatggtgttaaccaggccatttggcccagagattatcaatatttattgcaggtttggccaaaagttgtcccaatatggatatctcaaatataa

SEQ ID NO: 81066 - DNA, 267 bp, Saccharomyces pastorianus
atggatgtcatcaaatccaacaagtttggcattcaagttaaccattccctacctcaaatctccattgataaatctgacggcggtaacatctatttatccaaagaatccttgaatactgaaatctacacttcgtgctcaactgctattaacgtcaacttaccaatcggcgaggacgatgattacgtagaattcccaatccctgaacagatgaagcatagcttcgctgatggtaagttcaaatctgctgttttcgaacatgctggttaa

SEQ ID NO: 81067 - DNA, 1050 bp, Saccharomyces pastorianus
atgcctgactctaagtacacaatgcaaggttataaccttgttaagctattaaaaaggctagaagaagccactgcaagattagaggatgtcaccatctatcaagaaggttatattcagaataaattggaggcatctaaaaataacaagccttccgaatccggggccgatgcgaatactacgaatgaaccttctgcagaaaatgctcctgaagtagaacaagatccgaaatgcataactgcgttccaatcttacatcggtgagaatattgatccgctggtagaattatcaggaaagatcgacacggtggtcttagatgctttgcagttgctaaagggaggctttcaatcgcaattaacttttttaggagctgctgtgagatcaagaaaaccggattattcttctcaaactttcgctgattctttaagacctatcaacgaaaatattataaagctgggtcaattgaaggaatcaaaccgtcaaagcaaatacttcgcatatttgagcgctttatctgagggtgctcctttgttctcctgggttgcagtggacactcccgtgtctatggtcacagatttcaaggacgcagcacagttttggactaatagaattttgaaagaatacagagagtctgatcctaatgctgttgaatgggttaagaaatttttggcctctttcgataatttgaaagcctacattaaagagtatcatactactggggtttcctggaaaaaagacggtatggattttgctgacgcgatggcacaatcaacgaagaatacgggtgctacttcatctccttcgccagcaagtgctacagcggctccagcaccaccacctcctccaccagccccaccagcttccgtctttgaaatctctaatgatacaccagcaacgagtagtgatgctaacaaaggcggtattggcgcggtcttcgccgaactaaatcagggtgaaaatatcactaagggtttgaaaaaagtagacaaatcccaacaaactcacaaaaatcctgaattacgaatcctctacagtttcttccacaggaagtaa

SEQ ID NO: 81068 - DNA, 1119 bp, Saccharomyces pastorianus
atgaagttggggaaggtatttactgcaaaagacatatgggataagttgagccaatcttacaatttagagaaaattgatgaaatggagaatacatattccttggaagccactacagagagttcacggaatggcaatggaaatggtgacgatgcagaaattcatgaagaaactttacttgaattgaataatcgaataagagtacgcaagcaagattttacattaccttgggaggaatacggtgagttgatcttagaaaatgcaagaaaaagtccaaactctaacgaagagtatcctcgagttgaagatatgaatgagaaagatagtacaattccaaaggaaagtctttctacagacctaaagaacgacaacaataaacaggaaaaaaatgcgacaattaaagtgaaagagttgcctgaatatcatacagaggaaaatgatagccccatagacgtccagaaagaacccattaaggaggtgcaaagcgatgaaaaggaactccagagggaacatatgagtgaagaagaacagaaaatgaaaagtacaaataaaacagcagctccagtaagaaaatctcaaaggttgaaaagaagtaaggaagttaaatttgaagatgaagaaaaggaagagatagaagaagataatacgaaagacgaagaacagaaagaaaagaaagaggagatccgggagccaaaaataacccacaatgaagaagtagataaggaaaaaaacgaaaacgaagaaggtgatgatgagcgtgaaaaatccacctcttatgaaaataccaatggctctgaaagcgaaggagttgaggaaggagttgacgaagaactgggatacgagtctgaacgtgaggcagaaggtaaaggaaaacaaattgaatcagaagggggcaacttaaagaaaaaaacggaaaacaaaaaaggagatgatcaacaggatgataccaaaaaggattctaaggacaaaaatgaaccattagcaaagagaaccaggcattcatcatccacaggtaatactagcaatgaaacctcgccgaaaaggaaaaggcggaaggcaggctctcgtaaaaatagccctcctgccacaagagtttccagcaggctacgaaataaaaaataa

SEQ ID NO: 81069 - DNA, 111 bp, Saccharomyces pastorianus
atggtagtacattggacaattgtggatgaaatacgacttcttagatgggcatctgaattcaaaccgggcggaatcataagcatttcacatgtttgcatagtggaaagatga

SEQ ID NO: 81070 - DNA, 1047 bp, Saccharomyces pastorianus
atggcacccaatttggtaacattatcagggttctgctttattatatttaatgtgttaacaacactttactacgacccgtattttgaccaggaatcgccacgttggacctatttctcctatgctataggtttgtttttataccagacttttgatgcttgcgatggaatgcatgcacgtcgtacaggccagcagggccctctaggggaattgtttgaccattgtattgattcaatcaacacaactttgtcaatgattcctgtctgttccatgacaggtatgggttacacatatatgaccattttttcacaatttgcgatattgtgcagcttttacttgagcacatgggaagagtatcacacccacaaactttatctagctgaattctgcggtcctgttgaaggtattattgttttgtgtatttctttcattgcagtcggaatttacggacctcaaaccatctggcacactaaagtagcgcaattctcctggcaagattttgtgtttgatgttgaaaccgttcatctaatgtatgcattttgcacaggagcattaatatttaatattgtcacagctcatacaaatgtcgtgaggtattacgaatcccaatcgaccaaatctgcaactccaagcaaaactgcagaaaatataagtaaagcagtaaatggtcttttgccattctttgcatacttctcttcaatttttaccttagtcttgattcaaccatcttttatttctttggctttaattttatcgattggtttttcggttgccttcgtagttggtcggatgattattgctcatttaaccatgcaaccattcccaatggtcaatttcccatttttaatcccaactatccaattggtattgtacgcatttatggtttacgttttagattaccaaaaagaaagcatagtttctgcattggtttggatgggactcggcttgacacttgctatccatggaatgttcatcaatgatattatctatgacatcactacctttctggatatttacgctttatcaattaaacatccaaaagaaatttag

SEQ ID NO: 81071 - DNA, 237 bp, Saccharomyces pastorianus
atgatatcgggggtttacctttatgaaaagctggagttaactgataattgggtaacagggaaggatatatcaggagagttgagcgatgcttgtggtcaagaaattgcactccgggccttgcttcaattttacaattttcaacactatgaaatatctatggaggaccttggatatggacactgtaatagttccagccaagatctgttaaacaaggaatccgagtatttgaatatttaa

SEQ ID NO: 81072 - DNA, 2628 bp, Saccharomyces pastorianus
atgaatgctagtggaagatctcattccaaaggccccattataaggtctgtgtctttagaagatcttaagagaaactctagtttcaaaggcaatctaaagtacaaagatgaagtcacttcacataaagaaccacaggtcggaacattgagcaacgaagaactgctaaaagatttggacaacatgttgcgcggtaaactgaacatgggaagaaacagttttcatgccgataaaagaaataaatcagatggaaatatcagtgccttaaccttcaaggcaagatcaggtcttgagggagatattcgtaccatagatatacagcaagatagtagtgatgaaaatgataattttaagttcagtgatgatggcgttaataaggatagaaataatgagaaagataataatactgataacgccgttgaatttcaagacgatgctgaagaagctgaagaggagaatgaggatgaatcatttgctaatgtagatgaactggatggctttgatttgaataaggtttctgatggcaagcatgttcctatcaatgaaaagggcgaagttgattataatatgccggtagataaagaatttcagaaatcacttgatcagtgcgcagcttcacttgaggaaagatcaagtgcaccttatgctttacaaagagcagtggactgggaattgaagatgttttattctttggaagatgaactgtcggaatggttttgcagctctgattatatgcattttggacagacacagactctgtttaaacagaaaattacgcaaccacaattattctttgatgatgaaaactatgctgcgagcgtagttgaatgtttaattgaagacatccccaattctttagcatctaatttactcgcattatcatatatttctatgggatgctttgcgtttacgaatagcaaaagtgagcatacaaagattatacgacgcaacaatttaatgcttgttcctcatattcaagaaattgttcatgccttcaagaagattgcaataagttgtagggatgacaacagaaatttaaagaaacaaacaattttgctatttcattcgtcaacaatcctatacttcatatgcagtatttgtatagaaggtagaggagaaaatccggaagcagtaaatgttgttatcgacgcttttgagaaaacagatttgttggaatttttaacaaagtatattgaaaattggaggtggaatagcagattagctatgcgcataagaaatatgatttctttgctcttcaagcttattgtattacaatttggtgacagttctgtctacaaacagaccaaatcatctatttataatctccatggcttaacatatccatcaaagcatccagaaaagctttctatctccccattacattatcaagcattcagggaggacattacttcccgttttcctgattacaatatgcccagttctggcttacctaaagatgttgacaaatcagaatctctttcccagtttctggaaattcctcgtccaaaatcaaagaatcctctaaatatggcgctcattgttcctgaaaaacatattgctacacctgctccttcaccgccaagctctccacaattaatgcatttaggtgaaggtcctagacctcgtaaatctttccaaacaaacatggcatatccgtgtttgtatccatctgataatgaaggatctgaagatgacactctggaagataggatagattttaatatagagagaaaacctgataacgatatagttattccattcagtaccgaagaggcagcgagaatattaagcgagagtttagaaattaagctgagtacaaaacaactttggtacgaaagggacttattcatgataactgaacgtggttggaaacagcaattagaaaatgagccatatgattatgccgcgcttaatcatgatgcaaactcttcaaaagaggaaaaaagtgcgatttgcattatgcagcgaattgacaaatattataagagctgcctttcgagctttaactctcttgtttttgtcttactgcaaacaatggaatcaagcttgacaaataactttcataggaaaagtgaagtctccgataaaaatcttctaaatatgctgacaccccaattggagatcgtgagagctaaggaattgtccctaaagtcagcagcgggcatattacatgcgttattgaagtggtttaagttaagccatattttgaaatttgaacacttggcggtagttattcacgattcgcgatacatcaacacatgcgcatctattttaagcaaatattctgaggtttatccagagagggttttcaataaatatgtacaaaccccgaattcattttggaaggagtgttctctctctaacgagtcttatcgtgaatcctattcagtagatgactcaggagaggtcgacacggagattatgccttcgtttgcatatctgttaagaatcttgagaaaagtcacagggaataaaacacaaaggttaaaggagctgcccctctccatcggcattctatttaaacgctattatcggctcttcaaccttgacatgtatcatccaatattgaaaataacaagagaactcacaccattcaaaaacaagaggtggaaatccgagcatatggaatga

SEQ ID NO: 81073 - DNA, 1530 bp, Saccharomyces pastorianus
atgatttctctttattatgagtatttaatgaattggttgactaaaggtctactccgagctacttatggagaattcttcattgctggaaacactgatacaaatggtacagacgatgattttatttaccacattcctatagagttcaaccaagaaagagttccggccttcataccgaaagagttggcatataaaatattcatgatcggcaaatcgtatatcttcctagaaaagtactgtaaagaggttcaatggacaaacgaattttctaaaaagtatcatgtcctgtaccagagcaattcttatcggggaatatcaacgaacttttttgaaattataaatgatcaatattctgaaattgttaatcatactaatcaaattctaaatcagaagtttcattacagagacgtggtatttgcgttaaagaatattcttctcatgggtaaatctgattttatggatgctcttatagaaaaggccaatgatattctcgcgacaccatcggattcattgccaaattataagttaacaagggttttacaggaagccgtgcagctttcttccttaagacatttaatgaatagcccccgtaatagttctgtcattaatggattggatgcgagggtactcgatcttggacatggatccgtgggttgggatgtttttactttagattacatcctctacccccctttgagtttagtattaaacgtaaatcgtccttttggcaggaaagagtatctacgaattttcaattttttatggagatttaaaaagaacaattatttctatcaaaaggaaatgttgaagagtaatgatataatcagatcattcaagaaaatcagaggttacaacccgctcatccgtgatattatcaataaactttctagaatcagtatacttagaactcaattccagcaattcaactcgaagatggaatcttattatttgaactgcattatagaggaaaattttaaagaaatgacccggaaactgcaacgcacagagaataaaagccaaaaccaattcgacttaattagattaaataatggcaccatagaattaaatgggattttaaccccaaaagctgaagtactaacaaagtcttcaagcagtaaacctcaaaaacacgcaatcgaaaagacgctgaatattgatgaattagaaagtgtacataacacgttcttgacgaatattctttctcataagctttttgcaactaacacaagtgaaataagcgttggtgattattctgggcaaccatacccaacttcattggttttacttttaaattcggtttacgagttcgtcaaagtttattgtaatttgaacgacattggatacgaaatcttcattaaaatgaatctcaatgatcacgaagcatctaacggattattgggaaaatttaatacgaatttaaaggaaattgttagccagtataaaaattttaaagacagactgtatatttttagggcagatttaaagaacgatggcgatgaagagcttttcttattgagcaaatcgctccgttaa

SEQ ID NO: 81074 - DNA, 1032 bp, Saccharomyces pastorianus
atggaactagagcccactctttttggtataatagaggcattggctcctcaattattgtcgcagagtcatttgcagacatttgtatctgatgtagtcaatttactgcgatcatccaccaaatcggcaactcaattaggccctttaattgatttttacaaattacaatcactagattcgcctgaaacaacaattatgtggcataaaattgagaaatttctcgatgctttatttggaatccagaacaccgatgatatggtaaagtacctctctgtctttcaatctttgcttccatcaaattacagagcaaaaattgtccaaaaatcatctgggctcaatatggagaaccttgctaaccatgaacatttacttagcccagtgcgggctccaagtatatatacagaagcttcatttgaaaacatggaccgattttctgaaagaaggtccatggtatcttcgcctaatcgttacgttccctcttcaacctacagttctgttactttgagacagttgtcaaatccttattatgtgaacactatacccgaggaagatatcctaaaatacgtatcatatacattattagctacgacatcggcactatttccgtttgatcatgagcaaatacaaattccgtctaagatacccaattttgagagtggacttttacatttaatatttgaagcgggtttattatatcaaagtttgggttataaagtggagaagtttaggatgttgaatatatctccaatgaaaaaagcattgattatagaaatttcagaagaattacaaaactacacagcatttgtgaacaatctggtctcttcagggacagtagtgtcattgaaatcgttatatcgtgaaatatatgaaaatataataaggcttcgaatatactgtaggtttacagaacactttgaagaattgagcggagatacattcttgattgaattaaatattttcaaatcccacggagatcttactataagaaaaatagcaacgaatttgtttgaattcaatgatttctctttattatga

SEQ ID NO: 81075 - DNA, 1473 bp, Saccharomyces pastorianus
atggatgaaactgctcattcaaactctcaagctttgctagatttgttgaaaaaaccaacatcatcgcagaagacacacgcttccaaaccagatacttcctttttaccaaatgactccgtatctgatatacaagatgcagaatatgaagatttcgagagtagttcagatgaagaggtggagacagatagagatgaaagaaattcattgaatgtagacattggggtgaacgttatgccaagcgaaaaagacagccgaagaagacaaaaggaaaaaccaaggagcgacgcaaacaaaacaaacttgaacgcttctgcagaatctaatagtgtagaatgggggcctggtaaatcttcaccctcgactcagagtaaacagaattcatcagtaggaatgcagaataaatatcgtcaagaaattcacattggtgatagtgatgcatatgaagtcttcgaaagcagttctgacgaagaagatggaaaaaaattggaagaactggaacaaactcaagacaactccaaattaattagccaagatattttaaaagagaacaatttccaagacggtgaagtgcctcatagagatatgcccactgaaagtaataaatctataaacgaaactgtcgggttatcatcaacaacaaatactgtaaaaaaggtacccaaagttaaaatactgaaacgaggtgaaacctttgccagtctggcgaatgataaaaaagcttttgattcaagctccaatgtgtcttcatcaaaagatttattacagatgctaagaaacccaatttcctctactgtatcttcaaatcagcaatcaccaaaatctcaacatctgagtggggatgtagaaatcatgatgatgttgaagaggaattctgtgtcaaaacctcaaaatagcgaagaaaatgcatcaacttcaagtataaacgatgcgaatgcaagcgaacttttgggaatgttaaaacgaaaggaaaaggacattgcagcaccaaaacagccctataatgttgactcatactcgcagaaaaatccagcaaaaggattgttgaatattttgaaaaagaacgactctaccgggtaccctcgcactgagggtggaccgtcaagtgaaatgtcaacgtcaataaaacgcaacgacgctacaaataatcaagaatcagataagaattcaacagagttattaaactacttaaagcccaagcctcttaatgatgggtatgagaatatttcaaataaggacagttctcatgaattactgaatatattgcatggtaataaaaacagcagcgccttcaataataatgtatatgcaactgacggatattccttggcatctgataacaacgagaattcctcaaacaaactactaaatatgctgcaaaacaggtctagtgcaataaatgagcccaacttcgacgtccgttcgaatggaacttcagggtctaatgaattattaagcattttgcataggaagtga

SEQ ID NO: 81076 - DNA, 1446 bp, Saccharomyces pastorianus
atgtcactgccgctacgacacgcattggagaacgttacttctgttgatagaattttagaggacttattagtacgttttattataaattgtccgaatgaagatttatcgagtgtcgagagagagttatttcattttgaagaagcctcatggttttacacggatttcatcaaattgatgaatccaactttaccctccctaaagattaaaccatttgctcaattgatcataaaactatgtcctctggtttggaaatgggacataagagtggatgaggcactccagcaattctccaagtataagaaaagtataccggtgaggggcgctgccatatttaacgagaacctgagtaaaattttattggtacagggtactgaatcggattcttggtcattcccaagggggaagatatctaaagatgaaaatgacatagattgttgcattagagaagtgaaagaagaaattggtttcgatttgacggactatattgacgacaaccaattcattgaaagaaatattcaagggaaaaattacaaaatttttttgatatctggtgtttcagaagtcttcaactttaaacctcaagttagaaatgaaattgataagatagaatggttcgattttaaaaaaatttctaaaacaatgtacaaatcaaatatcaagtattatctgattaattccatgatgagacccttatcaatgtggttaaggcatcagaggcaaataaaaaatgaagatcaatcgaaatcctatgcggaagaacaattgaaattgttgttgggtatcactaaggaggaacagattgatcccggtagagagttgctgaatatgttacatactgcagtgcaagctaacagtaataatgcggtctccaacggacaggtaccctcgagccaagagcttcagcatttgaaagagcaatcaggagaacacaaccaacagaaagatcagcagtcatcgttttcttctcaacaacaaccttcaatatttccatctctttctgaaccgtttgctaacaataagaatgttataccacctactatgccaatggctaacgtattcatgtcaaatcctcaattgtttgcaacaatgaatggccagccttttgcacctttcccatttatgttaccattaactaacaatagtaatagcgctaaccctattccaactccggtcccccctaattttaatgctcctccgaatccgatggcttttggtgttccaaacatgcataacctttctggaccagcagtatctcaaccgttttccttgcctcctgctcctttaccgagggactctggttacagcagctcctcccctgggcagttgttagatatactaaattcgaaaaagcctgacagcaacgtgcaatcaagcaaaaagccaaagcttaaaatcttacagagaggaacggacttgaattcaatcacgcaaaacaataatggatga

SEQ ID NO: 81077 - DNA, 600 bp, Saccharomyces pastorianus
atgatgcttgttgaatcatggcatgaagaactattgttaaaaaactacattcaaagattactacctccaggccgtggtgatggcgacgatggcgacgatggcaatggtaatgatggggatggctgcaaccatgataagacttggttaccttcggagatagaaaggcataacgaatttagattatggtggaaaggcatttggtcgagtttaggatggagattacagacttcatggttactagctcatcatgggtctaaagaacgtatatatgggcgtgatatgaaatatcaagggcgtttcttgcgttccaagtttttggaaagcgtgacgagttcaattctaagttacagagatgtgacaaacaatgcagaacctttgcaaaatgtgaagacaagcatcgttagctctaaggaaatggtgaagaagtcggcattatggggcgattggcaaagagatttgaccaaaatttctcataagactcaagaatggaaaatagttgaaggtgggcatgaaatatataagtatggtctgggcaaacaacaaactcaagaagtcctattaagattaataggtgagcttggcaaactaaccgaggattaa

SEQ ID NO: 81078 - DNA, 1251 bp, Saccharomyces pastorianus
atgaaggctaatggtttagataatgatccggcaaggacgggaatggaaagaacagatatagatagtgaacacccagaagcgcaaccgttactgaacaacaaccaccggacgcttggtgcaggatctgcaaatggcccagcagttaatgaaggtcgtgacattgaatccgatgggttcatcaaagatagtctctttcaaattcgcaaaggttatagaatctttattcataactccaaatggatattgaatatcctaattctaattaacaccatctggctagtcaccactttgatttcagatttctttttcaatatcaatattcttttcggattcagtaacaggtacgcaagttttaacgacttgactttaatattcatctcgatcattgctaattctttcaatctctggtttaataagctgggactgtactcagctttagattacagcttaaatgtaactctctgtgttttgacgttgttcaatctagcattgacctatctaattaaatacactaggcaaagaatcggctttgtgggcacgtttacatatttgtggacttcgttttcattttttattggggcaatattagattggtgtctcttgttttacaacaactcaataaatgagccattggaggaacgcagaattgatgatgctaatattagtactttcaacgaaaaccatacaaatagtaccgaaagcagggacagaagccaatatggctctgggtcgccaacccccacccaccgctcgcagctggtccaaaacaaacatacattgacagaatgggtatccattgggttcaggaatactattaagtttttaattttaatattcttcgctttattcaccctgaatacacttttaacgacattggatacctacagattgactcacaaattaccaataaccgttcagtcgccctcgtacgaggcgttccattacgtagatgccgctaaaacctatcagttgcatataacttgttatggtgacgtatttgatcaagaaaacaatacagatttgtctgaaaataagaagcaaactatcatcttgtttgaacacggaggttatgatactggttacctttctgccacctggattgaggaactataccatttagacaaaattcaaagatattgtctatacgatagaccagggtacgggttgagcgattctcctcccgccccaatctctattgcgatggttgcggaatctttaaggtacgcattgatcaaagatgcaaaaatttaa

SEQ ID NO: 81079 - DNA, 333 bp, Saccharomyces pastorianus
atgccaggtaacattgaagattatgttcacagaatcggtagaactggtagagcaggtgctactggcactgctatatctttcttcaccgaacaaaacaaaggtttaggtgctaaattaatctctatcatgagagaagctaatcaaaatattcctcccgaattattgaaatacgacaggagatcttatggtggcggtcacccaagatacggtggtggtcgtggtggtcgtggtggctatggccgtagaggtggttacggtggtggccgtggtggttacggcggtaacaggcagagagatggtggctggggtaacagaggtcgttcaaactattga

SEQ ID NO: 81080 - DNA, 1305 bp, Saccharomyces pastorianus
atgacttacggtggtagagatcagcaatataacaagactaactacaattctagaggtggcgacttccgcggtggaagaaactctgatagaaactctcacaatgacagaccacaaggcggtaactaccgtggtggtttcggtggtcgttccaattacaaccaaccccaggaattgatcaaaccaaactgggatgaagaattacccaaattgccaactttcgaaaagaatttctatgttgaacacgaaagtgttcgcgacagatcggacagtgagattgctcagttcagaaaggaaaatgaaatgactatttccggacacgatattccaaagccaatcaccactttcgatgaagctggtttcccagactacgtcttgaatgaagtgaaagctgaaggatttgacaaaccaactggcattcaatgtcagggttggccaatggctttatctggtagggacatggtcggtattgctgccactggttccggtaagactttgtcttattgtttaccaggtattgttcatatcaacgctcaaccattattggctccaggcgatggaccaattgttttggttttggctccaactagagaattggctgttcaaattcaaacagaatgttccaagtttggtcatagttctagaatcagaaatacctgtgtctacggtggtgttccaaaaagtcaacaaatcagagatttatctcgtggctctgaaattgttattgctactccaggtcgactaattgatatgctagagattggtaagactaatttgaagagagtcacttacctggttcttgatgaagctgatagaatgttagatatgggttttgaacctcaaatcagaaagattgttgatcaaatcagacctgatagacaaaccttgatgtggtctgccacttggccaaaggaggtgaagcaactagccgctgattacttgaatgatccaattcaagttcaagttggttctctagaactatctgcctcccataatattactcagatcgtcgaagttgtttctgatttcgaaaagagagatcgtttaaacaagtacttagaaacagcctctcaagacaacgaatacaagacattaatctttgcttctacgaaaagaatgtgcgatgatatcaccaagtatctaagagaagatggatggcccgccttggctattcatggtgacaaagaccaaagagaacgtgactgggttctacaagagtttagaaacggtagatccccaattatggttgctactgatgtggctgccagaggtatcggtatgttaaaattttctccatttttttattga

SEQ ID NO: 81081 - DNA, 783 bp, Saccharomyces pastorianus
atggaaaaacaaaaggaaagtatacccttagatgcaaccgttcaatcagcgggcataaaactaattgacctagatgatacttcctcgtgcgtttcgcctctactttctggtcccagtccccaaccgtctgttgttggccctggaggactcagtaacgtatcacccgataaaaataagctcaatgtgcttcctccgcctcctcctacctcgaggcacaataaggaaccatcttctaaacttctttcccctaccaaagagatttccattgtcagcgtatcgccgcgtaaaggtgagagcaatcttcctgccttagagagacacagtacacccaaaccactgccgccagtgcccgctttatctttatctaagccagtctctttacagaaaagttcttcagaattacagcatgctaaagagaccatagataatgggaaaattgttcctcgaccttgtcctcctattagaaggaagagcagtactgccccggacgaaatctctacatctaccaaaaattcaggtgtgtccactacagaagatcctgagccagcaaaggcctccacaaaacctgagaagccaccagttgtcaaaaaaccgcattatttaagtgttgctgctaacaagcttaacacctctcaagaacactcaataaaagtttccccgtcgaattcaaaatctgaagaggaactcccttgcaagaaaaagtctaaaccaaaagttcctgcgaagaaccctgaactagagaagctaagcgttcatccattgaagccttgcgaccccaattaa

SEQ ID NO: 81082 - DNA, 183 bp, Saccharomyces pastorianus
atgaaggagtggtatatcagggactttaaagaaccgaccctccaattccgtccgacctataaacatgattatggcacagataattatgatacttctgaaaaggcgagaactccgtcttggactgatagaatcatatataaaggtgaaacctgcatccattgcatatttcggatgcacctttaa

SEQ ID NO: 81083 - DNA, 2232 bp, Saccharomyces pastorianus
atgaaaatactcctatcgaaacagcaaactagaaagatagcaatagtttcagaaacacatggactggtatttaggccgataaacagtaagaactctcgccgatctacatgtgctgtggaattggttccgaaagctgaattaaatggtaatggtttcagaagactatctaaccatgaagtatacggttttattggtctcatagaaattgaaggccttatgttcatagcaaccataacaggtaaatctaaggtggcccagccgatcccaaacaaaacggttaacaaaatatatgctgtggattttttttgcttaaataattctaaatgggatttcatggacatcgattcatccggttatccgattgttactaatgatggagattttgcaataagctcgcctcctagtatttccacacattcttctagatcatcgttacgttcttcttcctctaggagtttgaatgctcaagaacaagctcccaagcatccatgtcatgaactaagaaagctattatcaaatggatctttttactacagcaccgattttgatttaacttgtacattgcagaaacggggattcacggaacactctttgagttttgatgattttgaccgggagtttatgtggaactcgtttcttatggacgaaatcatcacatacagagacagactagatgtaacggccaaagaactattggatcaacaaggattcctcacgaccgtaatccgagggtttgctgaaacaatttttagctatattaataggttgaaagtaggacttaccattatttccaggcaaagttggagaagagcaggcacaaggtttaatgcacgtggtatagatgatgatggccatgtcgcaaattttgttgaaacagaaatgattatgtactcttctcagtattgttatgctttcacgcagataagaggaagccttccaattttttgggagcaggatacatctttgattagtccaaagattcaaattaccaggtctgttgaagcaacacagcccacgtttgatgaacattttataagactatttaagaagtatgggccagttcatataatcaacctgctgtctactaaatcttcagaaattcaattatcgaggcgatacaaggaacagttgaaaaattctgagaaaatgaaaatcggtagagatgtgttcctaacaagctttgacttccatagagaaacttcgcaagatgggtttgcagctgcaagtaggattatccctaaaataagaaacacaattttggacgccggttacttttcatacgatgtaaaagaagggcgattaatatccgaacaagacggtgtctttagaaccaattgcttggattgtttagatagaacaaatttgatccaacagacgatttcactggccgttttcaaactatttttggaagacttccgattggtaaaacccagtagtttcatcgacgataatgaatttgtgcaaaaggtgaatgctttatgggccgacaacggagatcagatatcacaaatttacactgggacaaatgctctgaaatcgtcctattcaaggaaaggtaaaatgtctttttctggcgccctttctgatgcgacgaagtccgttagtagaatgtacatcaacaattttgtagataaaggaaaacagcaaaatattgacacacttttgggcaaactaccgcaccagcaagttgttgaactttatgatccaatctgcgaatacgtcaatgaaaggctgttagagtcagaggaaaaattcaccactcattctaacataaatttgtttgtcggtacattcaatgttaacggaaactctcgaagagcagatttgtcagaatggttatttccaatcggcgataaattcaaacctgatgtcgttgtgttagggttgcaggaagttatagagttgaccgcagggtctatcttgaatgcagattatacgaaaagttctttttgggaaactatggttacagactgtttgaatcaatacgaagaaaaatatcttttacttagagtggaacagatgtcctctcttttgatactattttttgcaagatcagatagagcctataacataaaagaggtaggggggtctactaaaaagactgggtttggtggtattactggaaataaaggtgccgtagccattagatacgataatggggcaacttcatactgttacgttaatacgcatttatcagcaggtgcgagtaacattgacgaacgtcgcaatgac

SEQ ID NO: 81084 - DNA, 3348 bp, Saccharomyces pastorianus
atgttttggttggattactgtgaagtgaacaacactttgattttatttggtaaggttaaactaaaggatgataattgtgtgtcagccatggttcaaatcaacggtctctgtagagagctatttttccttccaagagagggtaaaacacctaccgatatacacgaggaaataattccgttactgatggataaatatggactggataatatccgcgctaaacctcaaaaaatgaaatattcgtttgagcttcctgacattccatctgaaagtgattatttgaaagtcttacttccataccaaacaccgaagtccagtcgagacaccattccatcggatttatctagcggtaccttttatcatgtttttggtgggaattccaatatttttgaaagttttgttattcaaaataggattatgggaccatgctggttagatataaagggagcagatttcaattcaattcgtaatgcttctcactgtgcggttgaagtttcggtagataagcctcagaatatcacgcctactacaacaaagacaatgcctaatctgagatgtctatctttatcgattcagacgttaatgaatcccaaggaaaataagcaagagattgtttcgataacgttatcagcatatagaaatatctcgttggattcaccgatacctgaaaatataaaaccagacgacttgtgtactttagtaaggccgcctcagtcaactagtttcccattaggtttggctgcactggcaaaacagaaactacccggtagagtcaggttgttcaacaacgaaaaggccatgctatcttgtttttgtgctatgttaaaagtggaagacccagatgttatcataggccatcgtttgcaaaatgtctacttagatgttttagctcatagaatgcatgatctcaacattccaacgttcagctctattggccgtcgtttaagaaggacttggcctgaaaaattcggtagaggaaattcgaatatgaaccatttttttattagtgacatttgctctggtaggctgatatgtgatatcgccaatgaaatgggtcaatcattaacacccaaatgtcaaagttgggatctttcagagatgtatcaagttacatgtgaaaaggagcataagccgttagatattgattatcaaaatccacaataccaaaatgatgtaaatagtatgacaatggccctacaagagaatattactaattgtatgatttctgctgaggtgtcttatagaattcaattattatccttgactaaacagttgacaaatttggctggtaatgcatgggcccaaacgctaggcggtacaagagctggtagaaatgagtatatcttactacatgaattttcaagaaatggttttattgttcctgacaaagaaggcaatagaagtagagctcagaaacaaagacaaaatgaagaaaatgctgatgcaccagttaattctaaaaaggcaaaatatcagggtggtttagtttttgaacctgagaaaggtcttcataagaattacgttttagtcatggactttaattctttgtatccatctattatccaggaatttaatatatgttttaccaccgttgatagaaataaggaagatatcgatgagttaccaagcgtacctccttcagaggtggatcagggtgttttaccaaggttattagctaatctggtggatcgtcgacgtgaagttaagaaggtgatgaaaactgaaactgatccccataagcgagttcaatgtgatattcgtcaacaagctctaaaattgactgccaattctatgtatggttgtttgggttatgttaacagtagattttacgcaaagccgctcgccatgttagtcactaataagggtcgtgagattttaatgaatacaagacaactagctgaaagtatgaatcttcttgtagtttatggtgatacagattcggtcatgatagataccggttgtgataattatgcggatgcaattaaaattggcttgggatttaaaaagctagtaaatgagcgctatagattattggagattgatattgataatgtttttaagaagttactattacatgccaagaaaaagtacgctgctttgactgtaaatttggataaaaatggtaatgaaactactgttctagaagttaaagggttggacatgaagcgtcgtgaattctgtccactttcgagggacgtttctatacatgttttaaacaccatcctgtcagataaggacccagaagaagcattgcaagaagtgtatgattacttagaagacatcagaataaaagtggaaaccaataacattagaattgataaatataagatcaatatgaagctttcaaaagatcccaaggcctacccaggtggtaaaaacatgcctgcagtccaagtagctctaagaatgcgtaaggctggtagagttgttaaagctggctctgtcatcacttttgtgatcacaaagcaggatgaaatagacaatgcagcggatacgccggctctttctgtggctgaacgtgcccatgcattgaatgaggtaatgattaaaagtaacaatttgatacctgatccacaatattatctcgagaaacaaatattcgcgccggtagaaaggttgttagaaagaattgatagcttcaacgtggtgcgtttgagtgaagcgcttggtttagatagtaaaaagtattttagaagagagggcggtaataacaatggagaagatattaataatttgcaacccttagaaacaacaattacagacgttgaaaggtttaaggatactgtaacattagaattaagttgcccatcatgcgataaaaggtttccatttggtggtattgtatcttcaaattactatcgcgtgtcatataatggtttacagtgcaagcattgtgagcaactttttactcctcttcaattaactagccaaatagagcattctataagggcacacatttccttatattacgcagggtggttacagtgtgatgacagcacatgcggtatagttacaagacaagtctccgtttttggtaagcgttgtttgaatgacggctgcacgggtgtcatgagatacaaatacagtgacaagcaattgtacaatcaacttttatatttcgattctttattcgattgtgaaaaaaataaaaagcaagaattgaagccaatatatctacccgatgatctcgactaccccaaggaacagctgacagaatcatctattaaggctttaacagaacaaaacagagaactaatggaaaccggccggagcgttgttcaaaaatatttgaacgattgtggacgtcgctacgttgatatgactagcatatttgatttcatgctaaattag

SEQ ID NO: 81085 - DNA, 183 bp, Saccharomyces pastorianus
atgagaagtgtgacaacaactagacgcgtgaatatagactcaagaagtaacccttcaacttcaccgtttgtcacagcacccggaacgcccatcggtcttacaggactaactccaagtaagtcttcgcagagcaacaccgatgttgctacactgcggttaatgtcaaaaaggaagatgtggtag

SEQ ID NO: 81086 - DNA, 189 bp, Saccharomyces pastorianus
atggttttcccaactgaaattgtcggtaaaagagttagatatttggttggtggtaacaagatccaaaaggttttgttagactccaaggatgttcaacaaatcgactacaagttggaatctttccaagctgtctacaacaagttgactggcaaacaaattgtttttgaaattccaagccagaccaactaa

SEQ ID NO: 81087 - DNA, 153 bp, Saccharomyces pastorianus
atgtcctctgtccaatccaagatcttatcccaagctccaagtgagttggaattacaagtcgccaagaccttcatcgatctagaaagctcctctccagaactaaaggctgacttgagaccattgcaaatcaaatctatcagagaagtatgttaa

SEQ ID NO: 81088 - DNA, 162 bp, Saccharomyces pastorianus
atgactaccatatatatttaccgcagttttacgccgccagaaacaactgcgccaatccaaatggagtgtgtttcatttttcttaatgctgcaatacccgctaatggttgttagcttgccatttttagtgtcttactttctgaaagtacagatgaacctttag

SEQ ID NO: 81089 - DNA, 2796 bp, Saccharomyces pastorianus
atgaatagtaacgggcaaggatttcttaatgcaatcgaagactttgtgcgagatggccagatacaagcatcgaaaaaagacgacagcatcactgaagatgaagcatctagtacagatttgactgatccaaaggactttaccacaatgctgcatagtggaaaaccacttacagaagatgagtatgccgacctccagcgcaacattgctgaaaggatgactaatgcgtacgataccgcaagtaagaaattcaaagatgtgtcacaattagagaaggagctatttacacgattcatgtcggggagagacaaaaaatctttcagagagttgataattcaatcctttaaaaataaatttgatggggaattaggtccatccgttctagcagccactttaagctcgtgcttttcatctcaatcgaaggatacttcgttggatactgattctatatatgaagatgaagatgaggaagactatgatgactattcagaatatgctgaagatagcgaagaggtttctgagtatgaaggaatagaggcagtcgaaaaaccagagcatgatgaaaaaagcaacgggatacgtgaaacattacatttaagttatgatcacgatcataaacgacagaaccaccctcaccatcactaccatagtaccagtacccacagcgaagatgaactgagtgaagaagagtatatttccgatatagaattaccgcatgatcctcataagcactttcaccgcgatgatgatatattagatggggatgaagatgagccagaggaagaggatgaaaatgaaggcgatgacgaagaagatacttatgacagcggtcttgatgaaactgaccgtttagaagaaggtcggaaattgattcagatagccattacaaagttgcttcaaagtcgaataatggcttcttatcatgagaaacaggcagataataacagactaaaacttctacaagaactagaagaagaaaaaagaaagaaaagagagaaggaagaaaaaaagcagaaaaaaagagaaaaagagaaagaaaagaagagactgcaacagttagctaaagaggaagaaaaacgaaaaagggaagaagagaaagaaaggctaaagaaggaattagaagagcgtgaaatgagaagacgagaggctcaaaggaaaaaggttgaagaagccaaacggaagaaagacgaggagagaaagcgtagattggaagagcagcagcggagagaagaaatgcaagaaaaacaacggaaacagaaagaggaactaaaacgcaagagggaagaagaaaggaaacgtattagagaacagaaaaggctagaacaagaaaagctacagaaagaaaaagaagaagaagagagacaaagattaattgcagaggatgcgctaagaaaacagaaattaaacgaagaacaaacatctgcgaacatactttccgccaaaccttttactgagaatggagttggcaaccctgtttcatctcaatcacatcccaacatgactaactaccaagaggataatagttgcagtatcaacgatgaaatacttaaaatggttaatagcgtggctgcatccaaaccagtttcacccacaggctttaacgttcatgatctacttcttccttcaactaacaaccagatgcctgctatggaacaatcacacttgtcacagccaggtaatcaaaacaaccattttggaactacaactattccgaatgcgttagacttggctacaaaatcttctttacagactgaaaacaactatttaatgaactcacaaactctggaaaatacaagtctattgatgcataataattcatcgccaactaagctattgccaaatgactttggtttatcatcttggggtggtctgacaaatacaatgtccataaatcctacatgtaaaccaccggttattcaaacttcagaaatgaaatcacaagcccataaatctagtcctcaagctacaatgccatcttttggactacctaatggtggtactcaccgtaaatcgtttaccgacgagttgaacactttaactagcatgctttcttcttccgggttcgcagatacatcactttcatcatcaggattccccccatcacagcgttctgtgtggaatgatcaaaaaagctcattttcgggaccgtcgactgcaggaaactttaacaacagcagtatacaaagcggtatgctgctcgcacctacattaggaagcgttgaatcgtttccaaatcgaacttctatctgggacagcagcaccactccgatgatgaataaatccgagctttccggtcgcaatataactagtactgcgcaagatagccctgcgttcatggcatcaaatatctggtctagtaacagtcaatacaattcaccatatttgactagcaacgtccttcaatcccctcaaatttcgagtggagtggatgaaagccacattctggatagcatctacaatacttatttagctatttccccacaagatagtttaaacccctacattgctatcgggacactattccaaaatttagtaggacttaacttggattactcgacgtttatcaacaaattgataagcatgcaaggagcctacaattgcgaattctttactgataacaatggatccattacccacgttcgatttgcgagacaaactcccgctggccactcaaaggggttgctgaatcaactctttagtggattgaacgatccaactgctacaccatttacgtcaaggcctcatacctccacaagggctagttttccaattgcctcttcaactacgcaaacgtcttaa

SEQ ID NO: 81090 - DNA, 849 bp, Saccharomyces pastorianus
atgcccccaaactccaagagtaagagaagaaagaacaaatccaagcaacacaacaagaaaaatggcaactctgatcctgaacaaagtataaatcctacacagctagtacctcgaatggagctagagttgtatcatacagaatcggattacccaacttcaagagtaataaaaagagcgcccaatggcgatgtcatcgtggaaccaataaatacagacgatgataagaaagaacgtacggcgaatttgactcataataaggatagtatggattctgcttcttccttagcttttactctagattctcactgggaatcattatcgccagaagaaaagaaaactattctacgaatcgaaaaggaggaagtatttaatgtcataagaaattaccaggacgatcatagttgtagttgctctgtttgtggacgccgccatttagcaatggatcaagaaatggagcgtatatacaatacactttatgccatggataaggataaagaccctgaaaccaatcctatcaaattccacttaggcataataaaggagctacagatttccaaaaatcaacagcaaaatgatttatcttctacaaagggcgaagttgtaaaaaatttcctttcgtcaagtacagttggctctttgaaagaggaagtgctgcatttcaaacaaaagcaactttcaaaacaagaacaagcgcataatgaaacggcggataatacctcattacttgaagaaaatttgaacaatatacacatcaacaaaagttctagtgaaatttccgcaaatttcaattctgtgagcgatgaagagttgcaacaaaaatattccaacttcacaaaaacgttaatttca

SEQ ID NO: 81091 - DNA, 441 bp, Saccharomyces pastorianus
atgcaacagttagcccctggttccttcttcataagcaaactggttcttgtagctacttcaaagacatcatccacaccctcaccagtcagtgcactacattccatgtatttcttggccccaatggcccttgcaacttgtttcgcatcttcaatgggaaccatttcatcggtagcattctctttaaaatgggcttcttgcctcaaatcttttttcaagcctacaagaacgattggtgcgtcaggacaatatcgtaatgcctcatccgcccatttcgtccttgcgttaattagtgattcaaaattgtctacagcaaacccaattaatattatatctgcttttgaatatgagaatggacgtaaacgttcatattcctcttgtcccgctgtatcccagagcgttaaggacacttttattccgtcaactctgcaatcagtgacataa

SEQ ID NO: 81092 - DNA, 1194 bp, Saccharomyces pastorianus
atgattattgaaaaggagttaacagtcaccaataagcctaggaacgctattatccaagaacttgagaatttagggttccccagatttaataaggaaggtaaaccatattatggaagtcctaaggatgagatagctgaacaaattaacgacgtaaaaggcgcaacttctgatgaagaagatgaagaaagttcacacgaagatactgaaaatgttataaatggtcctgaagaactatatggcacatatgaatatttattaggaatgagaatatggtcattgaccaaggaaagatatgaaaagctgttgaaacaaaaacaagaaaaggagacagagttggaaaacttgttaaaactttccgcgaaagatatatggaacactgacttgaaggcttttgaggtgggatatcaagaatttttgcaacgagatgcagaagctcgcggtggtaatgttcccaataaagggagcaaaacaaaaggtaaaggaaaaagaaagcttgttgacgacgaagactacgacccatcaaaaaaaaacaagaaaagtactgctagaaagggcaaaaaaattaagttagaggataagaattttgaaaggattttgttagaacaaaaactagtaaccaaaagcaaggcgcctacaaagattaaaaaagagaaaacgccttctgtttcagaaacaaaaacagaagaagaagagaatgctccttcttccacgagttcttcttctattttcgacataaagaaagaagataaagatgagggcgaactgagtaagatttcgaacaagtttaaaaaaattagcacgatttttgacaaaatgggttcaacttccgctacatcgaaggaaaatacaccagaacaggacgatgtagccactaaaaaaaatcaaacaaccgctaaaaaaacagctgtgaaacctaaattggccaagaagccagtcaggaaacaacaaaaagttgtggaactatctggtgaaagcgacctagaaattttagattcatacactgatcgggaagatagcaataaagatgaagatgatgctataccacaacgatcaaggagacaaagatcgtcgagagctgcgtcggttcctaagaaatcttacgttgaaactttagaattatctgacgacagttttatcgaagatgatgaagaggaaaaccaaggatcagatgtttcgttcaatgaagaggattga

SEQ ID NO: 81093 - DNA, 2667 bp, Saccharomyces pastorianus
atgtcaactgaaccggtaagcgcctctgataaatatcagaaaatttctcaactggaacatatcttaaaaagaccagacacttatatcggttctgttgaaactcaagagcagctgcaatggatatacgatgaagagaccgattgcatgattgaaaaaaatgtcacaattgtaccagggttgttcaaaatctttgatgaaatcttagtcaatgcggcagataataaagttcgtgatccatcgatgaaacgaatcgatgtaaacatacatgctgaggaacatactatagaagtgaaaaatgatggaaaaggtattcccatagagattcataacaaggagaatatttatattcctgaaatgatatttggtcatttgttgacatcatccaattatgatgatgatgagaagaaagtcactggtggtagaaacggttatggtgctaagctttgtaatatattttccactgaattcatattggaaactgcagatctaaatgttggccagaaatatgttcaaaaatgggaaaataacatgagcatttgccaccccccaaaaataacatcttacaagaagggtccatcatatacaaaggtgacatttaagccggatttaaccagattcggaatgaaagagctagataatgatatcttaggagtgatgcgaagaagagtttatgatatcaatggttctgttcgtgacattaatgtctatctgaatggcaagtccttaaagataagaaatttcaaaaattatgttgaactctacttgaaatcactcgaaaaaaaaagacaactagataacggtgaggacggtaccgctaagtctgatatcccgactattctttatgagagaataaacaacagatgggaagttgcttttgcggtttctgatatctcttttcaacaaatttcttttgtgaattccattgcaactaccatgggtggtacccatgtcaattacataacagaccaaattgtaaaaaaaatttcagaaattttgaagaaaaagaagaaaaaaagtgtgaagtcttttcagattaaaaataatatgttcattttcattaattgtttgattgagaatcctgcatttacctcacaaacaaaagagcaactgacaacaagagtcaaagattttgggtcccgttgtgagattcctcttgaatatattaataagattatgaaaactgatttggctacaagaatgtttgaaattgccgacgcaaatgaagaaaatgcgctaaagaagtctgatggtacaaggaaaagcagaattactaattaccctaaactggaagatgccaacaaagccggtacaaaagaaggctataaatgtactttagttctgacagaaggggattccgccttgtcattagctgttgcaggtttagctgttgttggtagagattattatggttgttatccacttcgtggtaaaatgctgaatgttagagaggctagtgctgatcagatactaaaaaacgcggaaattcaagccattaaaaaaattatggggttacaacatcgcaagaaatatgaagatacaaaatctttaagatatgggcatcttatgatcatgaccgatcaagatcatgatggttcgcatattaaaggtttaattataaactttttagaaagctcatttcctggtcttttggatatccaaggtttcttacttgaattcataactccgatcatcaaagtttccatcactaaaccaacaaaaaacactattgcattctacaatatgccggactatgaaaaatggagagaggaagaatcgcacaaatttacttggaagcagaagtattataaaggattagggacttctctagcacaagaagtccgagaatatttttcgaacttggacagacatttgaaaatattccattctttgcagggtaatgataaagattacattgatttagctttctccaagaaaaaggcagatgaccgtaaagaatggctgagacaatacgaacctggtactgttttagaccctactttaaaagagattccaattagcgacttcattaataaggaattaattcttttttctttggccgataatatacggtcgattcccaatgttttagatggatttaaacctggccaaagaaaagttctttatggttgtttcaaaaaaaatttaaagtcggaactgaaagtagctcaacttgcaccatacgtgagcgaatgtacggcatatcaccatggtgagcagtcattggcacaaactattattgggctagcccaaaactttgttgggtccaacaatatttacttgctattacctaacggtgctttcggtaccagagccactggtggtaaagatgcagcggcagcgagatatatctacacagaattgaacaaattaactcgtaagatatttcaccctgctgatgatccattatacaaatatatacaagaagatgagaaaacagtggagccagagtggtatttaccaattcttcctatgattcttgttaacggtgctgagggtattggcactggctggagtacttacattcctccattcaacccattggaaattataaagaatataagacatttaatgaacgacgaggagcttgagcaaatgcatccgtggtttaggggatggacaggtactattgaagaaattgagcctctgcgttacagaatgtacggtagg

SEQ ID NO: 81094 - DNA, 186 bp, Saccharomyces pastorianus
atggtatattgccaaacaggcaaagaccctgaacctaccacaagatcaggtcactctaagcaacctggttgtacttccaatgggtgcattcagtggaactgtaggagcttctgttgtttatccaatcaatcttttaagaacaagactacaagcccaaggaacatatgcacatccttatgtgtataa

SEQ ID NO: 81095 - DNA, 1638 bp, Saccharomyces pastorianus
atgctgctgaaaaattgcgagacggacaagcagcgagatatacggtatgcgtgtttgttcaaggaacttgatgttaagggaaatggtcaagttactctagataatctgataagtgcttttgagaagaacgaccatccgcttaagggaaatgatgaggcaatcaaaatgctgtttactgcaatggatgttaacaaggactctgtagttgatttaagcgatttcaagaagtatgcttccaatgccgaatctcaaatttggaacggcttccagaggatagatttagatcatgacggtaagattggcattaacgaaataaataggtatttgtcagacctcgacaaccagagcatatgtaataatgaacttaatcatgaactttcaaatgaaaagatgaacaaattctcgaggttttttgaatgggcgtttccaaagagaaaagccaacattgcgctacgaggccaggctagccacaaaaagaatactgataatgatcggtcaaagaaaaccaccgactcagatttatacgttacatatgatcaatggagagactttttgctgctggtaccgagaaagcagggttcgagacttcatactgcttattcctatttttacctattcaacgaagatgtcgatctgtcctcagagggagatgttactctcataaatgatttcattcgtgggttcgggttttttattgctggtggtatttcaggtgttgtttcaaggacttgtaccgcgccatttgatagactgaaagtgtttctcatcgcaagaacggatctatcctcgatcttgttaaattcaaaaacagatctccttgctaaaaaccccaatgctgacataaacaagatatcatctccattagcaaaggctgtcaaaagcttatataggcaaggcgggataaaggctttttatgttgggaacggtttaaacgtcatcaaagtttttccagaaagttcgataaagtttggttctttcgaggtcaccaagaaaataatgaccaaattagaaggctgccgcgacacaaaagatctttcaaagttctctacttacattgctggtggtttagctggtatggcagctcagttttccgtttatcctatagatactttgaaattcagggtgcagtgcgctcctttggacacaaagttgaaggggaataatttgctttttcagactgcaaaagatatgtttcgagagggtgggctcagattattttacagaggtgtcacagtcggtatagtgggcatatttccctatgctgcattagatttggggactttttctgccttaaaaaaatggtatattgccaaacaggcaaagaccctgaacctaccacaagatcaggtcactctaagcaacctggttgtacttccaatgggtgcattcagtggaactgtaggagcttctgttgtttatccaatcaatcttttaagaacaagactacaagcccaaggaacatatgcacatccttatgtgtataacggctttaaagatgttttgttaaagacgctagaaagggaaggttatcaaggtctatttaaaggtctagtaccaactttagcaaaagtatgtccagcagtttccatcagctatttatgttacgaaaatctgaaaaaattcatgaatctggagtag

SEQ ID NO: 81096 - DNA, 1536 bp, Saccharomyces pastorianus
  modified_base (951)..(998): a, c, g, t, unknown, or other
atgtgctcacaatcagaacaacaagctcagaaaagacttaaaacggaagtcgttgatgatagaagcacaacacacgaatccgataatgaaaattatcatagctccagaagcgaaagtaatcaatccaatcatgcacattttaatagtacttgtgaaggaactactggcgtaatagacaaaagtaatggtacagaactaacttctgtgatggacggtaattatactaatgtcactgatgtcattggttcggagtgtgaagtttcggttgattcatcagttgtattggatgagggcaactcaagtacaccgactaagaagctgccaagtatcaaaacagattctcaaaacctaagtgatctgaacctgaataatttttccaatcctgaatttcaaaatataactagtccagataaagcacgtagattggaaaaagttgttgaagaaccagtttattttgatattgatggtgaaaagttccaagaaaaagcggttctatcacaagcagatggtttagtttttgtagataatgaatgtcatgagcatacaaatgactgctgtcatcaagaaagaagaggaagtactgacacagaacaagatgatgaagctgactctatatacgcagagattgagccagttgaaatcaatgtgagaactcctctaaagaactcacgtaaatcgatttccaaagataattacaggtcattgagtgatggattgacgcatcgcaaattcgaggatgagatattggagtacaatttaagcacaaaaaattttaaagaaataagtaaaaatggcaaacaaatgagtagcatcataagtaaaagaaaatcagaagctcaagaaaacattatcaaaaacaaggacgaactagaggatttcgaacaaggagaaaagtatctgacgttaacagtttcaaaaaatgattttaaaaaaatggaggttgttggacannnnnnnnnnnnnnnnnnnnnnnnnnnnnnnnnnnnnnnnnnnnnnnntgatctgtttattgtcgatcagcatgcaagtgatgaaaagtataatttcgaaacactgcaggccgtgacagtttttaaatcgcagaaattgataatacctcagccggtagaattaagtgtcattgatgaacttgtggtgctggacaatttaccagtttttgaaaagaatggattcaaattgaaaattgacgaagaagaagagtttggctccagagttaggctgttaagcttacctacgtccaaacaaaccctttttgatttgggtgattttaatgaactaatacatttgatcaaagaagacggtgggttacgaagagacaacatcagatgttccaagattcgttctatgtttgctatgagagcatgtagaagtagtataatgataggtgaaccgctgaataagaagactatgaccagagtcgttcataatctcagtgaacttgataagccttggaattgtccccatggacgtccaacaatgagacatttaatggaattacgtgattggagctcattttcgaaggattacgaaatatga

SEQ ID NO: 81097 - DNA, 282 bp, Saccharomyces pastorianus
atggacatgctagatccttcctttccgttaagttcgtctttgcgttcaagtgcaaacttggcaagtaatcccgaattagcaacccagacgcctttatcgacatcttcgtcatatacagcaataggcaagcccatgcctttatcaacagatccttcttacgtgtcttcttctaatacgttatcctccgatcatgagttaagagttgaaaaagtcagtgaagtgcttaagaaaaaagtttcaaatggtggattttcaactgaatttaatagttgtgatacataa

SEQ ID NO: 81098 - DNA, 897 bp, Saccharomyces pastorianus
atgtgcgtgtacaagtcaaattcgaacaacagcaacccttcttttatcttcgaaagaaccgtgcaagaggcaagttcaaacgatttatttcttcaacctccggtttccgcctccaacacatctcatagctcaagatctaatagtttttacaacttgcagaccatttctccgatacctatctctggtagcaaggttagaactccatcgttgaggaagaactccaataatgtttcctctccgctaggtaacgtcataccaacgtctaggtcggcgtcgaactccaccacaagctcgttagcacatcaagagtacatcttgaaccccatttgcaacatgcaaaatcatcaccatcgccgtcgtacgttagaaaactcggtggctccagctttagatgctagttgctcaatagtgaacgatgagaacactgacctgagcgatgtcgatatggtttattcaagaaggccttcctctgctgtgagcctaaacatggccctgttggctagaacgaatagtgccactcttccctcatcagaatcttcgccagcatcgccagatcttaaactttcgagatctcattcgcattctgcggctacacgtcccaccttgaataacatcaataacaccgggatgaccaccacaacttcaaatggcgaaccaaactccagaatactaagattctactcttacgtcgatatgttgaatgatgaaaaacttgcacaggccaataatacgcctacatctagaccacctatgaaatcccaagcgtactcatgccctttcatcctcaagaggtccccaccacaagcctattcttcatcgtcagcaacaacgacattttccaaccccttcatcaaaactacagaattaccagctagttcgccttatgtatctccgcag

SEQ ID NO: 81099 - DNA, 342 bp, Saccharomyces pastorianus
atggtttcccacaagaccgcccgtggtaaggctgccttggaacgtttaaagatcttcgaaggtattccacctccatacgacaaaaagaagagagttgtcgttcctcaagctttgagagttttgagattgaaaccaggtagaaagtacaccactttgggtaagttgtctacttctgttggttggaaatacgaagatgttgttgctaaattagaagacaagagaaaggtcagatccgccgaatattacgccaagaagagagctttcaccaagaaggtctcctctgcttctgctgctgcttctgaatccgatgttgctaagcaattggcttctttcggttactaa

SEQ ID NO: 81100 - DNA, 873 bp, Saccharomyces pastorianus
atgtctgcctcacttgaagaattatataagggtaggacagctaagttagcccttaacaaacagatcctatgtaaagaatgtgaaggtcgtggtggtaagaaaggcgccgtcaagaagtgtaccagctgtaatggtcaaggtattaaatttgtaacaagacaaatgggtccaatgatccaaagattccaaacagagtgtgatgtctgtcacggtactggtgatatcattgatcctaaggatcgttgtaaatcttgtaacggtaagaaagttgaaaacgaaaggaagatcctagaagtccatgtcgaaccaggtatgaaagatggtcaaagaatcgttttcaaaggtgaagctgaccaagccccagatgtcattccaggtgatgttgtcttcatagtttctgagagaccacacaagagtttcaagagagatggtgatgatttagtatatgaggctgaaattgatctattgactgctatcgctggtggtgaatttgcattggaacatgtttctggtgattggttaaaggtcggtattgttccaggtgaagttattgccccaggtatgcgtaaggtcatcgaaggtaaaggtatgccaattccaaaatacggtggctatggtaatttaatcatcaaatttactatcaagttcccagaaaaccatttcacatcagaagaaaacttgaagaagttagaagaaattttgcctccaagaattgtcccagccattccaaagaaagctactgtggacgaatgtgtactcgcagactttgacccagccaaatacaacagaacacgggcctccaggggtggtgcaaactatgattccgatgaagaagaacaaggtggcgaaggtgttcaatgtgcatctcaatga

SEQ ID NO: 81101 - DNA, 405 bp, Saccharomyces pastorianus
atggttaaagaaactaagttttacgatattctaggtgtttcagtcactgccactgatgtcgaaattaagaaagcttatagaaaatgcgccttaaaataccatccagataagaatccaagtgaggaagctgcagaaaagttcaaagaagcttcagcagcctatgaaattttatcagattctgaaaagagagagatatatgaccaatttggtgaagaaggtctaagtggtgctggtggcgctggcggattcccaggtggtggattcggttttggtgacgatatctttcccaattctttggtgctggtggcgcacaaagaccaagaggtccccaaagaggtaaagatatcaagcatgaaatgtctgcctcacttgaagaattatataagggtaggacagctaagttag

SEQ ID NO: 81102 - DNA, 1143 bp, Saccharomyces pastorianus
atggttgaagcagaagatgatagtcacttggatgaaatgaatgaagacaaaacagcccagaaatttgatttgcttgatattgcagacgaagatctaaatgaagatcaaatcaaggagaaaaggaagcaaagatttttgaaggccagtcaagacgccaggcaaaaggctaaagaagaaaaggaaagagtcgccaaggaagaagaagaaaaaaaattaaaagagcaacaatggcgtgaaactgacttaaatggttggataaaggacaaaagattgaaattaaacaaactaataaaaaggagaaaagaaaagttaaaattacgtgacgaaatgaaggacagaaaatctcaagtttcacagaacagaatgaaaaatctagcttcattggctgaggataatgtcaaacaaggggccaaacgtaatagacaccaagcgacaatagataatgatccaaatgacacttttggcgctaatgatgaagactggcttatttatactgatattactcaaaatcctgaggcttttgaagaagcattagagtacgagtacaaagacatcgtggaactggagggactacttttagaacacgatccaaactttactgaagaagatacgctggaagcacagtacgattggagaaattctatcctccacctgtttttaagaggacctagacctcatgatagcgaaaatatacatgaacaacatcaaatgcatttgaatgtagaacgtataagggtaccagaagtgatatttcaaccgacaatgggcggacaagaccaagccggtatttgcgaattatcagaaaccattttactaaagaagtttggttctcaaccaggaaaattgagtcaaacttccatagacatggtgaacaacgttcttattaccggcggtaatgctaaggtgccaggattgaaagaacgtattgtgaaggaattcactggattccttcctaccggtaccaatatcactgtaaatatgtcttcagatccttcattggatgcctggaagggtatggcagctctagcacgaaacgaagaacagtataggaaaacagttatcagtaagaaagaatacgaagagtacggtccagagtacatcaaagagcataagttagggaatacgaagtattttgaagactaa

SEQ ID NO: 81103 - DNA, 534 bp, Saccharomyces pastorianus
atgtctagcagagacgcctctttgactcctcttaaggcagtagtgatagacgaccctccattgagacaaaccccagaaccattcgatgaacagtcagcttacaatccccagtcgcccattgccattgattttggatcaagcaaactgagagcaggattcgttaaccatgctacccctacacatatttttccgaatgcattgaccaagtttagagacagaaagttaaacaaaaatttcacttttgtcggtaatgacaccttgttggatcaagctgtgcgttcgcaatcgagaagcccctttgacggaccatttgtaaccaattggaatctcactgaagaaatattggactacacttttcatcatttgggagtggtaccagataacggaattcctaatccaatattacttaccgaaagactggcaactgttcaatcacaacggacaaattggtaccagattttgtttgaaacttacaatgtaccaggcgttactttcggaatagacagtctgtttagtttttacaattataaccca

SEQ ID NO: 81104 - DNA, 303 bp, Saccharomyces pastorianus
atgcagctgcatgcctgcaggtcaaatggtgaacaacgtcttattaccggcggtaatgctaaggtgccaggattgaaagaacgtattgtgaaggaattcactggattccttcctaccggtaccaatatcactgtaaatatgtcttcagatccttcattggatgcctggaagggtatggcagctctagcacgaaacgaagaacagtataggaaaacagttatcagtaagaaagaatacgaagagtacggtccagagtacatcaaagagcataagttagggaatacgaagtattttgaagactaa

SEQ ID NO: 81105 - DNA, 84 bp, Saccharomyces pastorianus
atgaagtatgaggtgccctttttcaatacgcaaaaatctacggctattcaaaaggattccatggtccatcctggtaagaagtga

SEQ ID NO: 81106 - DNA, 1533 bp, Saccharomyces pastorianus
atgcagaacaataacaatctgatgtcgggacacaatcacctggacgagttgagcagtataaaacaggagccaccgcatcaattgcagcagcagcaactaccaatggatgtacaatcggtagattcgtatacctctgacaacccagacagcaatgttattgccaagtcgcctgataagaggtcaagcttagtatccctatctaaagtttctccacatttactttcatccacatcaagcaacggtaacacaatatcgtgtcccaatgttgccacaaattcgcaggaattggaaccaaacaatgatatttcaacgaagaaatctctttccaattctactttgagacattcctccgctaatagaaattctaattatggtgacaacaaaaggcctcttagaacaacagtgtcaaagatatttgattcaaaccctaatggagctcctttacggagatactctggggtaccggatcacgttaatctagaagattacatcgaacagtcgcgtaattatccaacaatgcaaaatagtgtgaaaaaggatgaattttataacagcaggaacaataagtttccccatggtttaaacttttatggtgataacaatgttattgaagaggaaaataatggtgactcgtctaatgtaaatcgaccgcaacacactaaccttcagcatgagtttattccagaagataacgaaagtgatgaaaacgatattcactccatgttttattataatcataagaacgatttagaaacaaaaccgctaatatccgattatggtgaagatgaagacgtagatgattatgatcgcccaaatgctactttcaacagttactatggctcagcatccaacacgcacgaacttccattacatggaaggatgccttcaagatcaaataatgattactacgattttatggttggcaacaatactggcaataacaaccaattgaatgaatatacccccttaagaatgaaacgtggtcaaagacacctatcaagaacaaacaatagcataatgaatggtagcatccatatgaatggtaacgatgacgttacccattccaatatcaataataacgatattgttggttactcaccgcacaacttttactcaaggaagtccccatttgtgaaagtaaagaattttctttatcttgcatttgttatatcatcactattgatgacaggattcattctgggatttttattggccactaataaagaactacaagatgtagacgtggtagtgatggataatgtgatttcaagttcggacgagttgatcttcgacatcacagtaagtgcttttaatccaggattcttcagtataagcgtttcccaagtcgatttggacatttttgcaaaaagttcttacctgaagtgtgattctaatggtgactgtacagtaatggaacaggaacggaaaattttacaaatgacgacaaatctttcgttagttgaagagagtgctaataatgatattagtggtgggaacataggagactggtatgtatctagggaagccgcgtaa

SEQ ID NO: 81107 - DNA, 471 bp, Saccharomyces pastorianus
atgaaaatttcattgaaggaacctgaagaagaaataatcaaccaagaaaggcccaaagactactactttgcaagctattctgcagaccaaaagctgcaattccaacagagctctatcgactctgatgtgataatacaagaaagtacaaaaattctggaggatgatctacgtattcgtgataaatggccatattgccagggtcgaataatagatctgtataagcacaatgcgagaatagagttagagcagcagaaggaattgaagattaaaaagaggagacctggtcaaaagcaacgtgcagccaaaaaactggcacttgaaagaaccaaggagcgtgatgccaaagctcgtgagataaagaaacagttgaagaaaaagtttcataagcgtggtggaaagaaaaacaaaaaaaaggtacctttgaacccactggcaaaagctggcagtacccctaagtttaggacagaatga

SEQ ID NO: 81108 - DNA, 612 bp, Saccharomyces pastorianus
atggcggggtccactagatccaagcaagatgaaaattatgttaaaagtttacaagactggtcagaaaatgtattaaaaattcctaaacatttgatatcattcgaaaaaaatctgcccttcgataagattgaaatattactaaacaaatctactttcggtgttaatgccatgtggaatgagcactttggaattgcagttgtagagtatatggcttccggtttgatccccatagttcatgcctcggcgggcccattgttagatatagttactccatgggatgccaacgggaatatcggaaaagctccaccacaatgggagttgcaaaagaaatattttgcaaaactcgaagatgacggtgaaactactggttttttctttaaagagccgagtgatcctgattataacacaaccaaagatcctctgagataccccaatttgtccgaccttttcttacaaattacgaaactggactatgactgcctaagggtgatgggcgcaagaaaccagcagtattcattgtataaattctctgatttgaagtttgataaagattgggaaaactttgtactgaatcctatttgtaaattattagaagaggaggaaaggggctga

SEQ ID NO: 81109 - DNA, 699 bp, Saccharomyces pastorianus
atgggcagtgcttggacaaactacaattttgaagaggttaagtctcattttgggttcaaaaaatatgttgtatcatctttagtactagtgtatggactaattaaggttctcacgtggatcttccgtcaatgggtgtattccagcttgaatccgttctccaaaaaatcttcattactgaacagagcagttgcctcctgtggtgagaagaatgtgaaagtttttgggttttttcatccgtattgtaatgctggtggtggtggggaaaaagtgctctggaaagctgtagatatcactttgagaaaagatgctaagaacgttattgtcatttattcaggggattttgtgaatggagagaatgttactccggagaatattctaaataatgtgaaagcgaagttcgattacgacttggattcggatagaatatttttcatttcattgaagctaagatacttggtggattcttcaacatggaagcatttcacgttgattggacaagcaattggatcaatgattctcgcatttgaatccattattcagtgtccacctgatatatggattgatacaatggggtaccctttcagctatcctattatagctaggtttttgaggagaattcctatcgtcacatatacgcattatccgataatgtcagaagacatgttaaataagctgttcaaaatgcccaagaagggtatc

SEQ ID NO: 81110 - DNA, 1290 bp, Saccharomyces pastorianus
atgcagaaattttttctgcccttaggaagtggatccgttcaagatttgcccacgatgctgaccaagtatcatgataatctggcctctttggcatcgaaaagttccaaggagttgaccagtgaaattatacccaggctagaggatttgagaagagatttactagttaagattaaagaaattaaggctttgcaatctgattttaaaaattcctgtaacaaagagcttcagcaaactaaacacttgatgaagctttttaatgaatcattaaaagaatgtaaattaggtacaccaaagagtgacccatttttgataaaattgcaattggaaaagcaaatcaaaagacagttggtggaagaaaattatttgcacgaggcattcgataacttgcagaattcaggggcccagttagaaagtgttattgtaatggaaatacagaacggattgaccagctacgctagaattcttggcaaagaagcccaagttgtatttgactcagttatctctaaattagattccacgatactgaacaaaaacacgaatcttgaatgggatagtttcattctaaggaatatttccaattttgtgcctccaaatttacccatgaggaggtttaaagagatctcgtatagcaatcaaaacgatccttttacttttgaagttaaatctgggtttctggagaaaagatcaaaatttttaaagtcatactcacgtgggttttatgtcctcactccaagctttttacatgaatttaagacaccagataagcataaattttccacaccgttaatgtcaataccattagtggaatgtactgtcactgagcattccaaaaagacgaaatccaactcagagcagggcaagaacaagtttatattgcgtacgaattctaacggactaatacataggggtcacaactgggtattcaaagtagactcttatgacgatatgatagaatggtttggaaatatcaaagccttatcaagtttgcccaactatgacgacaaatgcaaatatgtgagtaaagttgccaaactgtctaaagaaaaagccaagagtaatgaaaacaccacggagagcgtgaccccccaggtaactaatgagcaacatacgagatacgatgatgtgagtagtagcaattttcccttgaattccattccaaaattagacaatttgacaatcactaacaccacgtcatcgataccggaaacgaatgattcacaaattcagaatagggttcctgaattttacatagaaaatgtagattcccctagaaaaagcaatcagctgtga

SEQ ID NO: 81111 - DNA, 438 bp, Saccharomyces pastorianus
atgtcttaccaacggaacagtgcaagagcctctcttgacctcagaagtcaatatcaacaactggaaggcagaatgaggtcaggacattttaatcccgcctatcaacagcagcaacaaaaaggccagaacatgcccttgtcactaccctcgtcgcttgcgcaacgcaatcctataccttaccctatcgacgctgtgacttccgatcccactatcccggctcagttgaacgtatatgatcacgatcggcaaaattcgatggtcgatgctgcggctggcaccaatacgacgcactctttgaactctaataatattccatcatctcaaaataataatattaataataacaatatcaataatgttggttccttcactgaacctttcatgctaacgctggccaaaatgtctttacatatcccccagaaagcgtatgattcttag

SEQ ID NO: 81112 - DNA, 1074 bp, Saccharomyces pastorianus
atggagtctccgaatatgacttttgctacgcccaccttgattgcacatgacagatccaacattgatgtcatcgcccatgaacttgctcactcatggtctggtaacttagtgaccaattgttcgtggaatcatttttggttgaatgaaggttggaccgtttacttagaaagaagaattattggtgccattcatggcgaaccaactagacatttcagtgctctgattggttggagcgatttgcagaattctattgattctatgaaagatcctgaaagattttccactttggtacaaaacttgaacgataacactgaccctgacgatgccttttccactgttccgtacgaaaaggggttcaacttactatttcacttggaaactattttgggtggtaaggctgaatttgatccatttattagacactatttcaagaagtttgccaaaaaatcattggatactttccagtttttggatactttgtatgagttctatcccgaaaagaaagaaattttggattccgttgactgggaaacttggctgtataaaccaggtatgccaccaaggcctcattttattacggctttggctgataatgtttatcaattggctgacaagtgggtcgaaatggctcaacatttgaaaaccacagaggatttccggtctgaatttaacgctattgacattaaggattttaattcaaatcaattggttttgttcttggaaactttgacacaaaatggccattccaacaagaaaccaaaagattttgactgggccaagtttcccgtggcatctagggcactgttagatatctatcaagataacattgttaaatcacagaacgcggaagttgttttcaagatgttcaaatttcagatctttgccaagctgcaagaagaatataagcatttggccgattggttgggaactgtaggtagaatgaagtttgtccgtcccggttacagactattaaactctgtagaccgtcgattggcacttgcaactttcgacaaattcaaggacacgtatcatccaatctgtaaagctcttgtgaaacaagatttaggtctttga

SEQ ID NO: 81113 - DNA, 477 bp, Saccharomyces pastorianus
atggaaaatattaagagcgagttccaatccttgcaatctaaattagcaacccttcgcaccccgcaagaatttttcaatttcaagaaaatttccaaacctcaaaactttggggaagttcaatccagagtggcgtataacctgaagtacttttccagtaactatggtttgattattggttgtttgagcatttacacattattaacaaacttgttgctactctttgttattgttctagtcgtagctggtattgttggtataaacaaactaaagggtgaggagctcgtaactccatttggttctttcaagaccaaccaactatacaccggactggtttgtgttgctgtgccaataggtttcttagcttcgccaatctcaactttgctatggttgatcggtgcttctgccgtcagcgttttcggacatgcatcattgatggaaaaacccatcgaaactgtatttgatgaagaaactgtttga

SEQ ID NO: 81114 - DNA, 363 bp, Saccharomyces pastorianus
atgaacacactgaaagccagtggaaagaaaagggcttattttatggaagaagaatacggaacattggaactgttgctacagatccacaaggaagtatctaattttttgaaagatgatacagaaggttacgaaattatcctatgcggttatgaaagacaaacgaacactggctcactgctaattctttcggaatcgggtgaaaaaattgccaatttggctgctaacttaggttcgatactacaaaacctaaaaggcggtggtggtaagaaaggtggcaagtggcaaggtaaaattacatccatttcgaatgccgagtttgccgccctctctgattatttaagccatgatttcgcatcatgttga

SEQ ID NO: 81115 - DNA, 888 bp, Saccharomyces pastorianus
atgcccacacctatgacgcctgtcaaggtcggcgctttagcctgccagaggaactcatttctcttcgatgggttcaaaacactggttgtttcttgcgaaccaacgaagaataaaaagggagagattgaaggttatgagattgaactacaagatactattctgttccccgaaggtgggggccaaccaagtgattctggttttttgaaaattgttgaagggaatcgtaattcgtcgaaaattgagaagatattagtttcacacgtttctcgtttcggtttacatgcaaagcatcatgtcaatgactacattgagcccggaacaacagtggaagtggccgtggacgagcaaaagagaatggattatatgcaacaacatactggtcaacacttgttaagtgccattctggaacgcaactacaaagtaggcactgtatcttggtcgatgggtggtattatcacaaagaaaaaacctgttctagagcctagcgactatttcaattatatagagttgaacaggaaattgactctcgacgaaataacgaacgtatcagatgagattaatcagttgatcatcaactttcctcaggaaattattgtagaggaaagaatcggtgaagaaacagtagatgaagttagtacatccaaaattccagacgattacgacctctccaaaggtgttctacgtactatccacatcggtgacattgattctaacccatgttgtggtacacatttgaaatgtacctctcaaataggttccactttaattcttcccaatcaatcagccgtaagaggttcaaactcaaggctctatttcatgtgtgggaagcgggtttctctgtatgcaaaatctgttaataaaattttactgaatctaaaaacttattga

SEQ ID NO: 81116 - DNA, 195 bp, Saccharomyces pastorianus
atgccctctgtaagcgaactatacacactttttggagattatacgataaaagtactgggcggcatcactaaactggcttcaactcttaacagagaggactggcagggggaaagaaacgggttcgcggttttatcgagagaccggcctaaccagacgttactaagcgtccatatgtactcttcaagcttgctatag

SEQ ID NO: 81117 - DNA, 105 bp, Saccharomyces pastorianus
tctgttacttacactgaacacgccaagagaaagactgttacttctttggatgtcgtttatgctttgaagagacaaggtagaaccttatatggtttcggtggttaa

SEQ ID NO: 81118 - DNA, 135 bp, Saccharomyces pastorianus
atgggtttctgcgtgaatatttgggtaaatctgcttaatcaacagagaggacacgaacgccacgtcgaagtactcaacggcaatgaaatggaggagcacataagggaagactatctaagacagttcggaaactag

SEQ ID NO: 81119 - DNA, 99 bp, Saccharomyces pastorianus
atgctcttgtgtaggcattttaaaactgaaagtggtagaagatgcatcactcccttgtacgaagaagccagacaggagaaatcgggacaagagagttaa

SEQ ID NO: 81120 - DNA, 1392 bp, Saccharomyces pastorianus
atgtctcacttaaccgcgaataacgatgattttgacgatcttttgagcgtcgcatctatgaactcaaattatttactgcccgtaaattcacatggttataaacatatttcaaaccttgatgagttggatgacttgctatctttaacatattcagacaataaccttttatcagcatcaaacaacagtgatttcaacaacagtaataacggaattattaataccgctgacactcaaaacagtaccattgccattaataaaagtaaagtcggtactaaccaaaagatgttattgactattccaacttcttccacaccttctccttccactcatgctgccccggtaacacccatcatttctatacaggaattcaatgagggacacttcccagttaaaaacgaagatgacggaacgttacaactaaaagttcgggataacgaaagttatagcgctactaacaataacaatctacttcgtccagatgataatgattacaacaacgaagctctcagtgatattgaccgctccttcgaagatatcattaacggtcgaaaattgaaacttaaaaaatcaagaagaagatcttctcaaacttccaataatagtttcactagcaggagatcctcgagatcaagaagcatatctcccgatgaaaaagctaaatctataagtgcaaatagggaaaagttattggagatggcagatcttttaccatccagtgaaaatgacaataatcgggagcgctatgacaatgatagcaaaactagctataacaccattaacagtagcaattttaatgaggataataataataacaatttgttaacaagtaaaccaaaaactgaatcgggcattgtcaatattaaaaatgaactagatgacactagcaaagatcttggcatacttctagacatagatagcttgggccaatttgagcagaaagttggtttcaaaaatgatgataatcacgaaaataacgataatggcacattttctgttaagaaaaatgacaatctagaaaaactagacagtgtaacaaataataggaaaaatcctgcgaatttcgcttgtgatgtatgtggtaagaagtttacaagaccttataacttaaagtcacacttaagaacgcatacaaatgaaaggccatttatttgttctatttgtggtaaggcgtttgcacgtcaacatgatagaaagagacacgaagatttgcatacaggtaagaaaaggtatgtatgcggtggtaagctaaaggacggtaaaccctggggttgtggcaagaagtttgcaagaagtgatgctcttggtaggcattttaaaactgaaagtggtagaagatgcatcactcccttgtacgaagaagccagacaggagaaatcgggacaagagagttaa

SEQ ID NO: 81121 - DNA, 969 bp, Saccharomyces pastorianus
atgtggaaggatcaaaaaagtgttacttgtggcgcaaaaagtgatagagtaagtgtaactgaatcttccgtgctggattgcaatgaagaatgtgaagctttgaaacgactaaaggaattgaaggaggcatttggaattaaggaagaaaccaataattttacaagtaatgaactagatgcgttaaaaaaactggtctctgttgctacaacatttgaagaactgcagttaccgtttacagaggcagcattatcagtatattcaaagcaagaaagatggtgttcacaaattgaagctattcttaataaattaatggacgataaaacacgttcaagcttgcatttcaaacctatgaggcctcctcaacgccacttcatccgtgaactagccaaagcttacggcctatattccgagtctcaggacagagagcccatgagatctgtatttattaagaaagaagataatggcgcaagcaataaaccagtcttatcattagcagaagcttacccactatatgaatcatttaaacaattgcagaaggaaaggaaagcacaagaatttcaagctcgcaccacagctaaactaatcaacttcgaggttcaagatacggaacctaaagtagaggtggctaagaaaaatggttttttggttcaaaatttggttgctggaaatactgccgaagatctaaggagattttttgaaccacatctcaagcatacgttagtagtgaatcctcaatacctaatccttgatgatggcaaaacagcactagtgtatcctgaaaattacgaaacagcatccgtgaataccgaacgtgacatggagcttttggttggacacttcgattttatggccaaagaggcatttttggccgattccatttcgttgtgttcaactgaagaagaacttgaaagaaggttggatacgcccgtaattcaagaggatagtcctgtaatggataataatacatga

SEQ ID NO: 81122 - DNA, 1980 bp, Saccharomyces pastorianus
atgaccgaacatgagtctttaggcctggagcaaaatcaagacggcggtgacacttatagacatcacaacctaagcgatgggtgtatttcgagtgttgaagacaccaacgagcagcctagttcgtatgaagaggaaagtgatgatgatatgcaatattacgaacgtgcgatccaggaaatttctagcggtgactcatatgtttgtatgatttgtacagtagagatggattatacgtgccaaatgtttgcttgcaagagatgttatagagtgtttgattacggatgcataagagaatgggcgttaaaatcaacggaaaaaaccgtagatagaatatggaaatgtccaaactgctattatgttagcaaaagagttccggtaaaaaatcggcccacatgttggtgcggtaaagttgttaatcctgatccgaatccgctggatcctaactcatgtggacaaacctgcaatgcttctacttgtatgcatggttgttccaaaatttgtcatctagggccgcatccagagtgtactagaatggtcgagattatgtgccactgtggtaagcattcgaaaagtatcttttgttaccagtctaaagttatgaaaaaaaacttcaactgtcaagaagtatgtggattgcctttatcttgctccatccacacctgtaaaaagaaatgccaccctggcttatgtgggccatgtccagaaatgataattaggaaagatagtccgaaaaagcaaataaaatgctactgtggtaaccacactcgtgctaacataaagtgtagtgaaacaaagtttcccaagtccggtaagtcgtcgaaggatgaaaatgggaacaggtggataggcgtgtttgcctgtgcagataatagagttgtcgactactcatgtcgcaagcattcattcatagaatcttgcataagcccacccacaattaatggagaaaaggcatgcccatttttgcctagctctttgaaaacttgtccctgtggccggacagccttagaggaactgactaagcctcgtaagcattgtgatgatccgataccaacctgcgactcaagatgcggtaaaccactaaaatgtggcaaacattcgtgccccttcacttgtcatgataaagcctgtatggaaccctgcttgcaaattgatagtgtaaaatgtgcttgtgagcaaagtacattttcagttccatgtggatttcaaggaaggccacgctgcaatattaaatgcgaatccctgatgtcatgccgtagacatagatgcaccgataggtgctgcagtggtaggccatcggcgataagaaggaagaaaaacctgttcagaacgcaagatttgttggatgagtctcttgtggaagcaaaacatatctgcctaaaaccgtgtaatttgaccctatcatgtggaattcataaatgtcagagaaaatgtcacccaggaaagtgtccgccctgtttagagagtgattcgaacgatctggtctgcccatgtggcaaaacagttgttcctgcacccgtgcgttgtggcacgaagctaccaacatgtaatcatccatgtattaaagttgtgcgtggcgaatctacgtgtggtcataaaccaatgccacatacctgtcattccttggatgtgtcgtgcccgccatgtacggaaaccgtatttaaaccttgtaaatgtgggaagaaaactaaagtgagaacggtttgttttcagacagacgtatcatgtggaataaaatgtgggataccactctcttactgttatcatacctgccaaaaaacatgtcatttaccaggaaattgccaaaaggtgtgtaaacagacctgtgggcaaaaaaggctcaattgtaatcatgaatgtcctaaaccgtgccatggtaagacagagtgtcccgatttaccttgtgccacgctagtgaaaatttattgtaaatgtggaaggatcaaaaaagtgttacttgtggcgcaaaaagtgatagagtaa

SEQ ID NO: 81123 - DNA, 318 bp, Saccharomyces pastorianus
atggtaaagcatgcaatgagtttcccagcggctaaaaaaatagtatacagcacatgttccattcatgcggaagaaaatgaacgagtcgtcatagaccttcttttagataagtcagttagagaatggggttggaaagtagcgccaaaaagagaagttattccttcttggcctagaagaggcaaggtagaagagttcgaagaggtttttagagatggagtcacctatgaccctcaacagcttgccgagggttgtatcagggcactaccaaaaagtgacggtggtattggtttctttgctgtctgttttgaaagagattaa

SEQ ID NO: 81124 - DNA, 1926 bp, Saccharomyces pastorianus
atgaggtatcatgcaaagattttcacatcgtacttcgagtacattgatccacatccagaggacccaagaagaatatatcgtatttataaaatactagcagagaatggtctgattaacgaccccactttaagcggcgtggatgaccttggtgatttaatgctgaagatacctgtaagagccgcaacctccgaagaaatcttggaagttcatacaaaggaacatttagagtttattgaaagcacagaaaaaatgagccgagaagagttattaaaagagactgaaaaaggtgattccgtatatttcaataatgattcttacgcgagtgctaggctgccttgtggtggcgccattgaagcatgcaaggcggttgtcgaggggcgtgtaaaaaactctctagctgtcgtaagaccacctggccatcatgcagagcctcaagctgcgggtggtttttgtctcttcagtaatgttgctgttgctgccaagaatatcttaaagaactacccagaaagtgtaagaaggataatgattttagattgggatattcatcatggtaatggcacacaaaagtcattctatcaagacgatcaggtgctatatgtgtcattacacagatttgaaatgggtaaatactatcctgggaccatccaaggacaatatgatcaaactggtgagggtaagggtgaaggattcaattgtaatattacttggccggtcggcggtgttggtgatgcagaatatatgtgggcatttgaacaggtagttatgcctatggggagagaattcaagcctgacttggtgattatttcttcagggtttgatgccgcggatggtgatactatcggacaatgtcatgtcaccccaagttgttatggacacatgacacatatgttaaaatctctagctagaggtaatctttgtgtagttttggaaggtggatataacttggatgcgattgcaagaagcgctttgagtgtagcaaaagtactaataggggagcctcctgatgaactacctgatccattaagtgatcccaagcctgaggtcatagaaatgatagacaaagtaattcggttacagtccaagtattggaactgttttagaaggagacatgctaactccggttgtaattttaacgaacctattaacgactcgataatatctaaaaattttcctctgcagaaggctattcgtcaacaacagcaacactatttaagcgacgaatttaatttcgttactttaccgttagtaagcatggatttaccagataatacagtgctatgtactccaaacatttccgaatctaacactataattatagtcgttcatgatacttctgatatctgggcaaagagaaatgttatttcaggtacaattgacttatcctcatcagttatcattgataattctctagactttatcaaatggggacttgacaggaaatacggcatcattgatgtaaatatacctctaactctgtttgaacctgacaattactcaggaatgattacatcccaagaagttctaatatatttatgggataactacatcaagtattttccttctgttgccaaaattgcttttattggaataggagactcatactcaggtatcgtacatctgcttggtcacagggatactagggctgttactaaaacggtaattaatttcttgggagacaagcagttaaagccactagttcctctagtagatgaaacattgagtgaatggtacttcaaaaactcacttatattttcaaacaatagccaccaatgctggaaagaaaatgaaagcagaaaaccaagaaaaaaattcggtagagttttgagatgtgatacggacgggttaaacaatataattgaagaaagatttgaagaggctacagactttatactggattcgtttgaagaatggagtgatgaagaatga

SEQ ID NO: 81125 - DNA, 105 bp, Saccharomyces pastorianus
atggattctgtaatggttaagaaagaagtactggaaaatccagaccatgatttaaaaagaaagctagaagagaacaaagaagaagagaatagcctctctgggatc

SEQ ID NO: 81126 - DNA, 1509 bp, Saccharomyces pastorianus
atggtaaaagagacagtcctttctaatcacgacaatgtcaccataataaacgaattactgccaacgtcttctgccatgcaccaggaagaaagcaccgctatgacaacctcctacctcttatcccactccgtaaatgatagttgcaacgtaatgctttcttcctcctcccacaaccgtgccatgctcccaccttctcttgtgcaaagaaataacactaccacatctcccacaacagactctgcatcagaacacaacgaatcggtaccctcactaacctcatctgttagcacatcctcatcagtttattcgtcatggaatcctcctcattctccccacatatcgtcatttccagacggcaacttcacatcgcttaacgcagaagtgacttgctttgatttccgccgcaccaaggactccagaacaaaagagacgaatgaatctatcattccaactgaaatttactgcccaataaattccactgatcaccacaaacattatccaggccgagagtatgaacaagaagcctgcgctcctgccccctgcaatcaaaatataagctgcagcgtcgggtccacagcggaattttcccagtctaaccacacgttgactactgtagttccttcatacatgcaaaagtaccttgacaggccacagaactggtttgaaagcaaaatgggaaaatactgtccactcttcctgagaagtacaaagaacattgactacgattcgctcgaatttaaatttgagcgcaagatgatagctgttcaatacctgcttttagacgaacaatctgagcccagaaggtactacaacccttcaaataaaagtattccattctggaagagacccttcaacttcgatacaatgcccagttacgaccaacttatggaggaagcagagcgccgtttttattcataccaatacaaatacgaaggtttccagaggattgaaccctactctattttttgtccctggaaaaacacacagagagaaatagatctggttcttgatcacattcatttttctctcgatgtcggcgagaagaagtctttaaaccgaaaaggaaacatcactctcgataccttagacagtaaggtcgatcctaacattcagatcaagccgtatcagatttttccgtccaacaacctagtatacgaaggcctaccgcatcctgccgaacaatccctaattttgagtcctgacacctctctcattgagagggcgtttcaggcactgatagacatatgcaaggaatccattccatcttctaatgactgtagtacccgcaataataatagcgctcctcagcttaccgtgccagaaccatctaaaccatgccggctgctacttgttcgtgagtctcgcacagcaactgaactaaaaactaataaaaagctctggctccactcacaaagaaggaatatcgaagtgaccgtaccaatgcatccttctgagcgtgggacaaaaagctggttacgaaaatggctctcaacttttgtacatcagtga

SEQ ID NO: 81127 - DNA, 783 bp, Saccharomyces pastorianus
atgtgggacatgcaaactggtagttcaagaggttacggttttgtttcctttacttctcaggatgatgcacaaaatgccatggacagcatgcaaggtcaagatttgaatggtagaccgctaagaatcaactgggctgctaagcgtgataacaataacaataataattatcaacagcgtcgtaactacggtaacaacaaccgtggtgatttccgtcaatataacaatagcaacaataacaacatgaatatggggatgaatatgaacatgaatatgaatatgaacaacagcaggggcatgccaccaagttcaatgggaatgccaattggcgccatgccattaccatctcaaggccaacctcaacaatcccagaccattggtttacctcctcaagtaaatcctcaagctgttgaccacatcattagaagtgccccaccaagagttactactgcctatatcggtaatattccgcactttgccactgaagctgatttaattccgttgttccagaacttcggttttattttagatttcaagcactatccagaaaagggctgttgcttcataaagtatgacactcatgaacaggccgctgtttgtattgttgccttggcaaacttcccatttcaaggcagaaacttgagaaccggttggggtaaggaaagatcaaattttatgccacagcagcagcaacagggcggtcagccacttataatgaatgaccaacaacaaccggttatgtctgagcaacaacagcaacagcaacagcagcagcaacaacaataa

SEQ ID NO: 81128 - DNA, 366 bp, Saccharomyces pastorianus
atgtctgaaaataacgaagaacaacatcaacaacaacaacaacaacagcaacctgttgccgtcgaaactccctcggcagttgaagctccagcatcagcagatccttcttctgaacagagcgtcgctgtcgaaggcaattctgaacaagctgaagacaatcagggtgaaaatgatccttccgtagttcctgctaatgctattaccggtggtagggaaacttccgatagagttttatatgttggtaacctagacaaagctatcaccgaagacattttaaagcaatatttccaagttggcggaccaattgctaacatcaaaatcatgatcgataagaataataagaacgtcaatttacgcttttgttga

SEQ ID NO: 81129 - DNA, 1611 bp, Saccharomyces pastorianus
  modified_base (16)..(16): a, c, g, t, unknown, or other
atgttagtaggtacgngatttattcccaaaatgaacgattatggcctttttgaatattcggattatattgctggattatcaggcggaagttggatcttgatggatttggtagttcaaaattttgaagtaagatccctgctacaagagtgggaccttgaagaggatcttttattaggcataccggaattcgatatttccgaagaagaaattgttaccaatgcaaaaaaggagtataatgataatgatttgaagatgaagaagcgtcaggggggttctctgattacaagctcttcaaatttttatgaacaaatagaggagatcatgaattccatagaagaaatcccagaagactatatgataacgaagagaaacttgaatccattagcaagactaaaaaaaatattctttcctaacaacactttcactggaactgatgcgaagattgaaacctttaaaacagtgctagacttttacaaaagtttgcatttgaaaattaagcctaaaaaaatggagggtttccaaatatcgttcaccgattattggggtaaagcaatcgttcaaagactaaaaaaaaatttcgatgacgatcccaaccattccttttcgttttcgaagcttgtaaactcgtctaaaaaatttaaggaatgcagtgtgccgatcccaatattcgttgcaaattgcaaaaatggacttctttcaaacgttatatttgaatttacgccctttgaatttggatcttgggaaaatatcctcagacttttcgtcaagttgccctatttgggctcaaaaattgtttctggaaaggccgagaagtgtattaataactttgatgatctaggttttattactgcgacgtcttcttcaatattcaacaatgtgctcatcttcatctggaatttggcttctcagtcctccagagaagcaatgaaagctttgaatatggttatgggaatttttggcctaggtaaagaggaaatatttagtatttcgaaagactcctcgagattagagacagactatgccgtatatcaacccaatcccttttatctttatcctgaaaaagacaatgtcctaactaacaaaaatcatttataccttgtagacggcggagaagacggcgagaatattccactcagaacattggtgattcctgaaagggaactagatgtaatttttgttctggattctagttcggatattgacaactatccaaacggctccaagttaaaaaggatattcgaaaaattagatgaagagaacgttcattaccaatttccgaacaatgtaaaaacattcactcaccccattgttataggatgcaatgctaccaaaagaactggacatgattcatttttgccaattataatttatcatgccaatgcgaatcatggaaacgcatctaatacgtcgacattcaaaataacttacaatcagtctgaagttagcagtatgttactcactggaaggggagtgtttagcaatgattatgacctttattataaaaattgcttaggctgtatattaaccaaaagaacaatggacaggctcccaagaaaaaagaaattttcgccattttgcttacaatgctttaaagactactgttactcataa

SEQ ID NO: 81130 - DNA, 426 bp, Saccharomyces pastorianus
atgaaaccaattatcaaggttttattgaccagattagttggacaagagtctattcacaaaattgacattgtttccaatgaagtggaaatcgatgcacatgatcaatggaaaatcatctataaggatgaaagtcccttcggacatgacaaatccagaagtatcgatgcttataaaaagaaatttgaatctaccttgaaagctggtgaacaaagacccgtttacttttactgtggtgacggtgtttctgatctaagtgctgcaaaagaatgtgatttgctatttgccaaaagaggtaaagatttggtcacttattgtaaaaaacaaaacgtcccatttcatgaattcgataccttcaaagacatcttggctagcatgaaacaagttctggctggtgaaaagacagtcgctgaattgatggaaaattag

SEQ ID NO: 81131 - DNA, 303 bp, Saccharomyces pastorianus
atggtcaaagctgttatttttaccgatttcgacggtaccgttactttggaagattctaacgattatctgaccgatactttaggtttcggtaaggaaaaaagattaaaggtcttcgaaggcgtgttagatgatactaagtcttttaggcaaggtttcatggaaatgctggaatccatccacacccctttccctgagtgtatcaagatcttagaaaagaaaattcgattggatcctggtttcaaggatacattcgaatgggctcaagaaaatgatgtcctgtcatcgttgtttccagcggaatga

SEQ ID NO: 81132 - DNA, 726 bp, Saccharomyces pastorianus
atggcaatgtttaatacaaatgattccattaaagggttcgcaaaggcatccttcgaattagctctcaaaagaaaactaccgttattctttacaaccaaaaacactattctgaaaaattatgataatcagttcaaacaaattttcgataatttgttcgataaagagtataaggaaaagtttcaggctttaaaaataacatacgagcatcatttgattgatgatatggtagcacagatgctaaaatcaaagggcgggtttataatcgccatgaagaattatgatggcgatgtccagtctgacattgtggcacaaggatttgggtctcttggtttaatgacgtccatattgattacacctgatggtaaaacgtttgaaagcgaggctgcccatggtacggtgaccaggcattttagaaaacatcaaagaggcgaagaaacatcaacaaattcaatagcctcaatatttgcctggacaagggcaattatacaaagaggaaaattagacaatacagatgatgttataaaatttggaaacttactagaaaaggctactttggacacagttcaagtgggcggaaaaatgaccaaggatttagcattgatgcttggaaagactaatagatcatcatatgtaaccacagaagagtttattgatgaggttgctaagaggcttcaaaacatgacgctcagctccaatgaagacaagaaaggtgtgtgcaaactataa

SEQ ID NO: 81133 - DNA, 1059 bp, Saccharomyces pastorianus
atgagtaaaattaaagttgttcatcccatcgtggaaatggacggtgatgagcagacaagagttatttggaaacttatcaaagaaaaattgatattgccatatttagatgtggatttgaaatactatgacctttcaatccaagagcgtgataggactaatgatcaagttacaaaggattctgcttatgctaccctaaaatatggggttgctgtcaaatgtgccactataacacccgatgaggcaagaatgaaagaatttaaccttaaagaaatgtggaaatctccaaatggaacaatcagaaacatcctaggtggaactgtttttagagaacccatcattattccaaaaatacctcgtctagtccctcactgggagaaacctataattataggtcgtcatgcttttggtgaccaatatagggctactgacatcaagattaaaaaagcaggcaaactaaggttacagtttagctcagatgaaggtacagaaaacatcgatttaaaggtttatgaatttcctaaaagtggtgggatcgcaatggcaatgtttaatacaaatgattccattaaagggttcgcaaaggcatccttcgaattggctctcaaaagaaaactaccgttattcttcacaaccaaaaatactattctgaaaaattatgataaccagttcaaacaaattttcgataatttgttcgataaagaatataaggaaaagtttcaggctttaaaaataacgtacgagcatcgtttgattgatgatatggtagcacagatgctaaaatcaaagggcgggtttataatcgccatgaagaattatgatggcgatgtccagtctgacattgtggcacaaggatttgggtctcttggtttaatgacgtccatattgattacacctgatggtaaaacgtttgaaagcgaggctgcccatggtacggtgaccaggcattttagaaaacatcaaagaggcgaagaaacatcaacaaaatcaatagcctcaatatttgactggacaacggcaattatacaaagaggaaaattagacaatacagatgatgtataa

SEQ ID NO: 81134 - DNA, 510 bp, Saccharomyces pastorianus
atggaaagtcagttgattattgatgaagaaaaagaattaacacatttatcaagtaatgctgtcgattctgatgatttagaggaaatagcctggaacatttccatgtggtctattttaaattatgaaatggatgtccataataaggttaatggaccgttgactagatcactatatggtaaaagaaacccacaaggtgtactagtcgatgttgttattgaacgccttctgcatcatacaaactccaggtatatgtacaaacgtttaaatatgaaggacgatgacaaattagagttcaagtttgattttgtctttgatagttgcgacgaagtggaggaaatggatctctcctgcctaatctgcaaagttaataaaagaaatattgtaacttggccctgtagatgccttgcattatgcgatgattgtaggatatctctgggttataaaggatttgctacatgcgtcagctgtgatagtgaggtgaagggttacagtaagttgaatatagtctag

SEQ ID NO: 81135 - DNA, 381 bp, Saccharomyces pastorianus
atgtctacaaatatattgcaacatgttaagcaattgctccataacagagatgtatttagcttttttcacaacaagactggaaatcttaattacctagataacacaactcagaaaccggaagtttttgtaagtccaaattctacaatagtttcagccccaactttggactcttttcaagcattgatggagaaaggtaacttcaccactttgcaactagctaaggtaggaattagaatgtttttctcctattcggtaagtaagtatgctgttctatgttttagtaccgccattattttgaataggttgactgtaatgtcttcattgagatcaaattctacaaacattcgtttacctctttggtcaaaactttgctccatttag

SEQ ID NO: 81136 - DNA, 498 bp, Saccharomyces pastorianus
atgcatgaactgcacgtgagtgatacagatttttatgctttaagtgtctatttatttgtagctctgtctgactgcattgaaatttttatttcttcaacgacgaacgttccttcattaatatgctctgatttttccatatggggtttatcattgaatctttatatcatatccaaaatgcccgcggggcagcagcatattggcgataatgttgaactactaggagcggtttttcacaggttagtaattcatttggtagaattgtttcatataagagcctatagattatgtggagaagttatattaaacgcgggtttttttaccgcattcgtcactaggacctatttgaacggattagattttattaacatctgtctcattcacaattatttccctggctttttctatatttccaccatattactggcgtctataggcattttcctgaaggctttgttcatcagtaatccgtccgatcattatattcaagtatatacataa

SEQ ID NO: 81137 - DNA, 150 bp, Saccharomyces pastorianus
atggtgaaaatcaaatgttgcaatggagaagaggagtttagcgcaatagctctttcattgtgtctacttttaccgtcgaatgactatgtaatatttcaccaatcagacaacgtagaacccgttaatgaagtccctgctttcggtatatag

SEQ ID NO: 81138 - DNA, 141 bp, Saccharomyces pastorianus
atgattccaaaggggcaccaactggaagtagctgtcgttgaatacgataacgtcgatgatgcagatgtttgtattgaaagattgaataattataactatgggggttgtgatttggatatatcgtacgctaaacgcctctag

SEQ ID NO: 81139 - DNA, 1458 bp, Saccharomyces pastorianus
atggttcccggtgtcatttctacgggaattgaaagctggggagttattggagacgatgagtgcgatagttctgcgcattttcgtaaacggctgtggggaagtttttacatgctgagaacaatggttatggataaagtttgttggttgaaacatgtaatgttagatcctgaaacaggtctggacccaccgaactttacgctacgtgcagcacagggcttcgaatcaactgattatttcatcgcagggtattggatttggaacaaagttttccaaaatctgggagtaattggctatgaacccaataaaatgacgagtgctgcgtatgattggaggcttgcatatttagatctagaaagacgcgataggtactttacgaagctaaaggaacaaatcgaactgtttcatcaattgagtggtgaaaaagtttgtttaattggacattctatgggttctcagattatcttttactttatgaaatgggtcgaggctgaaggccctctttacggtaatggtggtcgtggctgggttaacgaacacatagattcattcattaatgcagcagggacgcttctgggcgctccaaaggcagttccagctctaattagtggtgaaatgaaagataccattcaattaaatacgttagccatgtatggtttggaaaagttcttctcaagaattgagagagtaaaaatgttacaaacgtggggtggtataccatcaatgctaccaaagggagaagaggtcatttggggggatatgaagtcatcttcagaggatgcattgaataacaacactgacacatacggcaatttcattcgatttgaaaggaatacgagcgatgctttcaacaaaaatttgacaatgaaagacgccattaacatgacattatcgatatcacctgaatggctccaaagaagagtacatgagcagtactcgttcggctattccaagaatgaagaagagttaagaaaaaatgagctacaccacaagcactggtcgaatccaatggaagtaccacttccagaagctccccacatgaaaatctattgtatatacggggtgaacaacccaactgaaagggcatatgtatataaggaagaggatgactcctctgctctgaatttgaccatcgactacgaaagcaagcaacctgtattcctcaccgagggggacggaaccgttccgctcgtggcgcattcaatgtgtcacaaatgggcccagggtgcttcaccgtacaaccctgccggaattaacgttactattgtggaaatgaaacaccagccagatcgatttgatatacgtggtggagcaaaaagcgccgaacacgtagacatcctcggcagcgcggagttgaacgattacatcttgaaaattgcaagcggtaatggcgatctcgtcgagccacgccaattgtctaatttgagccagtgggtttctcagatgcccttcccaatgtaa

SEQ ID NO: 81140 - DNA, 243 bp, Saccharomyces pastorianus
atgggcacactgtttcgaagaaatgtccagaaccaaaagagtgattctgatgaaaacaataaagggggttctgttcataacaagcgagagagcagaaaccacattcatcatcaacagggattaggccataagagaagaaggggtattagtggcagtgcaaaaagaaatgagcgtggcaaagatttcgacaggaaaagagatcgggatacggtagaatacgttggagagattccagaagactga

SEQ ID NO: 81141 - DNA, 603 bp, Saccharomyces pastorianus
atgcttctaaataaaaatctaaattgcgcggactttgttttctactttgacaggttagcaacaattttgttatcatgggcacttgatgacattcctgtagcacatacgaacataattacacctggtgagcataccatgaaaaacgttgttgcctgtcaattcgatcaagttacagctgttaatattattcgatctggcgattgttttatgaagtctttgagaaagacgatccccaatatcacaattggtaaattgttgattcagtccgattcacaaactggggaacctcaactgcattgcgaatttttacccccaaatatagaaaagtttggcaaggttttcttaatggaaggtcaaatcataagtggtgcggccatgatcatggccatccaggtgcttttagatcatggtattgatttggaaaagattagcgtggtggtttatttggccactgaagttggtatccgacgtatattaaatgcatttgataacaaagtcaacatttttgctggtatgatcatctccagagaaaagttacaaaatcatcaatacaaatgggcattgaccagatttcttgattcaaagtattttggttgtgattga

SEQ ID NO: 81142 - DNA, 711 bp, Saccharomyces pastorianus
  modified_base (13)..(13): a, c, g, t, unknown, or other
  modified_base (48)..(49): a, c, g, t, unknown, or other
  modified_base (60)..(62): a, c, g, t, unknown, or other
  modified_base (97)..(98): a, c, g, t, unknown, or other
  modified_base (115)..(116): a, c, g, t, unknown, or other
atgaaaccaaggnagaccacattggaaaagctaaatgcagtccatggnnatggtgaagtnnnagatgtccaaaaaaacccaaaagggaaaaagctcnntcggtatatccccaccnnatggacaactccatatataataggtataggtggtgcttcaggttcaggcaagacaagcgttgctgctaagattgtgtcgtcaattaatgttccctggacagtattaatatctttggataacttttacaatccattaggcccagaggacagagccagagcctttaaaaatgaatacgatttcgacgagccaaatgccatcaacttagatttggcatataagtgcatcttaaacttgaaggagggcaaaaggacaaatatcccagtttatagcttcgtccaccacaatagagttcctgataaaaatatagtcatatacggggccagtgtggtagttatcgaagggatctacgccctttacgatcgtcgattgctggatttgatggacttgaaaatttatgttgacgctgatttggatgtctgcttagcaagaagattgtcgagagatatagtttctagagggagagatttggatggttgtattcaacaatgggagaaattcgtgaaaccaaatgcggtaaagtttgtgaaaccaacaatgaagaatgcagatgctatcattccatcgatgagtgataatgcaacagcggtaatttaa

SEQ ID NO: 81143 - DNA, 1239 bp, Saccharomyces pastorianus
atgattcctctgcttattgtagtgttccctgttatcaaggaccctatcacctcccaaccaatgtctccccgtgattcctctcagttcatcttatcaacgatgtggtcgagtgtcatcatgcttttgctgggtgggtttactttagcagccgctctttccaagtacaacattgccaaagtcctttctacgcatattttggcatccgccggtacaaacccacattttattcttttaacaaatatgtttgtggcgctctttgtttccatgtgggtttctaatgttgctgcccccgttctttgctattcaattgttcaacctttgctcagaacactgccaagaaattgttcctatgccaaagctctaattcttggtatcgctcttgcctccaatatcggtggtatgtcttctcccatcgcttctcctcaaaacattttttctattggtataatggacccttcaccatcttgggctgaatggtttatgattgcgctacctgtgtgctttatttgtgtcatggcaatttgggtgctattgatcataaccttccctcctgagccaaatgtgaaaattttgcaattgcatccatcccgtgatccattcactctgaagcaatggtttgtcactttagtttgcattataacaattgttctttggtgtctttcaaaccaaatctccggtatctttggtgaaatgggaatcatatctattatacctatagtagtcttcttcggtacaggtcttctaacttcggatgatttcaataatttcatgtggacaatcgttgttttggccatgggaggtaccaccctaggtaaggcggtaagctcatccggtttattgtctacaatggcacagttaattaaggcgcaggttgagcatgaaccaatcttcattattgtgttgatcttcggtctagtgattcttgtaatggccacttttgtctcccataccgtcgcggcaatgatcatcgtaccattaatgagtgagatcggttccaatctaccttcaggtgatcattctagactattgatcgttatagccgccctattatgctctagtgctatgggtcttccaacctctggtttccccaacgtgactgccatttcaatgattgatgaagttggtgatagatatttgaccgtgggtacatttattacgagaggtgtaccagccagtttgttaagttatgccgctattgttacagtaggttatggcatattgaaagtaatgggattttaa

SEQ ID NO: 81144 - DNA, 1320 bp, Saccharomyces pastorianus
atgaagttctcgcattccttacaattcaattctgtaccagaatggtctaccaagtatctggcctattcgcagctgaaaaaattgatctattctttgcaaaaagataagctgtacagtaacaataagcaccatgttgtggagccacatgacgccaacgatgaaaatctgccgctattggcagatgcttctccagatgatcaattctacatctctaaatttgttgctgccttaaaccaagaattgaaaaaaattgataaattctacatatctcaagaaacaggtcttatcgccaactacaacgagttgaaggacgatgtcatggaactggaaaacacgaacaaggccacccaactgtttaatcagcagcaacagcatcaattgcaaagtgttgcaagaaacaggaagtctaagtcacaacaacgccaaagaaggtttagtagtgtctcctccacggactccaacccctctctgacagacatgtcgattgactctgcacccgtcatccacacgcaggtctcgaacacgactaataatggtaactcaatgcaaaacctggcctccgcttcagtgtcgctttctaactctaaccctgtgtatctttctccttttacccagcataggctctctttaaagaaaagattgatatcgatctacacccagttgtccgagttgaaggactttattgagttgaaccagaccgggttctccaagatctgcaagaaatttgacaagtccctaaatacgaacttgaagcagaactacttgaactatatcaaattccattcgcatgtcttcaatcctgctacaataaataggattcagcatcacattaccgagaccatcctcacttacgctagcttgaacaagggcacgcgtcgaccatctaatacgtttaatttggacgctgaccgaatcaacaatgacgaaaacagcagcggtaatgaagaagacgaagatggcaacagacaagaagtcctcgatttccaggatgctgagcgtgaattatcctctcatttgagagatcatgtagtttgggaaagaaacaccgtttggaaagatatgatgaatttggagagaaagtaccagtctgccaagactgacaacaagaagttttcaaagttgagttccagtcaattgcgccccagtgccaacattactgaatccatggcaatgtcgagtggtggcgccggtattatcgctccatcaacggactccctaactttccgtgaactcatgcatttaccacccaagcaatggttgcaatttatcatgggccaaacttccctgctgaagtttctgttaatcacctcatgtttcatg

SEQ ID NO: 81145 - DNA, 1002 bp, Saccharomyces pastorianus
atgtatttaacagaaaaactaaaactacactggctgtccaagatcttcctttttttgcattctttagttttattgatgaaaatgcattctttcgccttctacaatggctatctatggggtataaaggaagaactacaattttccaaaagcgctcttgccaaatacaaggattctataaatgatccaaaagttattggtgctcttgagaaaagctgtgagttttgtagttttgaattgagctctcagtctttaagcgaccaaactcaaaaattccccaacaatatcagtgcaaaaagctttttttggttcaccatgtttccaaccctaatttaccaaattgaatatccaagaactaaggaaatcagatggagctacgtattagaaaagatctgcgccatcttcggtaccattttcctaatgatgatagatgctcaaatcttgatgtatcctgtagcaatgagagcattggctgtgcgcaattctgaatggactggtatattggatagattattgaaatgggttggattgctcgttgatatcgtcccagggtttatcgtgatgtacatcttggacttctatttgatttgggatgccattttgaactgtgtggctgaattgacaagatttggcgacagatatttctacggtgactggtggaattgtgttagttgggcagacttcagtagaatttggaacatcccagtgcataagtttttgttaagacatgtttaccatagttcaatgagttcattcaaattgaacaggagtcaagcaactttgatgacctttttcttaagttccgtcgttcatgaattagcaatgtacgttatcttcaagaaattgaggttttacttgttcttcttccaaatgctgcaaatgccattagtagctttaacaaatactaaattcatgaggaacagaaccataatcggaaatgttattttctggcttggtatctgcatgggaccaagtgtcatgtgtacgttgtacttgacattctaa

SEQ ID NO: 81146 - DNA, 684 bp, Saccharomyces pastorianus
atgaatagcagtggggataatgctgggtttgagtggtggagacggaccatgcagtacaagactggtataggcttgacaccggaggagaaaactcgatacgaagacgactctaaagctcgagaactaaaaaaggaatgtctgaaatgttatgagtatcgagattggatgcttaaatactctcccacagttcgctttatggtacaagctattacgaaacttaataagggtagcgacagtaaattcgacgattcgaagatcatctgcgattactgtcccgactggaagggcggtggctttcatcctgaattgggaatcctattgtgccagaacaggttacgtgataagtggcatttagaggatacgctttcgcatgaattaattcattatttcgatgatctaaaatggcaagtagattggttaaatctgaagcatcatgcatgttctgaaatcagagcctcttcgttaagtggggaatgcaggttttgggaagagttcaagagaagagggtttaggacaggattccatgtggcaaggggacaccaagattgtgttagaaggagggcaataattagtgtttcagggaaccccaactgccaaagcaaagaacatgcagcaaaaattgtagatgaagtttgggacagttgcttcgccgatacgagaccgtttgatgagatttacagatga

SEQ ID NO: 81147 - DNA, 603 bp, Saccharomyces pastorianus
atggatgtcgacatgaagggtgaattggcggtactggcaagtaatgacaattccatagctcttgtgaaactaaaagacctgtcaatgtctaaaatattcaaacaagctcatagttttgccattacagaggtcactatctctccggactctacatatgtggcgagtgtttcggcagccaacactatccacataataaaattaccgcttaactacgccaactacacctcaatgaaacaaaaaatctctaaatttttcaccaacttcatccttattgtgctgctttcttacattttacagttctcctataagcacaatttgcattccatgcttttcaattacgcgaaggacaattttctaacgaaaagagacaccatctcttcgccctacgtagttgatgaagacttacatcaaacaactttgtttggcaaccacggtacaaaaacatctgtacctagcgtagattccataaaagtgcatggcgtgcatgagacgagttctgtgaatggaactgaagtcttatgtactgaaagtaacattattaatactggagaggcagagtttgagatcaccaacgcaacttttcgagaaatagatgatgcttga

SEQ ID NO: 81148 - DNA, 699 bp, Saccharomyces pastorianus
atggtgcccaagacagtaatgactttttgccagtatattgatagtgtaaaagatcgccttgcttctcgtcacagttactcgccagaacgcgattttgataaaattctaccgaatggagctatagaaggtagctccgtttcttcctcctctattgaagaaacggaaatgttggctccaaaactcccggaagaaaatcatagtttaattcatgataggccaggcagagtttccatgattaaggacgataggggtcttaagtttataatggagaccagtgagacgccacttgaaggtgaaagtgttgtgtttggccaagttaccgccggattaaaagatctgatggataaactagctaatgtgaaaactgacgaaaatggcaaaccagagcaaccaataacaataggttacatttcatcccaggaacacagggttcagcatgcaaaggaagctcacgaaaagtatttacaaaggcttcaagattaccaaaacggcgatttggaaaaaggtattaccttgaagaattatttataccagggtagtcaaagaaagttagaagacgcaaaatataatcagcttcaccatcctttaccaaagattatgcttggtatttcggtattgttacttttctacgttttggccaagtacaggaaaagaatattcaacagatcgtctaaaatagtttctattagagaggattaa

SEQ ID NO: 81149 - DNA, 150 bp, Saccharomyces pastorianus
atgaagagcttttttctttatctttatgtggcattcatgtttagttgcataacggctctgccattacctgtggataacaaaagggcttcttcagactccttagacctaagaaaaaatacgcaccagaccctcctattacacataatgtaa

SEQ ID NO: 81150 - DNA, 2538 bp, Saccharomyces pastorianus
atgtttagaaacgtcggctattatattgatgatgcaggcgaactgatcgcagcagaatttacgaagttgacacttagattggttcacagattgcacgcttaccttttaaggcagcaaaacactccgccaaaattagagaatgaagctgctgctgaaaaatggctggtgcaaatattcgaaatacttggatccatgaaaagaaaactcaatagattcaccaatattttgacaaaagcatttcaaaattttgtccgctacaagatagaagatcacaactatctgctaaagcaactaaaagaaacaggccactttcttatatacacaggaggttacctagagcaaaatggtacttatttaattggtagcccagagctattaggctgtaaagatgatgatattttaagaatcattaagaattcagacatcggttgtgatttagtgcctaagctagaaattaataacagtctgacaatttataatgctttggatgataattggaactccaactcatcactgggttcagatatctcgaatgatggtaccccattttattatatcaaaaacgatttgaccacccagcctagatcttataacggtaatagagtcaatcgtgaaccggattttgaaaacagcaggagcacggaggaagagatttatgaactggagacaagattgaactctcttggttatgtattggtattgactccgcaagagccattactttgggagggtgagatgtataatctatccgataacaaaacaattaaaccagagggattgaacttgaaagtaattcccaattcaatagatttgatgtgccaaggatccagttatgccttagaataccaatgtgacaggttccaacagatatctggtagctcagtttctttcttggaaaaaaaatcttcctcagaaacggttaaaaacaacttacaaaggataaataaagcatatttcagatgcacgtacagtgttctgaagaactatacaaagattgtgaccacgttcaagaaggtaagtcctgtcaatgatttattgaataatattttcctttttgggagggattttggtctgaactttttgagaattaatgttgccaacaatgaaaaaagatccattataatacttttaatgatgcggttaagtatcggatggctgaagttcttagctgaagactgcgatccgactgatcaaagggtatttaggtggtgtgtcacgtcaatggagttcgcgatgcatatggtaagcggttggaacatactagctcttgatgaatgcctattttcttctttaaaacaaaaaatttcagaatgcatgtcattacttatttctcattttgatataataggcgcacgctccatagaagttgagaaaatcaatcaacaagctagatcaaatcttgatttggaagatgtgtttgacgatgatatgatgctacaagtgaattccgagttccgagtacaaagtataatggaattggaagaaaggataaagcggaatcctcatcaaactggtaaagtaattgatgatagtgacaaaggtaacaagtaccttgtttctttggcatcttccatatcgaacgtttctatgagatggcaaaagaggaactttattggtggcggtacttttggaagggtatattctgctgttgatttggataatggtgagattttagcagtcaaggaaatcaatattcaagatagcaaatcaatgcaaaaaatattccccttaatcaaggaggaaatgagtgtcttagagatattgaaccatccaaatatagtttcatattacggtgttgaagttcatcgtgataaagttaacatctttatggaatattgtgaaggcggttccctagcagctcttttggagcatggtcgtattgaagatgaaatggtcactcaagtctacactttacaattactagaaggacttgcatatttgcatgaatccggcattgttcaccgtgatgttaaacccgaaaacatcctactagattttaatggtgttattaagtatgttgattttggtgctgctaaaaaaattgctaataatggaactagattggcaagtatgaacaaaatcgaaaacgcagatggtgaacacgaagatgttacccatgtttctgattcaaaggcagtgaaaaataacgaaaatgctctattagacatgatgggaactcctatgtacatggctccagaatccatcactggatctaccaccaaagacaaacttggggcagacgatgtttggtcgttaggctgcgtggtattagaaatgatcactggtagacggccatgggctaacttagataatgaatgggctatcatgtaccatgttgctgcaggacataccccacaatttcctactaaggatgaagtgtcgtctgctggtatgaaatttctggaaagatgtcttattcaaaacccctccaagagagccagtgcggttgagctgttgatggatccttggattgtacaaattagagaaatagcctttggcgacgattcttcctctacagatactgaggaaagagagtag

SEQ ID NO: 81151 - DNA, 123 bp, Saccharomyces pastorianus
atgtttccaatgcgtttggtaaaagatataatactaattcgcctatcttacgcgaagaaaatacagaatccaaccttgatgatgatcgatcaaatgatggacgattttcagtacatatattaa

SEQ ID NO: 81152 - DNA, 1878 bp, Saccharomyces pastorianus
atgtcgcattcagactacttcaattataagccttacggcgattccacggaaaagcccagcagctccaagatgaggcagtcatcttcatcatcttcatctagactaaggtcggaaagtttagggcgaaattccaatactacgcaggctcgagtagcgtcatcgcccatcagcccagggctgcattctacccagtactttagatcaccaaacgctgtttacagccctggagagtctccattaaatacagtacagctattcgatcgtcttccgggtatacctcaaggtcagttttttcatcaaaatgccatttctgggtcctccagctcctcggcaagatctagtagacggccctcgtatattggtcttcctctaccaaaaaatcctcagcagtctctaccgaagttgtctactcaacctgttcctgtacataagaaagttgaggctagtaaaacagagagcgagataattaagaagcccgctcccgtgaatagtaatcaagatccattattgacgaccccaacgttagtgatatcaccagaactggcttcactaaatacaacgaatacatcgattatgtcaacgccacaaaatattacaaaccaaacttcgaacaaacacattcccaccagatcgcaaccaaatgggtcaacaagttcctccactttgcaggatattgtcacgacaaatagctcgcaacggtctgtaggccaccatggtggaagcacaacgagtctccgaacatacaaaaaacaatatgtattaaatgaacagttatatttaagaaaaatgagaaaccgtgctaatgatgattattacactagaggtatagtcgcatcatccaactttgaagatgacgaagaaaattttagtaacaaaggtgaagatgacttagaactagaaatggatgatcttttaaaggtagaaggtgaggataaagataacgacttcaattttggttataattttattacgtcgagcacaaaaaataatgaaaatgttgtttcgatgagcctaaattatctaaagggcaaattggattggttgagggatgtgaacaatgatcaaccgtgtgaaatagaagatgaggagtggcattccatactggggagcgaggatttgctgtcaaaattgttacaaaatcctatggtgaacaaccgatttgaatggcaaacaatgttatctaaggtactgaagggagatattgtgaggaatgaaaaaacgaagattgcaaatcaagggaaaggccctggcttcaatactcagttttcagatgacatttggattgagttgaaggcatggatgaatgggaggaccgtggaagatcagaacaaatctctgaggatttttagggattctactgactccgtatttcaagaaatcatggcctttaaactagaagataatatgagtgctgacgaggctgcagagactatcaaatcactagtagacaaatattatagagtcttaaatctatggcctaacattaaaagaatgcatgctgaaaaacccattactaaaacagaagcattcaggaatcgaatagatactttgaatagttggcttaatttcaaatttaactttgatactaatattgcgtacctgaaaaaatggatagttggcaataaagagctagaaagcactaccgaagtggataacaccaccgtgaatttggatgatccagccgttttcgccactaattgtaaacgctttgcggagcaaattatgaaggaaaaggatattgaactgatatttcaaaaaaaaatattctttccattagcaccatggattttgaaggccaaatttttcttcttgaaataccaaaaaacttggaatgaattgaatctatcttatttggatcaagatctggaattttattga

SEQ ID NO: 81153 - DNA, 552 bp, Saccharomyces pastorianus
atgaacttggcaaaagccacacgaatcctgaagacaccaaaagaatttggtgagaacttaatgattttggacttaatcagaaacgacctttacgagttggttcctgacgttagggtggaggagttcatgtccgtggaagaatatgccaccgtttaccaactcgttagcgtcgtaaaggcacatggattgacctctgccagtaagaagacgagatattcaggcattgatgtccttaaacactcgcttcctccgggatctatgacgggagcccccaagaagattactgtgcaattattgcaggacaagatagaaagcaagctaaacaaacatgtcaatggtggagcacgtggtgtttacagcggtgtcacgggatattggtctgtgaattccaacggagattggtctgttaacattagatgtatgtattcctacaacggcggaaccagctggcaactcggtgcaggggggggcataacagtcttaagcacactagatggggaactagaggaaatgtacaccaagttggagagcaacttacaaattttcatgtag

SEQ ID NO: 81154 - DNA, 1725 bp, Saccharomyces pastorianus
atgctgtccgatacaattgacacaaagcaacaacagcaacagcttcatgtcctgttcatagactcttatgattcattcacctacaatgtagtgagactaattgaacaacaaactgatatctcaccgggagtcaacgccgtgcacgtgacgacgatacatagtgatacgttccaatctatggatcagctattgccacttttgccgctttttgatgctatcgttgttggcccaggacctgggaatcccaacaatggtgcacaagatatgggtataatatctgagcttttcgagaatgctaatggaaagttagatgaagttccaatattgggcatatgtcttgggttccaagcaatgtgcttggctcaaggtgctgatgtcagtgagctaaatactatcaagcatgggcaagtgtatgaaatgcatttaaacgatgcagccagagcttgtggccttttttctggttatcccgatacgttcaaatctacgaggtaccattcattgcatgtcaatgccttcggcattgacacccttttgcccttatgcacaaccgaagatgagaacggtattcttttgatgagtgctcaaacgaaaaataagccatggtttggcgtacagtaccacccggagtcatgttgttcagaattgggggggctgttagtcagtaactttctcaagttgagtttcataaataacgtgaagacaggaaggtgggaaaagaagaaacttaatggagagttttccgatatcctatctcgattggataggactattgatagagaccccatatacaaggtaaaagagaaatatccgaagggcgaggacacaacttacgttaagcagttcgaggtctctgaagacccgaaattgacatttgaaatttgcaacatcatacgagaagaaaaatttgtcatgtcatcttctgtgattagtgaaaataggggtgaatggtctatcattgctttaccaaactccgcatcccaggtattcactcattatggagctatgaaaaagactacagttcattattggcaagatagtgaaattagttacaccttgttgaaaaagtgtctagatggtcaagattcggatttgcctggctcccttgaggtaatacatgaagataaatcccaattttggatcactttgggtaaatttatggagaataaaataatcgataaccacagagaaataccttttattggaggtcttgttggcattttaggttatgaaataggtcagtacattgcatgcggccgttgcaatgatgatgagaattcccttgttcccgacgccaaactagtttttatcaacaatagtatagtcattaatcacaagcaagggaagctttattgtatttctctggataatacatttccagtggcattagaacaatccttaagggacagttttgttagaaagaaggatattaagcaatccctgtcctggcccaagtatcttccagaggagatagacttcattataactatgcccgataaacttgactacgctaaggcgtttaagaaatgtcaggattatatgcataagggtgattcttatgaaatgtgtctcacaacgcaaaccaaagttgtaccatctgcggtgatagaaccctggaggatttccagaccttggtacaaagaaacccggctccattttcaagtttttttgagtttagagacattattccccgccaagatgaaacgcctccagttttgtgcttcttaa

SEQ ID NO: 81155 - DNA, 105 bp, Saccharomyces pastorianus
gccgccggtcgtgtttcatgctttgtagacgacgatgctttgaaagatgtctttgtaattaagaagaagtacaagttttatgatgatgagaatttgactgagtag

SEQ ID NO: 81156 - DNA, 1185 bp, Saccharomyces pastorianus
atggcatcttcatcaacgtctgtgtcattatacagcccatccacacctgtttactccgtcccttcgacttcgtccaatgttgcaactccttctacgacttcttcaactgttgaaacaactgttagttcacaaagttcgtctgaatatatcactaaatcctcaatttctactactatcccatcattttccatgtctacatatttcaccactgttagtggagtcactacaatgtatacgatatggtgtccttatagctctgaatctgagactagcacattaaccagtatgcatgaaacggttacaacagacgctaaagtctgcactcacgagtcttgcatgccctcgcagacaacgagtttgattacatcttctataaaaatgtccactaaaaacgtcgcaacttctgtaagcacctcaacagttgaatcctcatatgcatgctccacatgtgctgaaacgtcacactcgtattcttccgtgcaaacagcttcatcaaattctgtaacacagcaaaccacatccacaaagaattgggtaagttcaatgacaacttcggatgaagatttcaataagcacgctaccggtaagtatcatgtaacatcttcaggtacctcaaccatttcaactagtgtaagtgaagccacgagtacatcaagcatggactcagaatctcaagaacaatcaccacacttattatcgacatcggtcccttcatcctcctccttgtctgctacattatcctctgacagtactattttgtcattcagttctgtatcatcactaagtgtcgaacagtcaccagttaccacacttcaaatttcttcaacatcagagattttgcaacccacttcttccacagttattgctacaatatctacatctacatcatcactttccgcaacatctacctctacaccatctacctctgtggaatcgactgttgaatcttcatcattgactccgacggtatcttctatttccctctcatcatcatctgctccctcttctctacaaacatctgttaccactacagaagtttccactacttcaatctccatacaataccaaacttcatcaatggtaacaattagccaatatatgggcagtggatcgcaaacgcgtttgccattaggaaagttggtcttcgccatcatggcagttgcttgcaatgtaatttttagttaa

SEQ ID NO: 81157 - DNA, 351 bp, Saccharomyces pastorianus
atgacattatctttcgctcattttacctacctgttcacaatattgttgggattaactaatattgccttggcatctgatccagaaacgattctagtgacgataaccaagacaaacgatgcaaatggggttgttacaactacagtttcacccgcgctagtctccacatccactatcgttcaagctgacactacgacattgtatacgacttggtgtccattgacggtatccacttcatctgccgccgaaataactccttcaatatcgtacgctactaccctatccagatttagtactttgacattatctacagaagtctgctcccatgaggcatgtccttcgtcatcgacgtag

SEQ ID NO: 81158 - DNA, 348 bp, Saccharomyces pastorianus
atgcccgacgacaaggagggttgcgagtgggtgggtccatcgagtagcatgcgcaagttgtacgacttagacctggtgtatggagataatccaggagttgcagaaccgtggaatggcggacaatcttgcacaagcagggacggcagcagcaatagttcagcggaccagcagcttgccgatgagttagggctaccaagattctctatatttactactacaggcggccagagtctattgatgcttctatccttctgccaattgagcaagctgtctatgcataagttcccaaacggtacggatttcgccaagtaccaaggtgtcatatacggtattgatggggaccaatga

SEQ ID NO: 81159 - DNA, 1212 bp, Saccharomyces pastorianus
atgcaatctatgaatgtacaaccgagggtattagctgtaggaggtgagcagtttttctctcagaggcaggcttctgaacaacaccagcagcaaaacatgggacctcaggtgtattcgccacaggttaatagagcaagaatgtttcctcaagggatgcctgtaaatacaattaatggctctgttaatcaggagatgaacaatgcctatcttttgaagcagaagaacgagccactgttaactcagcaacaacagcaacagcaacaacaacagcagccatttaatataggaacgcctgtatcggtggctagtttgccgcccggactgaacgttctgcagcaacaacaacagcagcaacaacaacagcagcaacagcagcagggagtgggactcaatcgtcccttggcttcccagctacccaagcatttaaccaaccaaagtatgccaccgatctttttaccacccccaaattatcttttcgttcgcgatgtctggaagtccaacctttacagtgaattcgccgttataagacaactggtctcgcagtataatcatgtgtcaatcagtactgagtttgtggggactttggctaggccgatcggcactttcaggtcgaaggtcgattaccactatcagacaatgagggccaacgtagacttcttaaacccaatacaacttggtctttccttgagtgacgccaacggcaataagcctgacaacggtccctcaacgtggcagttcaattttgaatttgacccaaagaaggaaatcatgtccacagaatcgttagaattactcagaaaatcaggtatcaacttcgaaaaacacgaaaatttaggcatcgatgtatttgaattttcgcagcttctaatggactctggtttaatgatggatgattctgttacttggatcacataccatgcggcatatgatctaggtttcctgatcaacattctaatgaatgactccatgcccaacaacaaggaggatttcgagtggtgggtccatcaatacatgcccaatttctacgacttaaacctggtgtataaaataatccaggagttcaagaaccctcaattgcaacaatcttcacaacagcaacagcagcagcaatattcactaaccacacttgccgatgagttagggctaccaagcattctctatatttactactacaggcggccagagtctattgatgcttctcatccttctgcc

SEQ ID NO: 81160 - DNA, 387 bp, Saccharomyces pastorianus
atgaaaagaatttttttgattgattgtccaggtattgtgccgccttctagtaaagactccgaagaagacattttattcagaggtgttgtcagagtcgaacacgtcacacacccagaacaatatattccaggtgttttaaaacgttgtcaggtaaagcacttggaaagaacttacgagatctcaggatggaaggatgccacggagtttattgaaattctggcaaggaaacaaggtagattactgaagggtggtgagcctgatgagtctggtgtttctaagcaaatattgaatgattttaatagaggtaaaatcccttggttcgtccttccacctgaaaaggaaggggaagaaaaaccaaagaagaaagaagttgagaagacggcatag

SEQ ID NO: 81161 - DNA, 819 bp, Saccharomyces pastorianus
atgggtactggtaagaaagagaaatctagacgtattcgtgaaggtgacaccaaagatggtaatcttcgtgtgaagggtgaaaatttctacagagactccaagagagtcaaattcctgaatatgtacactagtgggaaggagatcaggaataagaaaggtaatttaattagggccgcttctttccaggactccacaataccggatgcgagggtccaaccagatcgtcgttggttcggtaacacaagagtgatatctcaggacgcactgcagcatttcagaagtgcattgggtgaaacccaaaaagatacatatcaagttcttctgagaagaaataagcttcccatgtcattgttggaagaaaaggacacagatgaatccccaaaagccagaattttggataccgaaagttatgctgatgcgtttgggcccaaagcccaaagaaagagaccacgtcttgctgcatccaatctagaggacttggtcaaggctacaaatgaagacattaccaagtatgaggaaaagcaagtcttagatgccacattaggactaatggggaaccaggaagacaaagaaaatgggtggacctccgcagcaaaagaagctattttcagtaagggtcaatccaaacgtatttggaacgaattatataaagtcatcgattcgtctgacgtggtaatacatgttctagatgcaagggatccattgggtacccgttgtaagtccgtggaagagtatatgaagaaggaaacaccacacaagcatttaatttatgttcttaataagtgtgatttggtacctacctgggttgcagtatgttaa

SEQ ID NO: 81162 - DNA, 102 bp, Saccharomyces pastorianus
atggcacaggttgcacaatgtactacggcacatgatcaggatatggcgttgcatgaactgccatcggtggagtcattaatgacccaacaagacgtagaatag

SEQ ID NO: 81163 - DNA, 387 bp, Saccharomyces pastorianus
atgaacagcaaatctcaacaacaagaacaacaaccaattgtattcgtcaccggtacagacactgatgttggtaaaacctttgtatcaacattattggtacacaaatggaaagctgcatactggaaacccgtacaaactggaattgagtcagatcaaggtgactccgagacattgaaaaatttcaaaatagccgcatcaacttggcaaccacctatattcacgcccacttatgcgctgcagaagcctctatctccgctccaggccatggagtacgaacctaatgtcgacatcaggttgttggatttcgtagttcctgaagagtggagcgcagagaatccattggtcgtagaaggagccggcaggggtttgcgttcctatcactcgtaa

SEQ ID NO: 81164 - DNA, 117 bp, Saccharomyces pastorianus
atgtacagctattgcacacattataggaagggacagtacggaaaattgatagagtttacagattctcaaaagaaatattacgagaaagttgtagaattatggaacaaggttgtatag

SEQ ID NO: 81165 - DNA, 912 bp, Saccharomyces pastorianus
atggcgttggcacaattaattgtcatattttttggatattgcgattttaaaattaaagggtatcgcattgcctcttacaatgcaccgacatttgcctccagtttcataattcttgcagtatgccttttattagttgtcgttctggaaaatcctgaggttaaagttacaaattcggaaaatagccttttcagtgctctgaaacaattttttagagtcgaaagaaaaaaactcatctcctgcttgattttactatggagcatgttcctatcgtcatttattatgagcgaagtagtttattttatgccactattcctgacgctccgcgttaactgggacaccaagtttcaaggcatagcgtttatggtcgcatctatacttggtgtgactggaagctatttcgctccaaagttaataaacgtcgggtgctcctgcggcagagccaaagatggcggattagaagagtcagatacaactggaagtgagaccgttgaggtaaagaaaaaagattcgctgtacagcggtcaagtttttctgtccatctttgcattgtttgtttcattgctgggacaagcttttatgattggagcatccgaagccttgaagcataaatcaatgccacccacaaattctggtatatttttttcagctgggatgtcgattacattgttagggtacaactttttggcttcgagcattccagcccttttttccatgtacatcgaccccaaactcaaggtccagttgatgccttcaattggagcaatctctgggattggtaaactggtggcaccgattgtattagcagctctttatggcacaagattggggctttcaattgcggttggatttgatatgattttggtagctgtttcaattccaccgcttatttggctcaggaaaaaaaggtgttag

SEQ ID NO: 81166 - DNA, 456 bp, Saccharomyces pastorianus
atgggggatttcaagattgaagaaataagattaggagacgatgggctgatagaaaacaataggaccgatagagttgtcaacatcattgtaagactaggattatgcatttctttaattaccaagtctgcatttcaacgcacgaaggcaggtgtagcacgcttttcttcaaaattaagggcaaggtttggcaacagaaaaggtcctacttactcttcgctgcttcagggtcagttttcagatgaatcagatggcttgcatgaagatgctaacgatttatccagtttcacaagtcaagacagtaattttgaaattgaacaagaagatgcttacagacccgaacaagagcacacgtcacagatagaccagcctgccactagcaatattccagacgcattgccagcacgtagtgctattcacaagcctgattcaactgctgtgcgcaacgaggacgagtaa

SEQ ID NO: 81167 - DNA, 459 bp, Saccharomyces pastorianus
atggaattgaggggtgacttgatgattagtataatgaaggatgcaatgaacgactatttctattatcaaaatgacaacacagttgagcctgaagaaatcataggaaataaagtgagtggtattttattcgataatattatcgattatactacttattttggaacaaacacagaatatatccacggtattcatatgctacctatcacaccagtttcttctaatattcgttctgagactttcgtcgaagaagaatggcagactaaaatcgagccaattattgaatcgatagaaagcggctggacaggcatattgaagctgaatcaagcactcttcgacccagtagattcgtatgcatttttcagtgattcaacttttgattcatccacatatttggataacggaatgagtcgcacatgggcattagcattttcagggggactggcaaactcaattgcttag

SEQ ID NO: 81168 - DNA, 2868 bp, Saccharomyces pastorianus
atgcaattatatctgacacttctttttctattaagtttcgtcgaatgttcatatataagtttcatatcgaataatgcagacgaaatattggaaactgatttaattgaaactttatcttacgctactttgacagtaggtgagccttatgttgcacaatcggtggttgtaacaagagtatctgcagcttctcatagccctctctcagtttcgccaaaaaatagagtgagcgcatctccaattaattcacaagacagtgattctaatacaagaacagcagttcaactgtcattgtcgttatcaaactacgcaagccaagtatctcaaaaaataagcgcacaaaccaataatgatcctgtcactgtttcaaatatttacgcaaatgataattcgaaaagcaaaagttcagtacacaatttgagttcggtttccggcgtcgcctcagtcatgccaagtgcatcaacaatgcgtaaagtcaccacattattatctcaaactgcttcgacttcgacttcgactttattttcttcatctttatctatttcggggacacaattaaatggaactttattgacttctgtttcaaaaggtacaatcgatccactggtaactcaaatgccttcctattcttcccaagaaacaaaaattattccttcttcattgacctcgaataaaacgatatatactatttcagtaaggacaaatgcagctacagctaccggcgaagattccttcattgcttcaactcctgcttcctcgactttgttctatccatccaactcaacccaggatttagtccagacgctcgcatctacaacagcaagccctgcttacccatctaataggacacaaatcactctttctccatctgtatcactatattcgacaactagtccaatttacccttcaaacattacagaaaacggttcttcaccatcaccatcactatcatcgactgttagtccagtttatccatcgagttcaacaggaaacattcttttgtcatcactattttcaacagtagattcttcttcctctccggtttcttcgacattagataccatttatgtatcttcttcaatgcaagctaccatctcttcgtcctcatcttcgagacaaacaaaaacttcctcctcttctctgtcaacctcgaccagtagcaccgctaccacaacggagaactcttcaacaacgaccattgtcaatcttttcaatgctgtttcgacagatgaaccaccaactgtttttgacagatcaccaaatcctatgtcattggctgatggggtgtcaaacgatggtcccattcaaacaaacaagttttatacaaatttgattgttggtagtcaggaatcacctgcctttgtgtatccttattcattgtggaagtacacctcgagttcatatggttttgctgttcaacatacaacagtagatcaatatagctacggtggttatgacagttccggtaatgcagaatatttggtcaatcctttgggaattgctcatgttgttttctcagcttcgaattttgattcaagtatgactatgcaagttgatgaaatgaccttgtcttcaacaagggtagtgctatcagaatccaatgattcttcgaactacctggaaatacctttggttcaaggtatgggatttgcaactggtatatatcatggatctttaaatgccaagattggttccagcgtcggattcaataccattgtttctgaatcatcaagcaatttagctcagggtattctcaaatatcgtatcacccttttgaatggagtcacttggttatgttacgtgataggaccagacgatttaacctcaacggacttttcattggaggtgagctcagaatatgaaattaaagcaagcgctagtgttgatggtcttatcattcaattggccgtcgcaccttctgaaactgattacgaggtcttttatgatcaagccgcaggtatgtacgttactaatttcaagctgcagggtgtctctgacggttctacagctacctatgaattttcttataccacccaaggtgagtcggcatcaggtagcacaatgatttttgccttgccccatcatgaatcttcatttagtgatataatgcaagactactataccggcattcaactcgcttctacaactaagggtgtaatgaacggttatctaacaacgagcctacaattttccacatctctaaacagacaaatatcttggttaccatggtcttctcaacttggctcaaaccttttagagtattctaaagaacaattgcaattattagctgaagttgccaattccgaattacaggttagtatttccgaaagtataagcgggttaaacacatattatttgggtaaagttatcgataagtattcttacattctattaacggtctccgaaatcatccaagatgaagccagtactaagagtactttggaaaacatcaaatcggcctttgatattctgctacaaaatgaacagacgtatccactaatttacgacacaaagttcaacggtttggtcagttcaggagattggggttccaccagcacgcaatacgattttggtaacacttattacaatgaccatcatttccattatggttacattattcatgcagctgctgtcatcggctatgttgactctaaactgaatggtacttgggctgccgacaataaagattgggtcaattcattggtaagagatgtcgcaaatccatctgaaaaagatgaatactttgcacaatcgagaatgtttgattggttcaacggtcattcatgggcagctggactttatgaaaacggtaacggtaagaacgaagaaagtagtagtgaagattacaattttgcctatgctatgaagtaa

SEQ ID NO: 81169 - DNA, 717 bp, Saccharomyces pastorianus
atgcaagctgctaatagtattccacatgacccaccggaaatcagtagtctggagacggaattgatttgcttaacaacgaacacaaaagattgcaaaccagtgaggttccacagtgatttacttttaaagaagcacaaatacaatgaaattaagaaaatatttaaggaaattttggaaaacattgaagcatatcgcgatgagttcactaaaaatcaaacaaaaataaacttacttcttgccgatgacgcaagagctagcctgcgtaatagatcgctcgatttttctgatttaatgccttcgagtataattaaggacgtacaggttttagccaatatggaagccaatgttgttgtcatgaaaaatgcgttgaaaacgaagttggttggagagaaaagtgtgcctgttacttcttctcctatatccagcataattcctcgaacttctaggaataaaaaaacctccccatcaaactatcaccattcggtactttcacatcggaaatcaaatgaatggaatcaggtcagttcaactgagtataagagaacactgttattgaatataaaatataatgatgattttaaagctaccatagtgccaagttttgaaagttgtttatgctcgaggtcatatttcctccgcgtaaaacttcattttgataaaggtgttggatctgctgaaattgatatcccagttcaagttaaaaactcttttatttga

SEQ ID NO: 81170 - DNA, 4143 bp, Saccharomyces pastorianus
atggatttctatactgttaaagacggcgatacggaattgaggtgtcctattcccgacacttttgatgcgtcagctataatcaaatcttatgttaaagaagcttctgaacaagggattcatcttcgtaaggcaggtgtagccatggaatgcgtttcagtagaaggtttggattcttcttttttggagggccaaacctttggcgatattttgtgtttaccacggacaattatcaagggtatccgtgagcggaagaatcgcaataagatgaagatcattttgaagaatgtcagtttgctggctaaaccaggagagatggtccttgtcctaggaagaccaggcgctggctgtacatcatttttaaagagcgctgctggtgagaccagtcagtttgcaggtggtgtaacaacaggacatatatcgtacgatggtatccctcagaaagaaatgatgcaacattacaagccagatgtaatctataatggtgagcaagatgttcatttcccacatttgacagtaaaacaaactctagattttgctatttcctgtaagatgcccgcaaaaagagtcaataatgtaacgaaagaagagtatattactgccaatagagaattctatgctaaaatttttggtttgacgcatactttcgataccaaagttggtaacgatttcatcagcggtgtatctggaggtgagcgtaaacgcgtttccattgctgaagcattagcagcgaaaggttcaatttactgctgggataatgctacaagaggtcttgactcttctaccgcgctagaatttgcacgagctattcgtactatgacaaatctgttaggtacaacggcccttgttacggtttaccaagccagtgaaaacatttatgaaacttttgataaagtcactgttctatacgctggaagacaaatattttgcggcaaaactactgaagcaaaagattattttgaaaacatgggttacttgtgtccaccgagacaatcgactgctgaatatttgaccgcaattactgatcctaatggtctgcacgaaataaagcctggctttgagtatcaagtacctcataccgctgatgaattcgaaaaatactggcttgattccccagaatatgcccgcctaaaaggtgaaattcagaagtacaaacatgaagtgaatactgaatggaccaaaaaaacatacaatgagtctatggcacaagaaaagtcgaaaggtacaagaaaaaaatcttattatacggtctcttattgggagcaaattagactttgcactattagaggttttctaaggatttacggtgataagtcatacaccgttatcaacacatgcgctgctatagcacaggcttttatcactgggtcattgttctaccaagcaccttcttcaactctaggggccttttctagaagtggcgttctgtttttttccctcttatattattctttgatgggtttagctaatattagtttcgagcacaggccaatattgcaaaaacacaaggtctattcactataccatccctcagctgaagcgttagcaagtacgatttcttcttttccattcagaatgattggtctaacatttttcataatcatcctgtacttcttagccggtttgcatagaagcgccggtgctttttttactatgtatttgtttttgacaatgtgttcagaagctattacaagtttgtttcagatggtttcatctttatgcgatacattgtcccaggccaactccattgccggtgttgtgatgttatctattgccatgtattcgacgtacatgatacaattaccttcaatgcatccatggtttaagtggatttcgtacattctacccattacatatgcatttgaatcgatgttaaatgcagaatttcatggaagacatatggattgtggtggcactttggttccttctggacctgggtttgaaaacatcttgccagaaaatcaagtgtgtgcttttgttggttcaaggcctggccaatcttgggtcctaggtgatgattatttgagggcccaatatcaatatgagtacaaaaatacttggagaaacttcggcatcatgtggtgtttcttaattggctacatcgtcttgagggcggttttcactgagtacaaaagtcctgtcaaaagtggtggtgatgctctggtcgtcaagaagggcacaaagaatgctatacaaagatcatggagcagcaaaaatgacgaagagaaccttaatgcctctatagcaacacaggatatgaaagagatagcttcaagtaacgacgatagcacaagtgcagactttgaaggtttggaatctaccggggtgtttatttggaaaaatgtttctttcacaattcctcattctagcggacaacgtaaacttctggacagcgtaagcggttactgtgttcctggtactttgacagcattaataggtgagtccggcgctggtaagaccacattattaaacactttggctcaaaggaacgtgggaacgattactggtgatatgttagttgatggtctcccaatggacgctagtttcaaaaggcgtaccggttatgttcaacagcaagatcttcatgttgctgaacttactgtcaaagaatcgctacaatttagtgctcgtatgcgtcggccacagtctattcctgacgctgaaaagatggaatatgttgaaaaaattatatctattcttgaaatgcaggagttctcagaagctcttgtcggcgaaattggttacggcttgaatgttgaacagagaaagaaactatcaattggcgttgagctagttggcaagccggatctgttattgtttttggacgaaccgacctctggcttggattcccaatccgcgtgggccgtcgtcaaaatgttaaaaagattagctctagcaggtcaatcaattttatgtactattcatcaaccatcagctactctttttgaacagtttgacagattattgcttttgggaaaaggcggtcaaacaatttattttggtgaaataggtaaaaattcaagttctgtcattaagtatttcgaaaagaacggagccaggaaatgtcaacaaaatgaaaatccggcagagtatattttagaagccataggagctggggccaccgcttctgttcaacagaactggcctgatatatggcaaaaatctcacgagtatgcaaacattaacaaaaaaataaatgacatgattaaggacttatcttctacaactttgcataaaacagctacaagggcctctaagtatgcaacatcgtattcctaccaattccatcatgtgctgaaaagatccagtttaacattttggagaaacttgaactacatcatggccaaaatgatgttattgatgatcagtggcttgttcattggttttacctttttccatgtgggtgtaaatgctattggattacaaaatagcttatttgcctgtttcatggctatcgttatatcagctcctgcaacaaaccaaatacaggagcgtgctaccgttgctaaggagctatatgaagttcgtgagtccaaatctaatatgtttcattggtctttacttttgattacccattatttaaatgaattgccttaccatttattgttttcaacaatttttttcgtttcattatatttccctctgggtgtctttaccgaagcctctaggtcaagtgttttttatctgaactatgccatactttttcaactttactatattggtcttgctttaatgattctgtacatgtctccaaatctacaatctgccaatgttattgtaggttttatactttcgtttttgctctctttctgcggtgctgtccaacctgcctctttaatgcctggtttctggacattcatgtggaaactatccccttacacgtattttttgcaaaatttagttggattattgatgcatgacaaacccgtaagatgttcaaagaaagagttgtctcttttcaaccccccggtaggccaaacatgtggtgaatttaccaaaccgttttttgaatttgggactgggtatattgcaaatccagatgcaacagcagattgcgcctattgtcagtacaaagtaggtgatgaatacttggcgcgcataaatgctagctttagttacttatggagaaacttcggtttcatttag

SEQ ID NO: 81171 - DNA, 336 bp, Saccharomyces pastorianus
attaacgctgaagacgaatccaaggaccccaactcggttttgaacttctggaagaaggccttgagatttagaaaggcacacaaggatattactgtatatggatatgattttgagtttattgatttggacaataagaaactgttcagcttcacaaagaaatacgacaacaaaacattgtttgctgctttgaacttcagctctgattcgatcgacttcacgattccaaacaatagctcatcgtttaagttggaattcggaaactacccaagaagtgaagttgatgcgtcttccagaacattgaagccatgggagggcagaatttacatatctgaatga

SEQ ID NO: 81172 - DNA, 564 bp, Saccharomyces pastorianus
atgttgaatgcagcttttaaggataccgctgaaatcaccgcttatggtaaagatagacttttgaactatggtgtcgatgacgtttactacaaaagatggtttggtaacggtagtattttcaccgtcatgggtgtctttgagcaattgatggaggcttccaagggtgccatgctcatgagatgtgatgatattgatggcttgtgtgcagctaatccaaactattacgctggtcatcaccgtcaatctgctccagctgaaactgttatttgtgattacttctacacttccaaaaagccactatcaacaatttgtttcgaaggtactattgtcgatgtcggtccaaaacattatgcaggtattgatatgttacatcgttacttgcacgtccctaccatgagtatggatggatatgttggcgagtacgcggaaactcttgaagaagttgtggactacgcccagaacaatgctacttacgcagttagaaacaccgacaactatctttactatctcgctgacgtttacagtgcttctgttatacctggtggctgtctaggtaaattgtaa

SEQ ID NO: 81173 - DNA, 117 bp, Saccharomyces pastorianus
atgaagttctcttccggcaaatctatcatctttgcaactattgcttctctagctttgagtgctcctgtcacttacgacaccaactctactgctgagttacaatctccttcatcttaa

SEQ ID NO: 81174 - DNA, 585 bp, Saccharomyces pastorianus
atggggtattatgacatcgatgatgtgctggcagacgcgacggactttccctgtaagtttcaatatgatatcccgggtttaggctacctggagaacaatccaggacgacctatgtctaaaaacacgaagctaaatctaccactgtggttggcaaggatcctggcaattgtaggtggtgacgacgctctggtagatgaagagcccatgccctttgttgaacttttgccgccagacatgttttctacgagggtgatgaacgcgatcaagacagatcctgtggctctggacttgcattctataaattcgcattttttcagtttggccataaaatggataacgttgtttagtgagaaggaactggccaatgtggtcagcgagttgcttctacaacgggcgcaggaactcaatcatcattctagtagtttggcagtagacattaatgctgattccgttgggaagaattcagcaaacactaatatatcaacgagtactttcttgttaaaactcgacgaaatggaaaaggacatatataagaaatctcacgagtcatataaggacaccaagaagtggatgtttcaaaaataa

SEQ ID NO: 81175 - DNA, 1761 bp, Saccharomyces pastorianus
atggaattcattaaaaaagaaattccgttggaagtgctcaataatttggcatgttaccacttcattaacggtgactttataaaggctgatgatctctttaagcaagcaaaggcaaaagtgagtgataaagatgaaagtgtcaatattacacttgaatataacatagctagaactaatgagaaaaacgactgtgaaaaatcagaatctatatattcccaggtgacgtctttacatccagcttacattgcggcaagaataagaaatctatatctcaagtttgcacagtctaagatagaagattcagatatgagtacagaaatgaataagctattagatttgaacaagtctgatctggagattcgttcattttatgcttggtacttgaaaaacagcaaggaaagaaaaaacaatgaaaagagtacgacccataacaaggaaactttggtaaagtataattctcacgatgcatatgccttaatttctctagctaatctatatgtgacaattgccagagacggtaaaaagtccaggaatccaaaggaacaggaaaaatcaaagcattcttatttgaaagccatccagttgtatcaaaaaattctacaagttgatccatttaatattttcgctgctcaaggtcttgccataatttttgcagaaagcaaaagattgggaccagccctagaaattttaaggaaggtaagagattctttagacaatgaagatgttcaactgaaccttgcccattgttatctggaaatgcgtgaatatggtaaggcgatcgaaaattatgaattagttctaaaaaaatttgacaatgaaaagacaagaccacatattttgaacctattaggtagagcttggtacgcacgtgccattaaggaaaggtctgtgaatttttatcaaaaagccttggaaaatgccaaaactgctttggatcttttcgtgaaggagtcttctaagagcaagttcattcatagtgttaagtttaatatagctttgttgcattttcaaatagcagagacattaagaagatcaaatcccaaatttaggacggttcagcaaatcaaggattccctggaaggcttaaaagagggtctagaactatttagagaattgaacgacctaaaagaattcaatatgattcctaaggaagaactagaacaacgtatacaattgggtgaaactactatgaaaagtgcattagaacgttccttgaatgagcaagaagaatttgagaaggaacaaagcgccaaaattgatgaagcacgtaaaattctggaagaaaatgaattaaaagagcaagaaaggatgaaacaggaggaggaagccaggcgtttgaagttagaaaaacaggcagaggagtataggaaactacaagatgaggcacaaaagttaatccaggagcgagaagccatggccataagtgaacataatgttaaagatgattcagatctgtctgataaagacaatgaatatgacgaagaaaagccaagacaaaaaagaaagaggtcaacaaaaactaaaaatagcggtgaatctaagagaaggaaagctgctaaaaaaactctttccgacagcgacgaggatgacgatgatgtggtgaaaaagccttctcacaataagggcaaaaaatctcaactatcgaatgaatttattgaagatagtgatgaggaagaagctcaaatgagcggttcggaacaaaataaaaacgatgacaacgacgaaaacaatgataatgatgataacgacggattgttctaa

SEQ ID NO: 81176 - DNA, 171 bp, Saccharomyces pastorianus
atgtcgaactatttctctttaaagttctctgccactggagaaagacatttagtagcaaccaacattgcacatattgaagcccatacgtctattgtgggtttcatcttctccctcttcacacctttaaaagaaactattatcactaaatacgaaatgttagttagaacttaa

SEQ ID NO: 81177 - DNA, 153 bp, Saccharomyces pastorianus
atggcctttggctggcattcaatgcatggttccattatatggttcctgcaaatagcacagttgtcaacagctatatcccatgaccaaaacgccactgcggtccatttcttaatttcaaatctcttctttttggtttccactggcgcactttga

SEQ ID NO: 81178 - DNA, 1203 bp, Saccharomyces pastorianus
atgaggacactaaaaaacaaacaaaaaaaaaaagaaaatactacatacattttgcttttagcactaacatacctaatgcttaaagtgaataacgttttcgggagcaaccccaatagaatgacaaaattggaggatgaacactactttatcgatgacatcgtatcgattaaaaacagacaaaagagcaaaatgtacgtcagggaagggaaacggataggccacggctcgtttggaactgtgacacagtcctatctgtccagcaatagtactgaatggttaggaccttatgccataaaaagagtagtgaaatctcccaaagtacaatctttggaattggagatcttacagaatatcaaacatccaaatctggttactttagagttcttcttcgagagtcactgtactaccaaggacggtgggcacttatatcagaaaaactttgttatggaatacattcctcaaaccttaagttctgaaattcatgaatattttgacaatggttctaagatgcctacaaaacatatcaagttgtacacattccaaatacttcgagcacttctgaccttacattccatgagtatatgccatggcgatctgaaaccgagcaatatattgattataccaagtagcggtattgctaaagtatgtgactttggctcggcacagcgactggatgataatacagaattgaagacctatttttgctcgaggttttatagagcacctgaacttctcctaaattcgaaggattatacaactcaaatagatatatggtcgcttggttgtataataggcgaaatgataaaaggccagccactttttaaaggcgatagcgctaactcacaactggaggagatagctaaactattaggccgctttcctaaaagttctataaaaaattctcaagagttacaggatagcttaaatgaccaaaaattcaagaagtttatgcattggtttccctctatagaattttttgatgtggaattcttgctaaaggtgttgacgtatgatgccactgaaaggtgcgatgctagacaattgatggctcacgaattttttgacgcgttaagaaatgaaacctattttttgccaagaggttcgagtatgccggttcacctaccagacctctttaattttagtgcatcggagaaaagggctcttggagagtattacaacttgattgtaccatctctggattag

SEQ ID NO: 81179 - DNA, 528 bp, Saccharomyces pastorianus
atgatgggcggttacaacccaatgatgaatccgcaagcaatgacagattactatcaaaagatgcaagaatattaccaacaaatgcaaaagcaaactggtatggattatactcaaatgtaccaacaacaaatgcagcaaatggcaatgatgatgccagggtttgccatgccacctaatgcaatgactttaaaccaaccacagcaagattcaaatgccactcaaggttccccagcaccttctgattccgataataataaatccaatgacgtccaaactattggtaatacatcaaacactgactctggttccccgccattgaatttacctaatggtccaaagggcccatcacaatacaatgatgaccacaatagcggttatggctacaactgtgatcgcggtgatcgtgatcgtaacgatcgtgaccgcgattacaatcaccgtagtggtggaaaccatagaagaaacggccgtggtggtcgcggtggatacaatagacgtaataatggctaccatccatataatagataa

SEQ ID NO: 81180 - DNA, 1080 bp, Saccharomyces pastorianus
atgagctctgacgaagaagatttcaacgacatctacggcgatgataagcctaccactactgaagaagtcaaaaaagaagaagaacaaaataaggctggcagtggtacctcgcaattagatcaactagccgcactacaagcattatcttctagcttgaacaaactaaataatccaaatagtaacaacagtagtagtaataatagtaaccaagacacatcttctagtaagcaagatggcactgcgaatgacaaggaaggttccaatgaagacactaagaatgaaaaaaaacaagaaagcgctacatcagcaaatgccaatgccaacgctagttctgcaggaccttctggcttaccttgggaacaacttcaacaaaccatgtcacaattccagcaaccatcttctcaatcaccacctcaacagcaagtaactcaaaccaaagaggaacgttcgaaagcagatttgtctaaagaaagttgcaagatgttcattggtggtctgaattgggacactacggaagataatcttcgcgaatattttggtaagtatggtaccgtcactgatttgaaaatcatgaaagaccctgcaacaggtagatctagagggttcggtttcttatcttttgaaaaaccttctagtgttgatgaagtggtaaagacacaacatatcctcgatggtaaagttatcgacccaaaaagagctatcccaagagacgagcaagataaaaccggtaaaatctttgttggtggtattggtcctgatatgagaccaaaggaatttgaagaatttttttctcagtggggtacgattatcgatgctcaactgatgttagataaggataccggtcaatcaagaggttttggttttgtgacgtatgactccgctgacgccgttgacagagtttgtcagaataaattcatcgatttcaaagatcgcaagatcgaaatcaagagagctgagccaagacatatgcaacaaaaatcatcaaacaatggtggtaacaatggtggaaacaacatgaatcgtcgtggcggtaacttcggtaatcaaggcgatttcaaccaaatgtatcaaaccctatga

SEQ ID NO: 81181 - DNA, 261 bp, Saccharomyces pastorianus
atgaaaaccgaaattaccgtcgaccatactgaagaagatagccataaccatcaaaataacaacgatagacctgcaggtagcgtaatccagcaagatggttctagtggcatggagatagaaaatggaaaagatgtcaaaatcgtttatatggcaaacaattggattatcactgttattgctataattgtgtggcttttcttatctttactgaacgtttatgccattgttcaattaggcatgtctcatggtgatatcagttaa

SEQ ID NO: 81182 - DNA, 1329 bp, Saccharomyces pastorianus
atggtgaacgttggtccttcccatgctgcagttgctgtggatgctagcgaagcccgcaaaagaaatatttcagaagaagtattcgaactgagggataagaaagattctacagtggtaattgggggtgaagccccggtaagaacttttaccagtagctctagtaaccatgaaagagaggatacgtatgtttctaaaaggcaggtaatgagagatatttttgctaaatacttgaagttcattggtcctggattgatggttagtgtggcttatatcgatcccggtaattactctactgccgtcgatgcaggtgcctctaatcaattttccctactttgtatcattttgttatcaaactttattgccatatttttgcaatgtctgtgtatcaagttgggttccgttacgggactagatctaagtcgagcttgcagagagtatttaccacggtggctcaactggacattgtatttctttgcagaatgtgccgttatagccaccgatatagctgaagtgattggtacagcgattgccttaaatatcctgatcaaagtgccccttccagcgggcgttgccattactgttgtggatgtgtttttgattatgtttacatataaaccgggtgcgtcatcaattaggtttattagaatatttgaatgttttgttgcagtattagttgttggcgtgtgcatttgtttcgcaatagaattggcttatatcccgaagagtacgtccgtcaaacaagtgttcagaggatttgttccatctgcccaaatgtttgaccacaatggtatttataccgctatttccatcttaggtgctactgttatgccacattcgttgtttttgggttccgcattagtgcagccaaggcttttagattatgacgttaaacatggtaattatactgtttcagatgaacaagataaagtgaaaaaatctaaatccactgaagaaattatggaagaaaaatattttaattatagacccacgaacgctgctatcaaatattgcatgaaatattctatggtcgaattaagcataactctcttcaccctagcgcttttcgtcaattgtgccatcctagttgttgcaggctccactctatacaactcaccagaagcagatggggcagatttgtttactattcatgaattattatcaagaaatctggcacccgcagcaggtacaattttcatgctcgcacttttattaagtggtcaatccgcaggtgtagtgtgtactatggcgggtcaaattgtaagtgagggcatattaattggaagttgcagccatggcaaagaagattggccactagatgtatttcgataa

SEQ ID NO: 81183 - DNA, 303 bp, Saccharomyces pastorianus
atgccaccacaagatgccgaaggttggttctacaagcgtgctgcctctgttgccagacacatttacatgagaaaacaagttggtgttggtaaattgaacaaattatacggtggtgccaagagcagaggtgttagaccatacaaacacattgacgcttccggttctatcaacagaaaggttttgcaagctttggaaaagattggtatcgtcgaaatctctccaaagggtggtagaagaatctctgaaaacggtcaaagagatttggatcgtattgccgctcaaactttggaagaagacgaataa

SEQ ID NO: 81184 - DNA, 99 bp, Saccharomyces pastorianus; identical to SEQ ID NO: 80986

SEQ ID NO: 81185 - DNA, 72 bp, Saccharomyces pastorianus
atggcggcaggtgcggcatgttatataatatcaaggcatatttgcgttggtgcgaagctttgtaagttttaa

SEQ ID NO: 81186 - DNA, 1407 bp, Saccharomyces pastorianus
atgttgaacattcccataattgctaactccaagaggttcctgttctcaaaggatcacgaagcgcaatctacgagagatcacgatgtggagctggagacaagggagggcccaagttcaggatataatccaaacttcaatgcagaggacgcgattttgaaaaagaacagcgatcaagtagatcttgacgttaataagttaacgaacgtcacctcaagagttttaaacaccccagaggcctctttgatttatgatgatgacagagagttcccagatggtgggttaaaagcatggctggtagtatttggtgcgtttatgggactggtcccggtttttggcttaatcaactccttaggggctattgaatcatatatctctaaacatcaattggcaaatatttcttcttcaacaatatcttggattttttccctatacttagctatcagctttttaagctgtatattatccggtggctattttgatagaaatggtagtattggtttgatgtgcacaggtacagtcatatatgctggaggactattcgcattggcaaattgtaagtccgtatggcagtttattttggcattttctgtgtgctctagacttgggacgggaattttaatgactcctctgataggaactgttgcaacctggtttttaaaaagaaggggtatagccacatctataagtaccatggggggttcaatagggggtatagttttccctattatgctgagaaagttatataaagaagtgggctttcaatgggccattagaatcctatcattcatttgtttaacatgcctcatttgtgcttcagttttggctagagaaagaactaaaccagtcgttcaaccattcaaatccaaggcggaagtagcaaagtggtacatttcctctgtgttcaattggagatattttttggaaggaaaattcttgttcgtcgcaataggcgcttcttttgcagaaagctccctaacttcatgcgctacatatttagcatcttattctatgacaagaggaaacacagaaaatgttgcttataccatgatcactgcttcgaatgctgttggtatacttggaaggtatataccaggctattttgcggataagttcatcgggagattcaatgtagaaattatcaccatttcaatggctgccttatttaattttgtcatgtggctgccatttggcggtaatacaaaggtactttgggcgtacgtttgtttgtgggggttttcgacgggttctatcctatcactgacacccgtttgcatcgggcagatatctaaaactactgattttggtaaacgttatgcaacggtatatctattgcaagcgttggtaacgattccggttttacctatcggcggtaccttaatcggtaaagggtacagttgcaaattataa

SEQ ID NO: 81187 - DNA, 531 bp, Saccharomyces pastorianus
atgttaccaattctgggtgtcccgttgcctactttgaagtataaatataagcagaatcgtgccaagaagttaaaactgcaccaagatcagcaaggtcaagacaacgccgccgtccacttaaccttaaagaaaattcaagctcccagttctccatcgagcatgatattcagcccatcagatactatcttacaaataaaacagtacttgatcagcgaggaaaaggcctcccacataagcgagataaaactgcttttgaagggcaaagtcctccacgataacctgttcttatcggatttgaaggtcacgcctgccaattccacaatcacagtcatgattaagccgaatccgactatatctaaggaacccgaagccgagaaatccactaactcccctgttcctgctcctccacaggacctcactgtgccctgggatgacatcgaggctcttctgaagaacaatttcgagaacgatcaggctgcggttaggcaagtcatggagcgtctacaaaaaggctggtctctggccaaataa

SEQ ID NO: 81188 - DNA, 153 bp, Saccharomyces pastorianus
atgagcacatccgccagcggtccagaacacgagttcgttagtaaattcttgaccttagccactttaactgaaccgaagctaccaaaaagctatactaaacctctgaaagatgttaccaattctgggtgtcccgttgcctactttgaagtataa

SEQ ID NO: 81189 - DNA, 171 bp, Saccharomyces pastorianus
atggaatctatatttctatgtaccaatattacgattattcctcattccatttcatatgtttcattatcctatcacattatcgatccttgcatttcagcttcctctaacttcggtgacagcttctataataacttatgtcactatctaacaccgtatatgataatatattga

SEQ ID NO: 81190 - DNA, 660 bp, Saccharomyces pastorianus
atgcctgcaggtcaattactaaagatgtgtattatacctagaatttgttcctttgacaaatccaactccaaaacctacaagctaattcaggaatatgttaatcgctttgaaaccgttttaacaaaatttggcccagaaaaagatttcaccaaagtttacgctaactggtcaaaactcattgaatcgtttaatgagcttattttacatgacctgttggtgaaatggcaacaatggtctgaattaactcagccaaatgccacggtccatcagaacattccgaatgttctcagggaactcgtaataaaattaacacaaaggtattttacattccaaccttcatacaattgttcgattgatgaattcacaacaattttacttaataaaaatgctttgagtctcttggacgttttcagaaaacccagaaaatataaactgaattttggtttatggctagattgtcaaaacggtattttaatttttacaaatggtattgtgcagatggcagatgaaatcacaagtgagagggtgaaatcctttgtcaggccagcacatctcttggtattggaagaccattcaaatgatgaagcagtcaagaaactaatgtttttcactttttcggcgatattacaatgctttacagatgagattctgaattgttaa

SEQ ID NO: 81191 - DNA, 594 bp, Saccharomyces pastorianus
atgactcaaacgttatacaccgctgaaagaactatgtctcataatagattgaaaactcataaatgtacggtggatgatatccatcgcattgttaaggaaaatgacaaacaacgctttcatataaaaacattaggagcggacgaagaatggatctgtgctactcagggacattcaatcaaatcgattcagccatcagatgaggttctcgtaccaattactgaagcgtcgcagttaccacaggaactaattcatggaacaaatcttcaatctgtcataaagattattgaatccggagcaatatcaccaatgagtagaaatcatgtccatttatcgccagggatgttgcacgcgaagggagttattagtggaatgcgttcttcaagtaacgtctatattttcatcgactgccattctccattattctttcatactttgaaaatgttcaggtcgctcaataatgtttacttaagcagcagtattcccgttgaattgatccaaaaagttgtagttaaaggaaacttgaaagatgaggagaagttagatactttaagaagaattttacacgaaagaaacataccgctcgaaaagatataa

SEQ ID NO: 81192 - DNA, 1236 bp, Saccharomyces pastorianus
atgagccaatacaatgtcgatacgcaagcaaccgctataatgagcgatatgcaaaagcaatacgactcgcaacagatgacatcaccatttgtaaacgaaggcttgcatttcgatccaaatggtgaagtttcacacgtaataaaagcaatttttaaagaaattggttataaatacgatgatttcagtgatattcctgtttttcaattaatgcaagaaatgtatcaactagtgaagaagaattccagcgctagaagaacaaagataactgactatgcctctaaacttaaagaaaaagaagcgcaattaaaaagtcaaaatgacaaaattttgaagttagaaacaacaaacaaggcctacaaaactaaatacaaggaggtctctctggaaaataagaaaataaaagaggctttcaaagaactagacaatgagtcatacaatcacgatgaggaattactaaaaaaatacaaatatactagggaaaccttagatagggtcaatagagaacagcaattaatcattgatcaaaacgagtttttgaagaaaagtgtcaatgaactacaaaatgaggttaatgctaccaacttcaagttctctttatttaaagaaaaatatgcaaaattagctgatagcattactgaattgaatacctctacgaaaaaaagagaggccctgggagaaaacttaacttttgaatgcaatgaattaaaagaaatatgtttgaaatacaaaaaaaacatcgaaaatatatcaaataccaataagaatttacaaaattcgttcaaaaatgaaaggaaaaaagttttagatttgagaaatgagagaaatttgttgaaaaaggaaatactgttgattgagtgtcatggttcatattctctactccttgtatctaatattctgacatgttatcggttcttactgccaagtgatactattattgaaactgaaagcttaattaaggagctactcaacatgaataattcactttcgaaccatgtgtcttcttctgacgagcctccagcggagtactcgaaaaggttagaattaaaatgtgtagagtttgaggaaaagttactttatttctatcaagaacttgtgacgaagaaaattatagacgtcatttacaagtactttattaattattacaagaaaagtaggcaaactgaccaaaaatccaatcagaattccagcactccgtataaacaaagccaaagacaagttccgcactccatcaagtga

SEQ ID NO: 81193 - DNA, 480 bp, Saccharomyces pastorianus
atggataatattttaaaggcatcaaatatggaagggacttcaacaatgacagttacctcgcgtagttctgaagactctagttgtatctcaaatcatgaacaagataccgatacacataaggacggcgacacaagtggtctggaaaacagtaaaatttcgaagagaaagtggatgaaagagtttttcaaactttccaaatctccagcttccaaaagcaaccggagtataggttccatgaaaagtaaccagagcctcgtttcaatgaaaagtagtgacgatggcaacaattataaaaatgattactcttctatctgtggtaacagccttccatctgcaggcttgagtcgttcgaatagtgtgaaagaattaaaattagattcaactggaagtcagagatcaaaaaataatgttgccatattagcacgttcttctacaacatctcagacaacgtgctcttcttcttcatcatcatcttcttag

SEQ ID NO: 81194 - DNA, 1476 bp, Saccharomyces pastorianus
atggcagagactatagcattagaagaacaaccattgttgcagtcagcttctgataaagcaatagatgactctttagaactcgtgcaaccattgcctgcatccaaaaagccatattttagaacgcagagctctggctccttgttaagtagaaagttcaaatcatttaggtctacttctggtcgtgccacaacagggttaaacactccagaggagcccaaaggaattctgccagatactccgcacgttattaatgacgactcggccttccctcaagctatcaatacaactcagcagtctaaggatgcaactccagaatctatgttatggaatcatcctttcaagctagagcaaaaactatccgctatttcatcacaagatttaccgagtaacaacactcataacaaactaagatcatctgaaaactcgagggcgaattccacgtcaaccttggaaggcaacgaaaagaagaagcctgagttcatgcccgatttactggagcaaattcaagagtcttacaagcaacaatatatgaatacttcttctctaaaatacctgacgaagaggcttccagtcaccaagataattaaggctagttcatgtccaattattagagtaaaatctgccacgttagttttggtccatctttggaaggaaggctcatgtggtggcagggtattattctccaccctattaccgccatctcgtgtcgataatgaaaccgtcagcggcggcaaagaaaattccaaaccgccagatgatgaagaattagaccttcaagctgtagatgatgacaaattaggaaaatatgatcttattgatggcgagttaggaagcagactcaacagaaggcaaatttttgagcaattggaggaaaatttgccctactggtttgcaaaagccttatttagagatattaagacggtggaagagcaaccaaagttgaacttcttaatcatgccatggtcttctgttggtgggagtgaggcagctggcaatgaaaacaagaagaagtttattagtgcatcagataccacagaatcttctggtaacgatagtagcgatagcagccttggaaatggtaatgaagccgtttccccatcaacacagcaacagttccataatatgctaaagtttggccgtccgaagaccagcgagcaggagttaaaccccacagatttaccgagaatctctgaggcgaatgtcaagctggttgcgcctggaatgattagggtgaaaaaaattaaactttacgtcgctgacagatttgaaacgaaaactcctgaaatgaaagcaaaaatggaacctagtctttggttggatctactatgtaggggccaagtgcttgataacgatatgactttaaataccgttagaacactttactggaaatctcagggtgacatagttctagaatacagaagaaaagtacataattcaccgctagttcatgaggttaacgggaatgaggggaaataa

SEQ ID NO: 81195 - DNA, 1584 bp, Saccharomyces pastorianus
atgaatcagttgacagtgagttatggcctaatttccccagattactgcacttcccaagatgcacacatcttaccgataacaaagattctgtacccggatatacctggtaaaaactattttcttacttcaggaagggatggttccataattttgcacaagaacacacagctctcgaacgagcctgggactgttgcaactaccataaaaaacgatgcgataagaatgcaagttcatagcgattgggcaagcgatctaatacatgttaatatgaaaaattcagacccatctgcaggggacacattcatatcagtaagtcacgatttttcgatagtattaattagtgtgaatgcgcagttaactacctgggataagaaaataatcggtgaccacgacgattacatcaagtgcatagtgcccatacattatgaaatgtcaaatgattatgaattggaagaacaagagggtggtcctgataatgtacacgatggaataaataatggcattgttgttgatgaacagaacaactttctttttgtgacaggtggtctagatagaaaaatcaagctttggtgcctgagcagcgggccagaaaaaatggctacgctactacacacatttgataatgcacaatcaaacgacacaggctcaatatactccatgagtcccatcatcccaaaatacagttttgatgacaatcaaacgtctcgtccctttgattttgttgccggagactgtaatggtgatttgattttttattcgtgtaaatatcgtaaggaggtgataagaattcaaaacgcccacagaacaaatataaaagtagtaagaactcttgatgactccacacgactaatcagtaccagctcagatggtgtaataaatgtatgggacttgaattgtaggcatgatcagactactggtgcccttcagcttcccaaaaaaattggatcttggtcctgggattcttccatatggtgtgtccaaggaacgagccttgataagttgtattttggtgactctcagggcaatgttatgagagcaaacttatccagttatgaagatgctaaacttacaagaattttcaagcctgatcatcaccaccatcatcatcatcaccatgaacacgaagagcaaaatatatcaactacagatgcgaaagtaaaaaaatatggtggtatccttgatattgcccttttacctaatgaaaaattgttgttttctttttgtactgactcaaatctaaatgtgctcgatttaactaataaccatttcagtgtcaacgaaggtgggttcgcactgaccagaagctcactgctaaccaacaggaggcatgtaataacggaaaacactaaaggccaaatgcagagatgggatatcgtttcatgtgagcttttgaatacttttgattcatcagaaggttcgtttgatgatatcgtaatgaaatacacctcaaaggaaattctatctcattggtgtactgtttccgttaaggtcggtatgctgttcgtaaaaataaacccaaaatttctgaaaactgaaatttatggatccgcgctaaaggattatcaggttgtgaacaaatattga

SEQ ID NO: 81196 - DNA, 2235 bp, Saccharomyces pastorianus
atgacccgaaacaagaccctaaagcaacttgacaagttgtacaataacggtaccaagccaaaggacgatttagagacatacgtgccacataaaaagcgccctaaacatcgtttgggaaaattgccgctttgtctaggcggcaaaaaagttaatacgctgtcttattctagtaaaaggattggggaattgaacgaagagattcatgaaaaacaagccgattgggccagtaatgataggcaacctgcctgctttatccagttcgagactcaattggaagcgcaaagatgctaccaatctgtggaagcaatcttgggtaagaaaaattttggtaagcgtcttattggctactcgccagaagacgttaactggggcagcatgcgtctcggttcaaaggagagacactccaggagagccgtggcaaatacaatcatggtgttattgattatcttttgggctttccccgttgctgtagttggtatcatctccaacgtcaatttccttaccgataaagttcccttcttacgtttcatcaacaacatgcccaccttcctgatgggtgtcattactggtttgttgcctactattgcgttggttgttttgatgtccctagtgccaccttttatcgtaatgttggggaaacttagtggttgcatcactaggcaagaaacggatctatactgccaagcatggtattacgctttcactgtgattcaaatctttttagttgtcaccgctacctcttctgcatcttccaccgttgactcgattattgacagaccaagatccgccatgacactattggcaaataacttgcctaaggcatccaacttttatatcatgtacttcctgttgaaaggtttaactggccccacatggacgatcttgcaggcagttaacttgctgctaagtaaagtcctaggtagagtgttggattctaccccaaggcaaaaatggaaccgctacaatactttggccacgccgcgcatgggcattgtttacccaggcattgaaattctggtttgcatttatatctgttactcgattatcgcccctatactgctatttttcagtaccgtaatgttgacgctactttatgtggcgtatttgtacaatttaaactacgtgtttggcttctccttcgatttaaaggggcgcaattatccaagagcacttttccagatttttgtaggaatttacttgagtgaagtatgtctgcttggactgtttatcatggcaaaaacctggggtcctttggtcctggaagtgttttggatcgtggtcactgccctagctcatatatatatgaagaggaaattcataccgctattcgacgcagttcctttaagcgccatcagacatgcaagaggtgagcccggctattcctatcctacatcagacttgggtctccaggaaatcaaggacattgcagatgaaatgaagggcaaatacgaacaagacaatacacacgggattttgacgcccgtgaccaaggatgatttgaaaaaggccaatctgataccagataacgatggcagttcagagaacggtactcctagtaacccctttgagtctggttctgaacgtgcttctctctctggatcgaacgcagagggtgactcgatcaagaaattaaatgatacagttatcaaaaaatcaagcactctctcctcctctaccaaggacaacaacgaatctacttttgttccagagggtgaaaagtttcgcaagtttcactacagcgatgttgaggcattgagaaataagcgcccttatgatgaggatgatcatagtaaacatggacctgaaggtgccgtgccagtaaacgctgacgcgggagtcatttacagtgatccggcagctgtcatgaaagagcctcaggcatttcctccggatgttgtggaaaccaatacttggacaagaagaattctgcaattcttcaacccaagaaggtcgtatccattcgacagtgtcaggatgagattcccacttgttttcaacaccagcatcgaatacgatgaagaatatttgagctctgcctataccgatccatgtgtcagagagaaagatcccattgtgtggtgctgtaaggatccgttaggagtttcaaaacagcaaattcaagaggctaggtctaacggcttagatgtaagagatgatttcacaaggtacgatgaaaaaggaaaagtcatattcacttacaaccctcctgattatgaacctgaggctaaaaaatga

SEQ ID NO: 81197 - DNA, 606 bp, Saccharomyces pastorianus
atggctgacagttcttcgacttcagcgttcatttcaaccctgattatctacggtcttaccgccctcgtgtttgtctggctctttttgctattgcggcccaagaatagaagagtatacgagccacggtctcttaaggacattcagactattccggaggaagagagaacggaaccagttcctgaaggctacttcgggtgggttgaatatctactctcgaaaccgcactcgtttctcatccagcacacaagcgtggacggctattttctgttaagatatatcggtatcgtgggttcactttcgtttgtgggctgtttgcttcttttaccgatattgcttcccgtgaacgctaccaacggtaacaaccttcaaggctttgaactgctatcattttcaaatgttaccaacaagaataggttttacgcgcacgttttcctctcgtggatcttttttggcctgttcatctatgtcatctacaaggagctgtattactacgtcgtgtttagacatgctatgcagacaacaccactctatgacggactgctgtcttctaggacggttatcgtcacagaattgcacaagaggggatcctctagagtcgacctgcag

SEQ ID NO: 81198 - DNA, 579 bp, Saccharomyces pastorianus
atgttcctattgtattttgttttaaactgtaatcaatttgaggaacttttaggtgacgttgattttgaaggagaaatggttaacattgaaaacaagaacaccattcctaaaattttgttggagtggttgagttcggataacgaaaatgcaaacattaccctctatcaaggtgcttttctgttcaaatgttcagttacggatgaaccaagtagatttaggtttgcgttgattattaggcatctattgacaaagaaacccatttgtgcattgcgtttttacagtgttattcgtaacgaaataagaaaaatatcagcatttgagcaaacttcggattgtgttccacttgctttcgatattttaaacttattagtgacgcattcagagtctaattccttagaaaaacttcacgaagaatccattgaacgtctgaccaaaagaggtttatcaattgtgacttcttctggtatatttgcgaagaattccgacatgatgataccgttagatgtaaaacctgaagatatctatgaacgtaagagaataatgacaatgattttatcaaggatgtcatgttctgcttag

SEQ ID NO: 81199 - DNA, 3288 bp, Saccharomyces pastorianus
atgaggataatgagggagaatgaaggccaaaaagggaaggctaaccagaatttaataggagcagagaagactgaaagagacgaggaagaaacacgaaatttgcaagataaaagtgcaaaaaatactctgatagttgaagaaaatggaacgcttcgttataatccgcttaattcatctgcgtcgaactctcttttaaatgatgacgaccataccagtggaaaacatcacaaaacttcctcaaaggaagactcatatttaaacagttcgatggaaatgcagaagaaatctagtaagagatcgtcgcttcctttcgtgaggatattcaaaagtcgaagggaccactcaaatacttctggaaataaaaatgtcatgaacacaactaatacaagagcaaaatcatctactttgcatccacctggtgctcgccataataagaaaggcagtaaatttgatatgaactttgatttcgatgaaaacttagaagaagaagatgatgacgacgacgatgacgaagaaggtgacgatatacactctcaattttttcagttagatgatgattttgatgctaagggttctggagcaagtccagcccacaaaggcatcaacggcatgtccaacaataaaaacaacacctacacaaataacagaaacagcatcagcattcttgatgatcgagagagttcaaatggcaatataggaagtgcttcaaggttaaaatctcatttccccacaagtcaaaaggggaaaatttttttaactgacaataaaaatgatggacaaaaatctgattcactgaatgccaataaaggtatacatggagatggaagcagcgccagcggtaacggatcggtgagtagggacggtttgacggaaacggaaagcaacaatatttccgatatggaatcttatatcaatgaaaaagatttagatgatttgaattttgatacagtgacctcaaacataaacaaaacagtatctgatttgggaggacatgaatctacaaatgatggaacggcggtcacgaacagggattcaaaagacagccgcagtaatagcaatgaattcaatgcacaaaatcgtgaccgaatcactcctggctcatcatatgggaagtcccttttaggatctgaatattccgaagaacgttattctaataacgactcgtcaaccatggagagcggtgaaatgtctcttgattcagacatgcaaactaatactataccctctcattccataccaatgtctatgcaaaaatatggcatctatcatggcgatgatgactctaccttaaacaatgtcttcgataaagccgtactgactatgaattcatcgcgacacccaaaagaaaggcgcgatactgttatatcaggaaaggagccaacatccttaaccagttctaatagaaaattttctgttagctcgaatttaacttcaacaaggtctcctcttttacgaggacatggaagaacttcatcgacggccagtagtgaacacatgaaagccccaaaggtttctgacagtgtattgcatagggcaaggaagagcacgttgacgttaaagcaggaccactctcaacctagtgttccatcaagtgtccataaaagctcgaaagaggggaacatccttattgagaaaacaaccgattatctagtgtcgaaaccgaaggcctcacagttatcgaatatgttcaacaaaaagaaaaagagaacaaatactaattctgtagatgtgttagaatatttttcatttgtttgcggagataaagtaccaaattatgaatcaatgggtctcgaaatatacattcaagcttccaaaaaatataaaagaaattccttcactaccaaagtccgaaaatcgtctaccatcttcgaagttattggatttgctttatttttgtattctactgagaaaaaaccggacaattttgaagaagatggattgacacttgaagacatttctaatcctaataacttctctttgaaaattgtcgatgaagacggtgaaccttttgaggataactttggtaaactagatagaaaaagcactattcaatcaatttcggacagcgaagttgttttatgtaaggttgatgatgccgagaagtctcaaaatgaaattgaaacacctttaccatttgaaactggtgggggcctaatggatgcttctactttggatgctaacagcagtcaccatacaactgacggaaccatcaaccaactaagtttctacaaacctattataggtaatgaagacgacatcgataagacaaacggttcgaaaatcattgatgtaacagtatatttgtatcctaacgtgaatcccaaatttaactatactaccataagtgttttagtgacctcacatatcaacgatattttggtaaaatattgcaaaatgaaaaatatggatcctaatgaatatgcattaaaagttctaggaaagaactatatactggacttgaatgatacggtattaaggctcgatggtattaataaggtggaactcatctctaaaaaagatgcaagggagttgcatttggaaaaaatgaaacctgacctaaagaagcccgttttgccaacgatccaaagtaatgatctaactccgttaactttggagcctctgaactcttatctcaaagcagatgctggaggggctgtggctgccattcctgaaaacacgaaagttacatccaaagctaagaagatatccacaaagtataagctgggcttggcaaagcagcattcgtcatcaagtgttgctagtggaagtgtttcaacggctggcggtctcgccaatggaaatgggtttttcaagaacaagaattcatccaaatcctctttgcatgggacactgcagtttcataatataaaccgttctcagagtacgatggagcacacgcctgacactccaaatggagttggagataacttccaagatctttttaccggagcgtatcataaatataaggtatggagaaggcagcaaatgtcatttataaacaagcatgaaagaacactagccattgatggcgactacatatacattgtacccccggagggacgtatacattggcatgataatgtaaagactaagtcgttacacattagtcaagtggttcttgtcgaaaaatccaaaagagtccctgagcatttcaaaattttcgtaagaagagaggggcaagatgatatcaaaaggtactactttgaagcagtttcaggtcaagagtgtactgagatcgtgacgcgattacaaaacttattaagcgcttatagaatgaatcataaataa

SEQ ID NO: 81200 - DNA, 354 bp, Saccharomyces pastorianus
atggacacggtgacggtattaaatgaactgcgggctcagtttctacgagtgtgtccggagaaagaccaaatgaaaagaataataaaaccgtacatacccgtagatgaattcaacacagagcagtgcttagattcttctatccgtgaattatatatgaactcagacggcgtaagcctgttgcctgaactagagtctccaccggtatctaaggattttatggaaaactatgcttcattagggaaaatgaggataatgagggagaatgaaggccaaaaagggaaggctaaccagaatttaataggagcagagaagactgaagagacgaggaagaaacgacgaaacattgcacgataa

SEQ ID NO: 81201 - DNA, 1470 bp, Saccharomyces pastorianus
atgtacaccgattcggtttcggaatcatctttgtcgtactatttatcaaagtaccataacaaaccttgttgttcaatcgatttgaatcattacagcggccacattaacatagatatgcttaagagcattatgtctaagtacgatccagaggataaggatttgattcatcattgtaatattctagaattgggacttattggaagcgactcaatcaataactataacaagtttaaggggaccctggaaaaaaaatcggtaacggattattcctcctgttctacattcttattagaaatagtcaaggacaagtgcaagaaaactaatcctgaattgaaagacgtgcttttgtgtataacgatattggaaaattaccaagtcaaggaccctcataacttcgatactatgtgctggctgattgttttatacatgtacctgggtttagttcccgatgcttatttccatttcataaacttaaagattaaaaacgttcaaacagattccctagattacatgatattctcgagattttctactttgttcccgaataaacagagcgatttttactccaagacattccatgaacataataatttatacgatacatcactggctaatttaccaagatatattcaggtggcattcgaaagaaattcatatagcaaaatactaggaatgctcgagatgagggataaactaatgaaatcctatacaagatggaccaaaactttagaaaacttacagttctcacgtttatgcaacgacaagcgcggccacctactacaaaaattacacgaagattggagatctttagaaatgacgcaaagtgtatcattttctgacaatagagacttttccatattagatgaaaattttgcccaatttcttaaccgtggtaaaattttggaatatgctaacttgaatgaagaatcaatttttctaactttgataagagaacttattattgaagctttgccaaatggggagaaaacggaacaaataagtgcgctcttaaaaaaacttccatcaactaaccttgaagagttgttgaataataatttaactgaagtggagtcagcgtcatttctgatttttttcgaaatttacgaaaataacggtaaaaatctacatgatttaatttctaggttgatgaaagtcccaataaatgcaaaacaaaactggatggtatcccatacttacctcactaaaatggcaaccttaaaaacactagacagtttgaagagaatcaaagataaagaaattcaaaaactaatcaaaaactccctgaaggagttgaggggttgttgcgatgatatatttaaaggttattctaaagctttagtacaagcatatgaagaattacaaaaagatgaatgtggcaacttgttaaaagaacttgatgttaaagctgaaaatgtcaagaacattaaaaattcattactaggcatccaaaaaagtgtaagaaatttatga

SEQ ID NO: 81202 - DNA, 612 bp, Saccharomyces pastorianus
atgtccgacaagatacaggaggagatattaggactagtaagcaggtccaacttcaaacaatgctatgcaaaactggggcaattgcaaaaacaatttcccaatgcgttgtacttcaagattttggaaacctatgttaaattcaagcagtcacctggcaagttcgactacaataagctgctagaagaaccatatgtgctgaaagggacaacgattacgggcgacacgcgttccttggagtttttgcacaacttcttcgtagagttagggaagtacgacgaagcattgcacgtgtatgaaagaggaaatttcaaattccctagctacgaattgtcttatcactggtttatgaaagcattggaagattccaattataaccaaatgagcaaagcatctctacagttagctaaatacagtgacagtggaaacctgcctaaaagagcatattatttttggaatgcaatctcgattttagccgtatcaaggtttcaggaaaacactctttcagatcccaagaaaattttgcttctccaggctagcgcgccagtctttgttagacttgaaaccattccaaaatgttcaagagattatagtttattgtttggtgttggatga

SEQ ID NO: 81203 - DNA, 384 bp, Saccharomyces pastorianus
atgacaaatacatttttcgaaaggccaggctttgtcgttaactgcatttccattattttatccattggtactcagatgtcagggttaatgtcactaggcatgtcgagagtattgaagggttttaactatttgaaccctgtagggtatacatctatgatcatcattaatttcgcattcccagataatttgaaattaacctgcgaagatggcgggaaaaatccagacggtacttgtgaatttgcgaatggccatgatgtgttggtttcttatggtttagtcagaaatacgcaaaagtacctgggaatcattgtgtgcgtagccataatttatcgccttattgctttttttattttaaaagcaaaattggagtggataaaatggtga

SEQ ID NO: 81204 - DNA, 150 bp, Saccharomyces pastorianus
actctagaggatccccgaagatgtcctctagacttcggtaacggtagaacgctagctacgaagggagttatagcgtcaagtggccctcgcgagttacatgacttggtggtgtctacatcatgcgatgtcattcagtcaagaaacgcctaa

SEQ ID NO: 81205 - DNA, 405 bp, Saccharomyces pastorianus
atgggatggggtaacaatgcctccgcagccattcaaaggctgggtttaggtgaaattatcaagttcggtagaatgtttttcccagaatccaaagtcgagacctactatcaagaatccgctggtgttgcagatctgatcaccacctgctcaggcggtagaaacgtcaaggttgccacatacatggccaagaccggtaagtcagccttggaagcagaaaaggaattgcttaacggtcaatccgcccaagggataatcacatgcagagaagttcacgagtggctacgaacatgtgagttgacccaagaattcccattattcgaggcagtctaccagatagtctacaacaacgtccgcatggaagacctaccggagatgattgaagagctagacatcgatgacgaatag

SEQ ID NO: 81206 - DNA, 243 bp, Saccharomyces pastorianus
atgatccaaccatcccaaaatagcgttaacggtactgtcagggttagactgtataagggtaacgtcatcattctgggcagatctacaaagactgaaaagttgtatgatccaacagaatcctctatggatgagttgaccggattcttacctaccgataccaccggtttcattgccatccaggccattagaattaaaaaatacggtgaatccaaaaaaaccaaaggtgaagagttgactttgtaa

SEQ ID NO: 81207 - DNA, 804 bp, Saccharomyces pastorianus
atgtctaagggaaaagtttgtttggcttattctggtggtttagatacctccgtcatcttggcttggctactagaccaaggctacgaagttgtagctttcatggctaatgtagggcaagaagaagatttcgatgccgccaaggaaaaggccttgaagatcggtgcctgcaagttcgtttgtgtggattgtcgtgaagattttgtcaaggatattctatttccagctgtacaggtcaacgctgtgtacgaagacgtttatctgttgggtacctctttggcaagacctgttattgccaaagcccaaattgacgtcgctaaacaggagggctgtttcgcggtctctcatggttgtaccggtaaaggtaatgatcaaatcagattcgaattgtcattttacgctctgaagccagacgttaagtgtattacaccatggagaatgcctgaatttttcgaaagatttgctggcagaaaggatttgttagactatgctgcacaaaagggtattcccgtcgcccaaaccaaggccaagccatggtctactgacgaaaaccaagcccacatttcttacgaggcaggtatcttggaagacccagataccaccccaccaaaggacatgtggaaactgatcgtcgatccaatggatgctccggaccaaccacaagatttgaccattgactttgaacgtggtcttccagtccagttgacctacaccgacacacaagacttccaaggaagtttccgttaccaagcctttggatgttttcttggccgcatccaacttagcaagggccaacggtgttggtag

SEQ ID NO: 81208 - DNA, 1626 bp, Saccharomyces pastorianus
atgaagttaaagcaaggtcaaaagctttttgttcaggtgagtaatttcgccccacaagtctacatcatcacaaagaatgaaaacttcttgaaggaagtttttcagttaagaatctttgtaaaagagatcctagaaaaatgtgccgagggtatatttgttgttaaattagacaccgttgacaggttaattattaagtatcaaaaatattgggaaagtatgagaattcaaattttaagaagacaagctattttaagacaacaacagcaaatggcaaacaacaatgggaacccaggcactacttctactggaaacaataataatattgcaactcaacaaaatatgcaacagtcactacagcaaatgcagcatttacagcaattgaaaatgcagcagcaacaacaacagcagcaacagcaacagcaacagcaacaacagcaacaacaacaacagcagcaacaacagcaacagcacatatatccctcctcgactcctggtgtggctaattattcggcaatggctaatgcacccggtaacaatatcccatatatgaaccataaaaatacctctagcatggattttttgaactctatggaaaatacaccaaaagttcccgtatccgctgcggcaaccccatcactgaacaagacgatcaacggtaaggtgaatggcaggacaaaatctaatacgatacctgttaccagcattccatcaacaaataagaaactatcaatttcaaatgccgctagtcaacaacccactcctaggtctgcatcaaataccgctaagtcaaccccaaatacaaatccttctccactgaaaacccaaactaaaaatggcacaccaaaccccaataatatgaagactgtacagtctcctatgggtgcacaaccatcatataatagtgccattatcgagaatgcattcagaaaggaagaactcttgttaaaagatttggaaatcaggaagttggagatatcttctcgttttaaacatcgccaagaaattttcaaagattctcctatggatttgtttatgagtacgctgggtgattgcttaggtatcaaagatgaagagatgcttacgtcatgcactatcccaaaggctgtggttgatcacatcaacggctctggcaaaaggaagcctacaaaagcggctcaaagggctcgcgatcaagattccattgacatttccataaaagacaacaaattgcttatgaagagtaaattcaataagagcaataggtcgtattcgatagcgttgtccaatgtagctgctatattcaagggtatcggtggtaacttcaaagacttgtccactttggttcattcatcatcgccgtccacatcttctaatatggatgtcggcaacccaagaaaaagaaaagccagcgtattagaaataagcccgcaagattcgatagcctcggtgctatcaccagattcaaatataatgagtgattctaaaaaaattaaagtagattctcctgatgacccattcatgacaaaatcaggagccacaactagtgaaaaacaagaagtaacaaatgaagctccatttttaacttctgggactagttcagaacaattcaatgtatgggattggaataattggacaagtgctacttga

SEQ ID NO: 81209 - DNA, 615 bp, Saccharomyces pastorianus
atggtgaagggtaccgatttcgttcttttcacacgtatttatggagtgacgttcgcaagaaagggattaacagagttgagtgaagcctgtgaaacgataattttcacgccctttgtctacagaaggtcacatcgtttgggtggcctcttttcgaaacggttttacctcgtctctttgccgcagtttttcatttttttcttctggtacatcttcatagcctttatgtttcttttattgttgctcgttccaatagtgggtccaattacaatcaatatgctaccatttagccccggaatgggattttactattttgagccctattttgttgacgtgctacatttggattcgcgcaaactttccaaagtttactacaagggctttgccaagtggctcctttactcgatatccagcggtttattagagtctattcccattctgggtgggttgttcattggaacaaacgcagtaggtgcttcgctttggatagttaaagagataaaagaccgggaccagccagccgtacccccttcccctcctgcggaaccagaagagcctactgtaggatcctatgcacctccaatccaacaatctatagcccacattaatccgccatga

SEQ ID NO: 81210 - DNA, 252 bp, Saccharomyces pastorianus
atgtcgactagaccccaacctgattggtattaccatagacatccatatgcctctacgccactggcagaaggggaggaaccacaattactccccatccaagaccaagggaaccataagaaatcaaaaatttggatggcatacaaggctccgatagttcgatggtacaagaatgctatgcttgttaaagacaatttttggaaagacctagagtcgtcgcaccagatcatctggtatccgtataaagtatgttga

SEQ ID NO: 81211 - DNA, 654 bp, Saccharomyces pastorianus
atgagtgatttcattttcgtatacataacgaaaatgaggacaactatagatgtagttggcttacaagaattaatcgagatattcatctttcaggtgaaggtaaaactgcatcataaaaaaccctcaccgaatatgtattgggcgctttgcaaaacattacctaagttatctccaaccctaaagggcctttacttatctaaagatgtttccatagaggatgctattctgaactcaatagataataaaatacaaaaagataaggcgaagtctaaaggtaaacaaagaggagtgaaacagaaaatacaccattttcacgagcctatgttacacaatagtagtgaagaacaggttaaggttgaggatgcgtttaatcaacgcacctctactgatagtagactccagagtactggaacggcgccccgtaaaaaaaacaatgatattactgttctggctggttcattttgggctgtcctgaagcatcatttcacaagaagtgtgctgaacaaaaacggacttctgctcacaggtctgctgctactcttatgtttgaaaaaatataagtcattgatggcaattttcaaacatgttccagcggcctttcacactgtatacccccagattgtagggttgctaaaacttctagcgagcatatga

SEQ ID NO: 81212 - DNA, 384 bp, Saccharomyces pastorianus
atggctgcaagtgagataatgaacaatctgcctatgcattccctcgattcttctctaagggatttacttaacgatgacttattcattgaaagtgatgaatcgaccaagtcggtaaatgatcagaggagtgaagtatttcaagaatgtgtgaaccttttcataaaaagagatatcaaggattgcctagaaaaaatgtctgaggttggatttattgatattaccgttttcaagtccaaccctatgatattagatttatttgtcagcgcctgtgatattatgcccagctttaccaaattaggtttaacactgcagagtgagattttgaatattttcacgttagatacccctcaatgtattgagacaagaaaaattatttctcggtga

SEQ ID NO: 81213 - DNA, 1566 bp, Saccharomyces pastorianus
atgaaaatgctttgtcaaactagcaagattcatactataccggtatcaagaagggaactgacgcctgctcagataaagaagttgattacaccaagaccgaatgggaaaattctttttaaaaggattattcatgggaataggttagtcgatatcaagcaatcagcatatggtagtaagcaggtctttcctactgacgttagtattaaacaaactaatttttatcagggatcaatcatgtcaaatgagcagaaaattagaattgaaaatgaaattatcaacttaaagaatgaatacaacgatcgaaaatctacgttagatgcattgtcaaaccagaaaagtggttataggcacgaattatctgagttggcgtcaaaaaacgacgatattaatagggaagctcatcaattaaatgagattcgcaagaagtacactatgagaaaaagtacaatagagactttaagagagaaattagatcaactgaaacgtgaagctagaaaggacgtatctcaaaagattaaagatattgatgatcagatccaacaactattactcaagcaaagacatttgctgtctaaaatggcctcttcaatgaagagtttaaagaattgtcagaaggagttaataagtactcaaatccttcaatttgaagcccaaaatatggatgtttctatgaatgacgtaattggttttttcaatgagagggaagctgatttgaagagccaatatgaagacaagaaaaagttcgtaaaagaaatgagagacactcctgaatttcaatcatggatgagagaaatcaggtcttatgaccaagacactaaggaaaaattgaataaagtggcagaaaaatacgaggaggaagggaatttcaatctgtcattcgttcaggatgttctcgataaattagaatcggagatagctatggtaaaccacgacgagtcagccgtaacaattttggatcaagtcacagccgaactgagagagttggagcacacggttcctcagcagtcgaaagacttggagaccattaaagctaaattaaaagaagatcacgcagttttggagcccaaattagatgatattgtatcaaaaatctctgcaagatttgcgcgcttattcaacaatgttgggagtgctggtgcggttcgtctagaaaagccgaaggactatgctgaatggaagatagaaatcatggtaaaattcagagataatgcacctttaaaaaagttagattcccacacgcaatcaggtggtgaaagagctgtttctacagttctttacatgattgctttgcaagagtttacctctgcaccatttagagtggttgatgaaatcaatcaaggtatggactctagaaatgaaaggatcgttcataaagctatggtggagaacgcgtgtgccgaaaacacttctcaatattttttaatcactccaaaattattgactggcttgcattatcatgaaaagatgagaatacactgtgtcatggctggttcttggattccaaacccttctgaggatccgaagatgatacatttcggtgaaacttctaactactcattcgattaa

SEQ ID NO: 81214 - DNA, 1608 bp, Saccharomyces pastorianus
atgaccagtctaatagatttgggcagatatgttgaaagaacgcaccatggagaagatacagagccaagatcgaaaagggtaaaaatcgcaaaacccgacttgtcttccttccaaccaggcagcattattaagatccgtttacaggattttgttacttacactttaaccgaattcaatctttcaccgtctttaaatatgatcattgggccaaacgggtctggaaaatctaccttcgtatgcgcagtgtgtttaggattggctggtaaacccgagtatattggtaggagtaaaaaagtggaagatttcatcaaaaatggtcaagatgtttcaaaaattgaaatcaccttgaaaaattcaccaaacgttactgatattgaatacatagacgcacgtgatgaaacaataaagattaccagggttattacgagatccaagaggagatcagattatctaataaatgactaccaggtatctgaaagtgtagttaaaactttagttgctcagctgaacattcagttggataatctttgtcaatttttatctcaagagcgtgttgaggagtttgctcgcttgaagtcagttaaattattagtagagactataaggtcaatcgatgcaagcttattggatgtgttggatgaactaagggaattgcaagaaaatgagcaaagcttgcaaaaagatctcgatgttaaaaaagctaaaattgttcatttgagacaagaaagtgataaactacgtaaatcagttgaatctttacgagattttcaaaataagaagggtgaaatcgagttacactcccaactattaccttatgtgaaagtaaaggaccataaggaaaagctaaacatatataaagaagaatacgaacgagcgaaagcgaacttaagggctatactgaaggataaaaaaccgtttgcaaatactaagaagactttggagaatcaggtggaagagttaacagagaagtgttccctaaaaaccgatgagttcctgaaagcaaaagaaaagatcaacgaaatcttcgaaaaattaaatactattagggatgaggtcatcaaaaagaaaaaccagaacgaatattatagaggaagaaccaaaaaactacaggccaccattattagtacaaaggaagattttctaaggagtcaggaaatattagcacaaacacatcttcctgagaaaagcgtatttgaagatatagacattaaaagaaaggaaattattaataaagaaggcgaaattagggatcttatttccgaaattgatgcgaaggcgaacgctattaatcatgagatgagaagcatacagagacaagctgaaagcaagaccaaatcccttacaacaactgataaaatcggtatcttaaatcaggaccaggatttaaaggaggtccgtgatgctgtgttgatggttagagagcatccagaaatgaaagataaaattctagaaccgccaataatgaccgtgtctgccattaacgctcaatttgctgcatatttagcacaatgtgtggattataatacgagtaaagccttgactgttgtagattctgattcttacaagctatttgctaatccaattcgtgacaaattcaagataatttga

SEQ ID NO: 81215 - DNA, 426 bp, Saccharomyces pastorianus
atggatgtagatgatggttcgggggccgctgatccgtttactgacaccaatggaagtagcagtaataacatatcagaattgattattggtatttccattgagcctcgagaacaaggaatgatgaaattagaagagtggaaggccagcatgaatgccgaagcacaaaagaacaactcattgatcttgtcaagacctaacttaggaataattcgaaatattaccacggcagggcagttggcacaagtttacccttcattgacacaagaattggccgccaaaatcgttcagcatgcatataactatttatcagggttcctagatgctcagggaaacgtgcccatcaagaggtttgatacatggtgggacaaatttagaaatagactggctaacgacgggacgtttttggatgaagtgactaaaaattag

SEQ ID NO: 81216 - DNA, 120 bp, Saccharomyces pastorianus
atgtttgctgcaattgcctcaggaaatccattgcaactatcggtagaagtccccaattcaaatgggttacagcatacaattgtcctttctcgaacgaaaccgaactatgggatcctctag

SEQ ID NO: 81217 - DNA, 237 bp, Saccharomyces pastorianus
atgaatgcggcttccgatgcaaagaggtatctgccgatcagttacacatatcaaaaaatccgtcaacatacgcaaaaaaataaaagtatccaagaacaactaaatcctgaagattcaacttcgatctcatcagcgttagagaacattgcatctggattgcacgttcgtggacagaaagtagaattgcaaagcatcaaggatgcattacataagatggacaaaaacgtcttggaatga

SEQ ID NO: 81218 - DNA, 369 bp, Saccharomyces pastorianus
atgaaaccagtaacatgttgcaaccaaaagaataacataatgccatccttagtccccgtttgctgttcagaaaagaaaatagaatccgatgctaagaaatcaatatcgaaatgctgtggagacaaagaaatctacgataacgagaatagaccgatcactaaagaggatgggtcatggatacctggaagctgcaagcaatgtagatcagacccccatagtaggaatttttgtcaatcactttcgaataaatgtagttcaagctctttctcttccaacagtgcgttgtcaccggatctaaatgaacaacaaactgacgcgaattacaattcaatcaagctacccgaaatatgctcctgcaagaatgcataa

SEQ ID NO: 81219 - DNA, 1251 bp, Saccharomyces pastorianus
atgaagtacaatactttagcagcagtttctcgaatatggtacaaatttggccccatagtcgataaattatttactaaccggctattaccggttctattccccccgcaaatgggagaagaatgtaacgtcgaagatgttctcgaaatagttcataacttccatccatatttttctattcgtaggctaaaggataataggcctctattgtcagattcgactattagccagctaagagagggtttgtttggtatgctcagcatattaaacgactcgctgacaaggacgcaaaatgaaaacgaccatggtagcgacaatctgatcgacagtgacgatggatttggctcagacaacgatcctgaacaacaagcgtacctcgatgaactcgtatcagaaggttatgacgaaaacatgtatgacggtgatacggatgacgaagacgcagatgatataaacgttgaaaaaaacgatgaagccaccaaagacattacagaaacgaacaaaatccttttaatcttttctgagttacattatcctcaggaggagcgcttctctgaactgttggttgagttgcagactaagatcgctataaacacatccttaattgataaaattctttcaaaagagacaacagaattacccactcacaatggggaaatcgcagatttgaacgaaattctaaatgaagtgaaaggcaataaaccaattagaaaaaacgttattttttgtacgttagcgcatactttgtcgttgcaatccggttccgaattgtctgttctacagctgtcaatagaggttattgatcatctgctggttaaaaatcattcaaataacatcactcgtggcgagcaatttcaattgattaagttgatattaccccatctaaaaacaaataaatcttttattgatacattaaaagcaggaaattttacccaaaaaattgatgaaggagtgaccttaagaacaatgattctttctctactactacaactattcccactggattactctatgctaggtgagattttacccactattgcgcgatattctgtaagggataaggatcttggggtgagagatctgtccttccaattgctggaccaaattctacgcacatactataattacctaattggtatcgattgggaatggtataaagatgacttctatcaagttttgcaagaaacttgtattaaaaaagacataaataccaacctcttgctacaatttcctccttatctccctcatgactag

SEQ ID NO: 81220 - DNA, 243 bp, Saccharomyces pastorianus
  modified_base (230)..(230): a, c, g, t, unknown, or other
atgagtttgcacattagtaaactgattgagcaatatcgttccactaaggacaatgaccttaaatatatgcttttaaggcaaaactttaaaattaacgacatagaggatgagctggcccctcttgttaacgaattgctgctcccggtattggtcgaagaacaagacatggaaattctcaacctagtatcgtttcaagtgctccccgatttagttctttctatgatcagcgnacctgcagctgct

SEQ ID NO: 81221 - DNA, 1554 bp, Saccharomyces pastorianus
atgttggagcatgatgttgaatttaggcctttttccaagaaagttctagaatgtttgcccgcagaaggccacgattggaaggccccaacaaaactggacgatcctgaggctatttcaaaggatccattattgacaaaaagaaaggatctcagagataaacttatatgtagtatcgatcctccaggatgtgttgatattgacgatgccctacatgcgaaaaagcttccaaacggtaattgggaagttggtgttcatattgctgatgttactcacttcgttaaaccgggcactgccctggatgcggaaggtgctgcaagaggtacttctgtatatttggtagacaaacgtattgacatgctgcccatgcttctaggtaccgacctgtgttctctaaaaccatacgttgatagattcgcattctctgtcatttgggaattggatgatagtgctaatattgtaaatgtcaattttatgaaatccgtcatcagatctagagaagctttctcatacgaacaagcacaactgagaattgatgacaaaacccaaaatgatgaattaacgatgggtatgagggctctcttgaaattgtctgtaaaactgaagcaaaagagactagaggcaggtgccttgaacttagcttctcctgaggttaaggtccacatggatagtgagacttcagatccaaatgaagtggaaatcaaaaaattactggcgacaaattctttagttgaagaatttatgttgttggctaatatatcagtggcaaggaagatatacgatgccttccctcaaacggcgatgctaagaagacacgcagctccgccatctaccaattttgaaatcttaaatgaaatgttaaacacaagaaagaatatgtcaatttcgttggaatcgtccaaggccttggccgattctttagataggtgtgtggatcccgaagatccatattttaatacattggttcgtatcatgtcgactcgctgtatgatggcagcccagtatttttattctggagcttattcttatcctgactttagacactatggtttagccgttgatatctacacacatttcacatcacctattagacgttactgtgatgttgtggcccatagacaattagcaggtgccattgggtatgaacccctaagtttgactcatcgtgataagaataaaatggacatgatttgcagaaatatcaacagaaagcacagaaacgcccaattcgccggtagggcaagcatagaatactatgtcgggcaagtaatgaggaataacgagtccacagaaactggatatgttattaaggtatttaataatggtatagtcgtactggttcccaagtttggcgtggaaggcttgataagactggataatttgactgaggatcctaactcagccgcttttgatgaggtggaatacaaattaacctttgtgcctacaaattcagataaaccgagggatgtttacgttttcgataaggtcgaagttcaagttaggtcggtgatggatccaattactagcaagcgtaaggcagaattattgttaaaatag

SEQ ID NO: 81222 - DNA, 819 bp, Saccharomyces pastorianus
atgatagctcaaagatcgaaaaaaattcagcccacggcaaaagttgtatatatacaaagaagatcctggagacagtacgtcggtcaactagcaccaagttctgttgatccacaaagcagtagtacacagaatgtcttcgttattttgatggacaaatgtcttccaaaagtcagaatcagaacaaggcgtgctgctgaattattggataagaggattgtcatttccattgattcgtggcccaccactcataaatacccattaggtcactttgtgagagacctcggtacaattgaatctgctcaagctgaaacagaggccttattgttggagcatgatgttgaatataggcctttttccaagaaagttctagaatgtttgcccgcagaaggccacgattggaaggccccaacaaaactggacgatcctgaggctgtttcaaaggatccattattgacaaaaagaaaggatctcagagataaacttatatgtagtatcgatcctccaggatgtgttgatattgacgatgccctacatgcgaaaaagctttcaaatggtaattgggaagttggtgttcatattgctgatgttactcacttcgttaaaccgggcactgccctggatgcggaaggtgctgcaagaggtacttctgtatatttggtagacaaacgtattgacatgctgcccatgcttctaggtaccgacctgtgttctctaaaaccatacgttgatagattcgcattctctgtcatttgggaattggatgatagtgctaatattgtaaatgttaattttatgaaatccgtcatcagatccctttag

SEQ ID NO: 81223 - DNA, 603 bp, Saccharomyces pastorianus
atgaacgattatgacagaaacgacagggctataaggaaaacctgtcaatggtatagtgagcacttgaaaccttatgacataaacgtcgttcttgttaccaacgatcgtttgaatagagaagctgccactaaggaagtggagtccaatataataaccaagagcttggtacagtatatcgagttactaccaaatgcagacgacatcagagactctattcctcaaatggattcttttgataaagatcttgaaagggacacattttcagatttcacgttcccggagtactattctacagcaagagtaatgggtggtttgaaaaatggcgttttgtaccagggcaatattcaaatatcagagtacaactttctagaaggttcagtgagtttaccaagattttctaaaccagtgttaattgtagggcaaaaaaacctaaatagagcattcaacggtgaccaggttatcgtggaactgctactcaatcagaatggaaggcaccctcatccattgtcttggattctgaacatttcgacgttaacgataaccccgatattgaggctggcgatgacgatgacaataatgagtcctcttccaataccaccgtga

SEQ ID NO: 81224 - DNA, 429 bp, Saccharomyces pastorianus
atgtctgattcaacaacttcccccacaaccacattttctacttcattatcaccaaatgcgaccacatcacttttttgtggtaacatgggagttatgtatatgaccatgtctgaatacggatcacatttcgcagaaaactgctgggcatgcggtacagaatatgaatcagattttgcaacgttgactaaaaaggttccagggaccacattctcagctaatatgccaacatctacttggtatagtgtcctggattgcggctattcctcttcaattaacgtggcagaaaataaaaattcacccatcgattattggaattgtggtagaacatatgccaggagttatgctctgtccgatgcgctttcactaaagccaacgaatatgttacagtactttctattagtattattttttatctgtattatactatga

SEQ ID NO: 81225 - DNA, 1425 bp, Saccharomyces pastorianus
atgagtttacttgatattttacacaggagcagatatcaaaagctaaagcggtctaatgatgaagatggcaaagttccccagctctctgaaccacccgaagaagaacctaataccattgaggaggaagagctcatcgatgaagaagctaaaaatccgtggctaactgggaatttagtggaggaagcaaactctcagggtattatccaaaatcgcagtatttttaatctattcgctaatacgaatatttacatatttttccgtcattggacaacgatttatgagcggcttttggaaattaagcaaatgaatgaaaaggtcacaaaggaaatcaacacaaggtcgacagttacttttgccaaagatctagatttattatcgagtcaactttccgaaatgggactagattttgttggtgaagacgcgtacaaacaggttttaagactgagtagaaggttgattaatggggatcttgaacatcagtggtttgaagagagtttgcggcaagcttacaataacaaagcgtttaaactctatacaattgataaagtcacccaatcgttggtaaagcatgctcataccttgatgactgacgctaaaactgcagaaataatggctttgttcgttaaagatagaaatgcctccaccacgagtgcgaaggaccaaattatctatcgcttgcaggtgcgctcacatatgtccaacacagaaaatatgtttagaatagagtttgataaaagaactctgcatgtttccattcaatatattgcacttgatgatttgacactaaaggaaccaaaggcagacgaagataaatggaaatattatgtaacatcgtatgctctgccacatccaacagaaggcattccgcacgagaaactgaagataccatttttggaaaggctcatcgaatttggacaagatattgatggaacagaggtagatgaggagttttcccccgaaggcatctctgtatcgacattgaaaattaagatccagcctataacctaccaactgcatattgaaaacgggtcttacgatgtttttacccgtaaggctactaacaaatatcctactattgctaatgataatactcaaaaaggaatggtttctcagaagaaggagttgatatcaaaatttctagactgtgcagttggtttgagaaataatttagatgaggctcaaaaattaagtatgcaaaaaaaatgggagaacctaaaagacagcatagtaaagacgagtgctggcaaccagggaatagagagtgaaaccgaaaaaggtaaaattacgaaacaggagcagtcggataatttggacagctctactgcaagtgtactgcctgcatccattactactgtaccacaagatgataatatagaaacgactgggaatactgaatcttcagacaagggggctaagattcaataa

SEQ ID NO: 81226 - DNA, 306 bp, Saccharomyces pastorianus
atggttatgccatatggtgttcctaagggagatgggaacaattttccaaaaaacgatatttcaaaatatgaggctaactcctcattggaagaccacatcctttcacttccctggccaccagatggaggtaaaacaaacaccgtcttcaatcatggcagctcaacaatagagatgcgtaatgaaagtggcgagcagctaataaggaccagacttcctcaaaatggcagacatgcttctcgtgagaagtggtacaacgactggggtgaatcactagacgattttggagtggatgttgatatggaatag

SEQ ID NO: 81227 - DNA, 855 bp, Saccharomyces pastorianus
atgccagtaaagttaaggtggccttggttaggaattgctataccaacgtttctgatttcatttataggctatggtgcacactactttattttatccaatttcttgtcagttccgaaacaaataacatttgagttctgtttgtcaatgatatggctctcctattacttggccatctacacaaatccaggaaggcctttgcccaactacaaaccaccccctgatatctggcggaatttctgtaagaagtgccaaaattataagccagaacgttcacatcattgtaaaacctgcaatcaatgcgttttaatgatggatcatcattgtccgtggacgatgaattgcgtcggctttgcaaactatccgcatttccttagattcttattttggatcatagtgacgactagtgttttattttgcatacaagctaagcggatatattttatttggcaacaaaggcacttgcctggctacttcttcaaaaaatcagaactgattttcttaacaatatcgagtcctttaaattcttttgtcctactaacgataacaattcttttcctacgatgtttattcaatcaaatcttgaatggaagatctcaaattgagtcgtgggatatggatcggctagaatctttgttcaactccggaagattaacccagaaattaattgataatacttggagaatatatccagagtcgaggtcgtttcaaaataaaaaggatgctgaggaacatttgacaaaaaaaaggccacgttttgatgaacttgtaatttcccttacgattttgatttgtacactaatgcattactgtaccttggtcccattcatttatggttatgccatatggtgttcctaa

SEQ ID NO: 81228 - DNA, 828 bp, Saccharomyces pastorianus
atgaaattccggaatggcaaagagacaaatgattttattttacatggatacgtgaaagaaactagtagcttcattgaaacttttaaaagtttgttttatttgcataatgaaagtgtcaatatttattcacatttaattcctgctctcgggttcttcactgtactgttgctagataaatctactatcaaagtgtttgcaacaactacatggctagatcatatggtaatcgacctcttttattcgggggcgtttgcatgtttaatactgagtagctcctttcattgtctaaagagtcactccttaagaattgctaccttaggaaataagttggactaccttggtatttgtatattgattgttacgtcaatggtcagtattttgtactacggctattttgagaaattttccctattttgcctatttgcgcttattaccgttagctttgggatcgggtgtagtattgtgtcactaaaagataagtttcggaaaagagagtggagaccttacagagctgggctatttgtttgttttggtttatcctcaattattccaatattcagcggcctttactgctatagtttttcagaaatttggacccaaattcagctcttttgggtattacttgggggtgtcctatatataattggcgctgttctttatggaatgcggtttcctgaaaagatttgccccggtaaatttgatatttggggtcattctcaccaacttttccattttctagttgttattgcggcattgtgccacttgagaggtttattaaatagttatgagttagtccatataaagatggagaacgggattgtctcctag

SEQ ID NO: 81229 - DNA, 189 bp, Saccharomyces pastorianus
atgctgcatgttggagaagaatcattccaaatgtcaactttattagaaaggactaagagtgtgcaagagctgaagaagagagctgcagggaacacatccgcaaatcccgcagaggtcgctaaagctaaaaaagtactaagaaggctatatagttgggatgaaattccggaatggcaaagagacaaatga

SEQ ID NO: 81230 - DNA, 573 bp, Saccharomyces pastorianus
atgttatggaaagggttttcggtgttgtgcaacagcaatatttccaagagccgagccaagcctgtcactaattcttctattctgttgggtaagattttaccacgtgaggagcatgatattgcatatagcaaagacggcttgccaaataaagtgaagacggaagatatcaggatccgagcacaaaatttcaagtctgccttagcaaacttggaggatatcatattcgaaatagagaaacctctcgttgttcctgtcaagctagaggagattaagacagtagaccctgtgagcgcacctaatcactcgcctgagattgataatcttgatgatattgttgttttaaagaagaaaaacattcaaaagaaacaaccagcaaaggaaaaaggtgtaacggaaaaagatgctgtggattattcaaaaattccgaatatcttatctaataagcctggccaaaataatagacaacaaaagaaaaggagattcgacccatcatctagcgatagtaatggaccaagggcagctaaaaagaggaggcctgccgccaaaggtaagaatctgtcatttaaaaggtga

SEQ ID NO: 81231 - DNA, 1689 bp, Saccharomyces pastorianus
atgacttctgaaaatccggatgtacttttatctagggtgataaatgtagtgagagcagcatcatcgttagccagtcaagatgtggagttttacaagaatttagacaggggatttagtaaagatctgaaatcaaaagcagacaaacttgcggatatggcgaatgaaataattctctctattgatgagcaccatgaatcatttgaacttaaagaagaggacatttctgacttgtggaacaactttggaaacatcatggataatttgttagaaatgtcagaccattcgctggataagctgaattgtgcaataaactcaaagtcaagaggttccgatcttcagtatttaggcgaattttcaggaaagaatttttctcccaccaaaagagtcgaaaaacctcagttgaaatttaaaagtccaattgataacagcgaaagtcatccgttcatacctttattgaaggaaaaaccaaatgctttgaagcccctctctgagagtttgaggttggttgatgatgatgaaaataaccccagtcactacccccatccttatgaatatgagattgatcatcaagagtatagtccagaaattctccaaattagagaggagattccctcaaaatcctgggatgattcggtaccaatttgggtagatacaagtacagaactcgaatcaatgttggaggacttgaaaaatacgaaagagattgccgttgatcttgagcatcacgattataggtcatactatggtattgtttgcctcatgcaaattagtacaagggaaagggattatttagttgatactctaaaacttcgcgaaaatttacatattctgaacgaagtgtttacgaacccttcaattgtgaaagtttttcacggtgcattcatggatattatttggcttcagcgagatttaggtttgtatgtcgttggtctcttcgatacttaccatgcgtctaaagcaatcggtcttcctagacatagtttggcctatcttttggagaattttgccaattttaaaacttcaaagaaatatcagttggctgactggcgtataagaccgctttcaaaacccatgacggcatatgccagagcagatactcactttttactaaatatatatgaccagttgagaaacaaacttatcgagtctaataagttagcaggtgttctttatgaatcaagaaatgtcgcaaaaagacggtttgaatattcaaagtatagaccactgacaccttcttcagaagtttattctccaatcgaaaaagagagtccttggaaaatattgatgtatcagtacaacataccacctgagagggaagtattagtaagagagctataccaatggagagatcttattgcaagaagagacgatgaatcgccacgatttgttatgccaaaccagttattggctgcacttgtcgcatatacacctactgatgtcataggtgttgtttctttgaccaatggcgtaactgaacatgtccgccagaatgcaaaactattagctaatttgataagagatgcattacgaaacatcaagaataccaatgaggaagctactcccattccatcttccgagaccaaagcagacggaatattgttggagactataagtgttcctcaaattcgtgatattatggaaaggttttcggtgtgtgcaacagcaatatttccagagggggatcctcta

SEQ ID NO: 81232 - DNA, 474 bp, Saccharomyces pastorianus
atggaaatggctgtaaatgcagctgtagatagcggtgtccattttgctattgcggcaggaaatgaggatgaagatgcttgtctcagttcaccagcaggagctgaaaaaagtattacggtcggtgcttcgacatttagtgatgatagagcattcttttcgaactggggcacatgtgttgatgtgtttgctcccggtataaatattatgtccacctatattggttcaaggaatgcaactttaagtttatcaggtacttccatggcgtccccgcacgttgctggtattttaagttactttttatcattacagcctgcaccagacagtgaatttttcaacgacgctccctcacctcaagaattgaaagaaaaagtcctaaaatttagtacacagggagtactgggtgatatcggtgatgatactcctaacaaattaatatataatgggggaggtaagaaattggatggtttttggtag

SEQ ID NO: 81233 - DNA, 360 bp, Saccharomyces pastorianus
atgaaattctctaccatcttacctatactttgggcaaattgctgtctttgtatgatcatccctgaattcgacgggatagttcgttttattgagaatattgatggtactcgcagtgtaagagcaggagaaggtttgggacagcatgatcctggaaattttcacactgaacatcaacatgtcgctcataaaacagagtttctaccttatcggtatgtcatagtctttaatgaagatatttccctccagcagattcaatcgcatatgcaagtggtacagaaggatcatagtacctcagtaggtaagcttacagaagatgaacgctttttggagggtaatttcttcttcagggggatcctctag

SEQ ID NO: 81234 - DNA, 588 bp, Saccharomyces pastorianus
atgatcacacagtgttgcatacaagcgttatatgaaactagaaatgatggtgcaattaatttagcgaaacaatttgagagacgtcgttgtaaccactcttttaaagatccaaagtcacctgcggagtgcatcgaaagcgtcgttaatattagcggtgcaaataaacacaggtatgtggttgcttctcaggacatagatttgaggaggaagctgaggacggttccgggtgttccattaatccatttaaccaggtctgttatggttatggaacctctcagtacggcgagtgccaaggcaagcaagattactgaagaacaaaaattgtataagggtctcaatgatcctaatattgaaaaacttcaagaaagtggtgatggatcaggaaaggaatctatcactaagaaaagaaagcttggtccaaaggctcctaatcctttgagcgtaaagaagaagaagaaagtcaactcgcccagcgatgaggtgaaagacaaagaagatacttctaaagaaaagaaaaaaagaagaagaaggaaacacaaaagcaacactaacgtccccgtttcaaatgggaccacagccgcgcagtaa

SEQ ID NO: 81235 - DNA, 156 bp, Saccharomyces pastorianus
atgctgcaggtcgactctagaggatcccccgctcccgatatacctaacatgcttcaaaagagggctaagtcatataggaaacaacttcttgtttacagtcacacatttaagttccgtgagccatatcaagtttggttgataatcagcttgttttag

SEQ ID NO: 81236 - DNA, 252 bp, Saccharomyces pastorianus
atgaaaattaagttgtttggtggaaaaataacagatcagcagtcactttgtaacttaataatcataccatatactgatcctattttgaggaaagactgcatgaatgaggtacacgaaaaaataaaagaacaagtaaaggcttctgatactataccgaaaatagccagggtcgttgcccctgaatgggtggatcattctattaatgaaaactgtcaagtgcctgaagaagacttccccgtagtcaactactga

SEQ ID NO: 81237 - DNA, 1062 bp, Saccharomyces pastorianus
atgatatcagcactagattctatacccgagccccaaaactttgcgcccagtccagatttcaaatggctttgtgaagagctatttgtgaagatacatgaagttcaaattaatggaacggccggcactggcaaatcaaggtctttcaagtactatgaaataatatcgaatttcgtcgaaatgtggagaaaaaccgtgggaaataatatatatcctgcactggttcttgctcttccctaccgcgatagacgaatctataatattaaggattatgtattaataagaactatatgctcttacttgaagttgccaaaaaattctgcaacagagcagcggttaaaagattggaaacagcgtgtcggtaaaggtgggaatctttcttctcttcttgtggaagaaattgctaaaagaagggctgaacctagctcaaaagcgattacaattgataacgtcaatcactatctggatagtttgagtggagacaggttcgcttccggacgaggatttaagagtcttgtcaagtccgaacctttcctgcactgtgtggagaatatgagtttcgtcgaattaaaatacttctttgatatcgtgcttaaaaatagagtaataggaggtcaagagcacaaattgctaaactgctggcatcctgatgctcaggattatcttagcgtgatatctgatttgaaggtggtaacttcaaaactttatgatccaaaaattcgtctaaaggatgatgatttgagtataaaagttggctttgcattcgcgccccaattagccaaaaaagtgaatctttcttatgagaaaatatgccgtacactacatgatgattttttggtagaagaaaaaatggatggagaacgaattcaagttcattatatgaattatggtgaatccataaaattttttagtagacggggcatcgactatacctatttgtacggagcgagcttatcatcaggaactatatctcaacatttgaggtttacagatagtgttaaagaatgtgttttagatggagaaatggtgacagtagatgcacaaagacgggtgattcttccattc

SEQ ID NO: 81238 - DNA, 1224 bp, Saccharomyces pastorianus
atggtgtttgatcttttatacctgaatgggacttcgttgacaccattaccccttcatcaaaggaagcaatatctgaacagcattttaagtcccttgaaaaatattgtagaaatagtacgatcttctagatgttatggtgtggagtcaatcaaaaagtctttagaagttgcaatctcactgggttcagaaggagttgttttgaaatattataattcaagttataatgtcgccagtcgaaacaacaactggatcaaggtaaaacctgaatatttggaggaatttggagagaatttagacttaatagtaataggcagagattctgggaaaaaagattcttttatgctagggttacttgtgctagatgaagaagagtataaaaagcaccaaggagactcctctgaaattgtagaccactcaagccaagaaaaacacatacaaaattcaagaagaagggtgaaaaaaatactttcattctgttctatcgcaaacggtatatctcaagaagaattcaaagaaatcgaccgcaaaacgagaggacattggaaaagaacctccgaagttgctccccctgcttcaattttagaatttggctcaaaaatacctgccgaatggattgaccccagtgaatcaattgttctagaaataaaatcacggtctttggataacacagaaacgaatatgcagaagtacgctaccaattgtactttgtacggcggctattgtaaaagaatacggtacgataaagaatggacagattgttacacacttaacgacttatacgaaagtaggacggctaaatctaaccccagctatcaagcggaaaggtcacagcttggattgatacggaaaaagagaaagagagtacttatttcagacagctttcaccaaaacaggaaacaactgccaatttcaaacatctttgccggattacttttttatgttctctctgactatgtcacggaggacactggaatacggattacacgggctgaacttgaaaaaactattgtggaacatggtggtaaactgatatataatgtaattttaaaacgtcattcaattggggacgttcggttaatcagctgtaaaactaccacggaatgcaaggctttaatagatcgaggatatgatatattgcacccaaattgggtactcgattgtatagcatataagaggctcatcctgatcgagcccaattattgctttaactctctcaaaaaatga

SEQ ID NO: 81239 - DNA, 222 bp, Saccharomyces pastorianus
atgagagccgtcgctgaaaaaagggtagattgtttgggtgatagttttgaaaatgacatttcggaaaccaaactgtcatcattgtataaatcacaactaagtctaccaccgatgggcgaactcgagatagattctgagttcggcggtttccattatttttattctccaacaggattgcatacgtaccacgtcgcaaaattagcacagaagatgacattatag

SEQ ID NO: 81240 - DNA, 108 bp, Saccharomyces pastorianus
atgaaaagcagggaaacgcaatctgaggaatcagaagacgaggaaagtggttcaaaagaaaatgaagagcctttaagttatgaccccttaggcaatttaattcgatag

SEQ ID NO: 81241 - DNA, 825 bp, Saccharomyces pastorianus
atgtgtggtggtgaagatgcctattctgtgtaccaacttgactctgacacaaatagcaatagcataagcagctcagattcaagtacggagtctacttctgcgtcgtcttccacaacttcttcaacaacgtcctccacaacatcaactacatcatcaatggcgtcttcctctacagtacagaattcccccgagtcaactcaagcagctgcctctatttcaacgtcacagagttcgagcactgtaacgtcagaaagctcgctaacttcggatactttggcaactagcagtactagctctcaatcacaggacgccacttcgataatctattccactacttttcacactgagggcggttccacaatttttgtcacgaacaccatcacggcaagtgcacagaattcaggatcggccacaggtacagctggatctgactctacgagtggaagtaaaactcataaaaagaaagccaatgtaggggcaattgtaggcggcgttgtaggtggtgtagtgggagccgtagccattgctctttgtatcttgttgattgtcagacacattaatatgaagcgggaacaagacaggatggaaaaggaataccaagaggcgataaaaccagttgagtaccctgataaactatacgcctcttcattttcatctaatcacgggccctcttcaggtagcttcgaggaggagcacaccaaagggcaaactgatattaaccctttcgacgactcaaggagaataagtaacggaacattcataaatggcggaccaggagggaaaaacaacgttttaacagtggtcaatccagacgaagctgattga

SEQ ID NO: 81242 - DNA, 132 bp, Saccharomyces pastorianus
atgagaccgaacaaaacaagtctgcttctggcgttattatccattttatcgcaagcgaacgcctatgaatacgtgaattgttttagctcactaccctctgacttttcaaaggccgattcatataactggtag

SEQ ID NO: 81243 - DNA, 297 bp, Saccharomyces pastorianus
atggtgtgtaatttttttacatacttctggaagcagatatcatcggcccccaaagtcgccttctgcaaaataatgtggagatcttatcttgtttttctcttctttatgacaccaaggatacaaacatattgtcctgtaccggtactaaggtcaatggcagtattaaatattatctctccgcttataatttttgtcagtcctattaaaaagcaagacagtttacacagcagcgcttgttacgcaaatttgacgttagtggaaaagctgcaactttggcattctatgtcaaacgattag

SEQ ID NO: 81244 - DNA, 162 bp, Saccharomyces pastorianus
atgtgtcttcattttattatttctatacttttctccaaatatatcttcgtttttcttttcgctttcctttttccttctgcctttcctctatttattttgcactccactcttttccgtaaaccttgcctatctattattggatttttgaaaactaaagtataa

SEQ ID NO: 81245 - DNA, 159 bp, Saccharomyces pastorianus
atgccacatttcaaaagagcagcagtatatgaagagcaaaaaagaactggtaaatggggtcaacttgttgaagaaaccaaagatagaatccccgaatattcgaacaaaactatagcaaagataagccacttggacaatggttgttgtggcctgagataa

SEQ ID NO: 81246 - DNA, 1635 bp, Saccharomyces pastorianus
atggtggctaaattaaaactaaaagatcccctgaagcacgttgcccaaataaagaagaagaggagcctaaatgaagctgccgacgaaggggttgatacggacacaggggaatttcaagataaatgggaagttcgagctttattaaacatacctgcaagcctgactaaatgctcccaagactgtcgcattttatctaatatcaaagtccgtcataagatcaagttcactataagtttactcaatccggacggtcatatttcagaattgcgtgcggcactgcctgtccaattattcatttcaccgtttgttccaatcaatgtaaagacctccgatgttattgaaagaacgctcaaaacgtttggaccctcatatcaagtaacaggtcagcacgataattcattcagcagcaaaaactttgtagacgatagtgaagaagatgtgatttttcaaagatctgcttctgcgttacaattgtcttcaatgccaaccatagtatctggctctactttaaatatcaatagtactgatgcagaggctaccgcagccgctgacacaactatggtaactagtttgatggtacctcccaactacggcaatcacgtttacgatcgagtgtatggcgaggtaactaatgaagacgaaacttcagcatcagcttcttcaagtgccatcgaatcacaggcaattcacaatattcaaaacctatatatatcggatagtaacaatagcaataatcctattttggcaccaaatcctcaaatcaagattgaagatgatagcctaaataattgtgactctcgaggggacagcgttaacaatagtaacctgaatctggttaatagtaatctaacaattagtgaaaattggaacaataactctccttctgcaaatagatataataacatcattaatgctggattgaatagtccttcactgacgccaagctttgcacatttatctaggcgtaactcatatagtcgccaaacatcttctacatcgctgaagaacgatttggaactgacagatttaagcagagttccctcgtatgataaagcaatgaaatctgatatgattggtgaggatcttccaccggcttatcccgaggaagaacttggagttcaagaaaataaaaaaattgaactagaaaggccacaaattcttcatcacaagtctacatcctctttgttgccacttccaggctcgagcaagagttccaataatctgaaaagatcgtctagtaggacacacttatcccactctccattaccaaggaataatagcggatcctcagtatcattgcagcagttggcgagaaacaacacagatagttcatttaatctaaatctctctttcacttcagcaaaaagcagtacaggaagcggacattttccgtttaatatgacaacatctttcactagtaattcaagttccaagaacaattcacattttgataaaactgattctacatctgacgctaataagccaagagaagaggaaaactatacgagcgcaacccacaatcgaaggtcacgttcatcgtcagttcggagcaacaatagcaactcaccattaagacaaggaacaggttcatttgctaatttaatggagatgttcacaaaacgggatcgctcatag

SEQ ID NO: 81247 - DNA, 741 bp, Saccharomyces pastorianus
  modified_base (720)..(720): a, c, g, t, unknown, or other
atgttttcatcatcatctcgaccttcaaaagagccattactatttgacatcagacttagaaatttggacaatgatgttttactgataaaaggcccccctgatgaggcatcttctgtcctactatctggaactatagtattatcaattactgagccaattcaaatcaagtctttggctttgagactttttggtaggttgagactaaatattccaacggatttacaaactgttcatgggccgcataagcgatactcaaagtttgagagaaacatatattctcatttttgggatgattttaatataaaaagttatttccaaaacttgtacgataatcataataatggtaaaataacaatttctagtaaatcctcaacaaatttagcagcattgccaaagagaaaaaaagccctttctactgcatcattgatatcaagtaatgggcagacaagcgcaagcaaaaactatcacaccttagtaaaaggtaattacgaattccctttcagcgcgattattcctgggtcattagtggaaagtgtagaaggcctaccaaatgctgccgtcacttatgctctggaagctactatcgagagacttaagcagcccgacttgatctgtaaaaaacatctaagagttattcgaacgttagctatagatgcagtcgagttatctgaaacagtatcagtggataactcatggcctgaaaaagtcgagtatacgatncctttagtgagggttaagtgc

SEQ ID NO: 81248 - DNA, 1011 bp, Saccharomyces pastorianus
atgaaaaaaatatacaataattctgagaaactacaatcattaaacacagcatctgattataaaagcaactgtaacgttcaagtgctacccatcacctggaggcactcaataagtttccaaaccgatgctaaggaggaaaatatagaaaatcctgacctaccgactttgtcacaagtcacagtaaatggagtgttacccttgaggaagctactggctgacggtctactagatattttgttatatgtcgaaccatactaccaagatatgattctacaacaggtaacctctcaattgaacaaaacatatcggatttttaaagaatttaatccagagtttgatgggaaagttcatttagtgggccattcgttgggtagtatgatattatttgatattctatccaaacaaaaaaaatatgaattagaatttcaagtagacaacctgttctttattggctcaccaattggattgttaaagttaattcaaagaacaaaaattggtgaccgtcccgaatttcccaatgacttggagagaaaattaaccgtacagagaccgcaatgtaaggacatttataatgtttaccacgtctgtgatcccatttcttataggatggaacctcttgttagtaaagaaatggctcattacgaacaaacttatttaccacattgtagtgaagcttatggactaacttctaaagttttggaatttggcgaaaacatatggaaagatttgccaggtactgatgaaaataatttgcagtccaaaaaaacttctccagaaaaaaaagaggtcaagttatcagaaaatcttacgagaatgcttacaggtttgaattacgccggacgtctagattatgctatgtctccaagtctgctagaagtggattttatatcagctataaaatcacatgtttcttatttcgaagaaccggatattgcagcgtttatcctaaaagaaattttaagtaaacatgaaaatgcatcagaaatatatgtaaaaagaaagactggttga

SEQ ID NO: 81249 - DNA, 1047 bp, Saccharomyces pastorianus
atgctacggtttactcatcgaggccttccctccagcactcgttttagaaacattttcgtaaggttaaatcacatttatgtaccatggttctatgccatagacgtacccaactccaaaccctatttacccacatatcaaactttacactcacccaaaaagtttaagccgttctccgttaatgattctaatcgtttggaaaaggccagtaaacgtcaagaacgcaggcctgttttagtcaacgaagattacctgtttaaagtcgacctctctcacatggaattgtcccctacctattgggaaggccctacttatcaagtacgaagaggtgtgtggttcgactcttcaaatcaacctttgtccagtgatcttacctccgaaattgaagggttgtataagcagctcaaattcgacgacagtaatgatgatccgaccacgacgcctcctgcagaatcgcaagatatatttaggctcaaaggtaaatacccagtcgataaagaaaacgaaggagagcaaaaaaatggatccagcaataaagatgagaatgaatctactttcaagtttattttgtttgccaataaacaaactacatttttactatcggatttagatggaggaaaactgcaattagcctatctaaggtctaatctggctcaatccttaccgattaatgctacaatgattacaagatcatacaaatatccatcctccgcaactactaaacagacatccacatcttttaaggcagcaaaaacgcctcaaacggaagtagcagatggtagtaacagttccaaatcgaggagcattgaaacaaagttagaaaagaaagtttcaaacctcttcaatttatcggactttttacagttgttcaatggtaatgctagtaaagatcaagatgatgcacagagcttggaaaagcaaatggaaacagactataacaatgcagataacagtcaaggcgctaatactagtagcaaattaaagatggcaaaaattcgggcgcaagcgatagacaaattagaagtaacagaagagatgtggataacttga

SEQ ID NO: 81250 - DNA, 1968 bp, Saccharomyces pastorianus
atgggaaaaccaactgataagtacctgcagtttttcataaaaagatttagtttattgaaaacctttaaagttgaaccgtatttggtcttcgatggtgatgccattccagttaaaaagtctactgaatctaaaagaagggataagagaaaagaaaacaaagccatagctgaaagactgtgggcctgtggcgaaaagaaaaatgctatggactattttcaaaaatgtgtcgacataacgcctgaaatggcaaaatgtatcatatgctactgtaagctaaacggtattcggtacatcgtggctccgtttgaggctgactctcaaatggtatatttagaacagaaaaacattgtgcaaggaataatatccgaagattctgaccttctcgtcttcggatgtcgacgtctcattacgaagctgaatgattatggagaatgtttagaaatatgtcgcgataattttattaaactgcctaaaaagtttccgttgggatccttaactaatgaagaaatcataacaatggtttgtttatccggttgtgactatacaaatggaattcccaaggttggcctgattaccgcaatgaaattagttagaagattcaatactattgaaaggataattctgagtatacagcgggagggaaaactgatgataccagacacatacattaatgaatatgaagctgcagttttagcatttcaattccaaagggtattttgccctattcggaagaaaatagtgagcttgaatgaaattccgctgtacttgaaagataccgaaagtaaaagaaaaagactctacgcgtgcattggttttgtcatacacagagaaactcagaaaaagcaaattgttcatttcgacgacgatatagatcaccatttgcatttaaaaattgctcaaggtgacttgaatccatatgattttcaccaacctctagccaacagagagcacaagttacagctggcatccaagtcaaatatagagttcgggaaaactaatagtactaattctgaagccaaagtcaaaccaatagaatcgttcttccaaaaaatgacaaaattggatcataacccgaaagttgcaaataacattcatagtctaagacaagcggaagacaaactgacaatggcaattaagcgtaggaaattaagtaatgccaatgtagttcaagaaacgttgaaggatacaagaagcaagttttttaataaaccctccatgactattgtggaaaacttcaaagaaaaaggcgacagcacacaggattttaaagaggacacaaactcacaatctttggaagagcctgtttcagagtctcaactatctacacaaatacctagttcttttattacaaccaatttagaggatgacgacaacctgagtgaagaggtttctgaagttgtcagtgacattgaagaggaccaaaagaattctgaaggaaagactatcggtaacgaaatctataatacagatgatgacggtgatggcgatactagcgaggattatagcgaaactacggaatcaagagttcccacgagcagcaccacctcatttcccgggtcatcccagaggagtatatcggggtgcacaaaagttttacaaaagtttagatattcatcatcattcagcggagttaatgcaaatagacaaccactatttcctcggcacgttaatcaaaaaagtagaggaatggtatacgttaatcaaaatagagatgatgattgcgacgataacgatggtaagaatcaaatcacgcaaaggccatcactgcgaaaaagccttattggtgccaggtcacagagaattgtgattgacatgaaaagcgtagatgaacgaaaatcattcaattcatcaccaattttgcatgaggaaagtaagaaaagggacatcgaaactactaagtcaagccaagctcggccggcagtcagatctatctccttgctttcccaatttgtttataaaggtaaataa

SEQ ID NO: 81251 - DNA, 1323 bp, Saccharomyces pastorianus
atggtttacatatacttaatttctctcgttctttctccagtgctagccattatgctttccctactggtcactgttgtcatggtcaacacgttaaagaagtttgtattaccatgccttcccagaaaaaacacttacaaagtttctttgactagaactccctttttcagtggcctctttctgtccactttctgttttttaatatatatatggacgaagaaactctatccatatagtgtatctgactataccatgaaaaacgtccagtttttggttacttcctttctcacagttgtactatttctgagattagtacggtcagatcctggttgtctgaaaacggatgatagtttgacttcgatacaagaaacaataaaacaactgattgacttagggaagtttgatagggaaaacttttgtgttgagaccttagaaaggaagcctttgaggagtaaatattctttctttagcggcgccctggtggccagatatgaccattattgtccatggatttataatgatgttggcttaaaaaatcacaaactttttgtcttctttgctgtgacggtccaatatcacatgtttttgttcatgtggttatgtctggcatattttaagaaaacgaactatatttacgaacaagttgaagaatatgcaaaatgtgccctgctcaagaatgagactttgtgtaagggttctaattacgatccctctaccttttttttattcatttggattagcgtaaacttcatctggctgggggctatgttgattgtccagttcttccagatattaaaaggaatcacgactcctgaattgttcatcttaatcaaggaggagcgcaaggcaaaatttatcaatctgatacccttcgaaaactctacatataccagtaaaagtaaaggtgttgaagatagtgatatgattcctgaaggtccaagtgcgaccaccattactcacacaatttctattgatggtttggaaccaagaaataggcgccgcgccattcttagcgcttgcttttcaatgatgggtattaatcaatggctcgttactattaaggaaatagtaggtataacccacattttgcatggacaggttccacaacaacatcacagttcattgcttcgaagtttcttagtgacaaatcactggaagacgaatttgacggatttttggcttaatagtgatgtaacagcgcccttgtggcaacgatttttctattcttcggatacttcaaaagctatgttgggtggaactgaggttgactactacgagctatacgaatatccggcccgagaaggagaagtattacgtccaaactaa

SEQ ID NO: 81252 - DNA, 936 bp, Saccharomyces pastorianus
atgtcaattattgatgatgagaacgtgaaaaaaacttctaatggggcagctgttgtcactgatgcggctcaacacgctgtaagtgattcggacaataacaaagcgcaacttctaggcgatggatccaacactgaatatgtggttgatattttcattgaagccgctaaggatggggatttaaaagtggtgaaggacgtggtcgaaagtggagcagtggatattaataacgaccgcattggtgaattatccggcttacactgggcctgtataaataataggttttccgtagcaaagttcctattacttaggggagcaaatcctaaccaggcggcaggccccggaggggctactgctttgcactgggccgcaaggtacggtaatatctacattgttgacctgcttctcaaacatggcgctgatccgacgctcaaagatgagcagggtcttaacatcatgcattttagcgtttacagttctaacattttacttgttgtttatgttctttattttgtcgtaaacaacaatgacaacgtcgatatcgattcaaaagataacaataacagaacacccctactttgggctgcttatcaaggagattttctcactgtagaacttttattgaaatttggcgccacagttacatggacggacaacagagggttcaatgctctccattgtgctctagttggaggtgatcaaagggtcatatgtgacttaatacttagcggtgcaaatttctacgaaaggaataaccagaagcaagactgttttgatctagccgaaggaatgggaaccaaatcactttttgaacaagcgttgcaacatcatggatatgacaggcttggaaatcagaaagacaaactgttcaagaaaagctcgcatgcacaattcacaatttttttgtcaccattttactcatggtttacatatacttaa

SEQ ID NO: 81253 - DNA, 672 bp, Saccharomyces pastorianus
atgctattgtcaatacacatcaccattatgaccattcggggggggaacctagcgctttatagtatcttgtgccaagaaaactcaggtcacgatattaaaataattggtggatcgaagtcctccccgggtgtcactgaagtacccgataatttgcagcagtatcacttgggtaacttaagagtaacatgtattaggactccatgccatacaaaagattccatatgctattatatcaaagatttagaaacaggtgagcagtgcatcttcacaggcgacactttattcattgccggttgtgggaggtttttcgagggcacaggaagagatatggacatggccttaaaccagataatgttaagggctgttggtgagacaaactggaataaggttaaaatataccctggtcatgagtacaccaaaggcaatgttagctttattagagcaaaaatctattccgatatagggcagaacaaggagtttgatgcgttggaacagtattgcaaatctaacgagtgcaccactggtcacttcaccctgagagatgaactaggttataacccattcatgagattggatgatcgtgccgttagactagcagtcggcgatactgctgggacttatcccagatccgtagtgatgcaagagttaagaaagcttaaaaacgctatgtaa

SEQ ID NO: 81254 - DNA, 249 bp, Saccharomyces pastorianus
atgaagtttttactgcagcaaataagaaatatgcatgttaagcctataaaaatgcgatggttgacaggtggtgtcaattatagttatttactaagcactgaagacaggagaaactcatggctgattgaccctgcagaaccacttgaggtgtcgccaaaattaagcgccgaagagaaaaaaagtattgatgctattgtcaatacacatcaccattatgaccattcggggggggaacctagcgctttatag

SEQ ID NO: 81255 - DNA, 1671 bp, Saccharomyces pastorianus
atggtaaggttgaaaaaggaactgatgcttgcgaacgaggggaacgaagaagcaatcgccaaagttaagcaacagagtgataagaacaatgaactgatgaaagatatcagcaaggaagaaattgatgatgctgttagtaaggctaacaaaactaattttaaccttgcagaagttatgaaacagaaactaataaataagaaacaccgtcttgaaaaggataatgaagaggaagaaattgctaaggatagcaaaaaagttaagacagagaaagcggaatcagagtgcgatctcgatgcagagatcaaagatgagattgtggctgacgtaaacgacagggaaaactctgaaactacagaagtatcaagagattcatcagtccacagcacagtgaatgtcagcgaaggtcccaaaaatggggtctttgatacagatgaatttgtcaaactattcgaacctggttaccacgaaagatattacacagctaaatttcacgttactcctcaagatattgaacagttaagaaaagatatggtaaaatgctatatcgaaggggtcgcctgggtactaatgtattactatcaaggttgtgcctcttggaattggttctatccgtaccattatgctcctctggcaacagatttccatgggttttctcacttggagataaagttcgaagaaggtactccatttttaccttacgaacaattgatgagtgttttaccagctgcatctggccatgctttgccaaaaattttccggtctttgatgtctgaacctgactctgaaatcattgatttttatcctgaagaatttcccatagatatgaatggtaagaagatgtcctggcaaggcatagcgttgctaccattcatcgatcaggatagactgttaacagctgttcgtgcacaatatcctttactttctgatgctgagagggcaagaaatattcgcggagaacctgttttattaataagtaacaagaatgctaattatgagaggttttcgaagaaattatactcaaaggaaaacaacaacaacaatgttgttgtgaagtttcaacacttcaagagtggtttaagtggtattgtatcaaaggacgttgaaggtttcgaattaaatgggaaaattgtatgtccgattcaaggtgggtcactgccaaatttatctaccaccttgattttaaagatgtcctatagattaattccgttgccatcgagaaataagtctattatactgaacgggttcattccgtcagaaccggtactaacagcatatgaccttgattccataatgtacaagtataataaccaaaattactcccgtcgctggaactttggtaatgatttgaagcaaaatattgttccagtaggaccaaagggtattactcagtacaaaccaagaactggtggctatcgagcattcttttattttgctgagctcagtagaaataatgtccaacccgcccacaactatggtaggaatagctacaacagtcaacccggcttcaacaatagcaggtatgatggtggaaacaataattacagacaaaattcaaattacaggaacaataactattccggaaatagaaatagtggacagtacagcggcaacagctactctcggaataacaagcaaagtcggtatgacaattcaagagcaaataggcgttag

SEQ ID NO: 81256 - DNA, 1212 bp, Saccharomyces pastorianus
  modified_base (1176)..(1176): a, c, g, t, unknown, or other
atgggtgttccgtcatttttcagatggctatctcgaaaatatccaaagatcatatccccagtattggaagagcaacctcagatagtcgacggtgtcatattgccgttggattattccgccccaaatccaaacggtgagttagacaacttgtatttggatatgaatggtattgttcatccatgttcgcacccagaaaacaaaccgcctccagagactgaagatgaaatgcttttggcagtttttgaatataccaatcgtgtgttaaatatggctagaccacgcaaggtacttgttatggctgttgatggtgttgctcctcgtgccaaaatgaaccagcagagagcgcgtagatttaggagtgctagggatgctcagattgaaaacgaagccagggaagaaattatgagacagcgagaagaagttggtgagataatcgatgatgccgtcaggaacaagaaaacttgggattcaaatgcgatcactccaggcaccccatttatggataagcttgccgcggccctccgttattggacagcatttaaactggccactgaccctggttggaaaaacctgcaggtgattatcagtgacgccaccgtcccaggtgaaggtgagcacaaaataatgaatttcattaggtctcaaagagctgatcctgaatataatcccaacacaacgcactgtatatacggtttggatgctgatttaatttttttgggccttgccactcatgaaccacattttaaaattctaagagaagatgtttttgctcaagacaatcggaaaagaaataacttaaaagatactataaatatgactgaagaagaaaaacaatttctccaaaaacaaaattccgaacaacctttcttgtggctgcacataaatgttttgagggaatacttgtccgctgagttatgggttccgggtcttccatttacatttgatttagaaagggctatcgacgattgggttttcatgtgctttttctgtggtaatgactttttaccacatttaccatgcttagatgtcagagaaaatagtattgatattctcttggatatttggaaggtagtactaccgaaattgaaaacgtacatgacctgcgacggtgtcttgaacctcccttctgttgaaacgctattgcaacaccttggctcccgtgagggggatatcttncaaactagacatattcaagaagccagaaagaaagag

SEQ ID NO: 81257 - DNA, 1149 bp, Saccharomyces pastorianus
atgtccaacgcgacaaataatacgttaggcagtcttttgccacagttagaagcagcagctaacagtaattccctttatggtggtatggtaccgaaccttcgttttaatatcacgatgattgtcatttggggtatactactgacaatacatgtcgtacagttactgatgcgccaatactggttttcaatcgcttttatatgcacaggtattttggaagtgcttggattcatagggaggacgtggtcgcattctaatgtcgccgatatggacgcttttcttttgaacatgatttgtttgactattgcaccagttttcacaatgggtggtatttattatcaacttgcaaagcttatagaagtatacggccacaggttctctttattgccctctccaatggcgtattcttttattttcatatgttccgatatcgtatcgcttgtggtgcaggctgtaggtggtggcctgtgtggtgtggcggtcacagatggaacgtccacaacaaccggcaatcatgttttcattgctggtttggccattcaagttgcatcgatggccatctttcttatgttatggtttcacttccttttccgtatatatatatcggtaagatgggaacacataaattctagacctatctcattgagcctcttaaagatatcgcaaacagaagttgattatttatacagggaaaagttccattttttgagactcgaacctaaacgttgggtttttcattattttaatctggcaataaccgttgcggtactaaccatttttacccgttgttgttaccgtttggctgaattagttgtcggttgggatggctatctgatcacacacgagtggtattttattatcttagatgcattaatgatggccatcgctacggtcactttgaccatcttccaccctggatttgcgtttaaaggtagaagcacctcgattccaatcacaccgggccatgttgatcctgaaactttaccacatactgacgatgttgaagatatcttagatacttcggattcaaaacaatttgatattgaaaaggaggaattccaagcaagcatgaaatacccgattagcaccttcaaacaattcatgtccaaaatagctaacttgttttcctctaaaaagaaggctaaactttag

SEQ ID NO: 81258 - DNA, 432 bp, Saccharomyces pastorianus
atgggtagcggtacgttcaattccataatgactaaaaaacattttcgaattattcaagaagagatgccttgggtaactgtatttaaaccgtcagaaaaagtcatgggcataaacggtgacatcgggttaagtgggatgatggatgcaaatgagattgttggcaagatagtcgtcaaactaggtggttatcccgatgtttctgcgggaaaggaagaagaagaggatgaagataacgatgaggaggatgataataagaagaacgatactggtggtaaagatgaagataatgacgacgacgacgacgacgacgacgacgatgatgatgatgacgacgacgacgacgacgatgatgatgatgatgacgacgacgacgacgacgacgacgatgaaggaaaaaagaaagaagataaaggagggctacagcgatcttaa

SEQ ID NO: 81259 - DNA, 1506 bp, Saccharomyces pastorianus
atgacaaacaaatctagcctgaaaaacaataggaaaggggttgcttcgaatactctctctggagctgagcaggccaatataggttcatcggcaatgcctgacacaaattctacgggaccattttcttccgtttctagtctggacactcctgtagtaaggaaatcaactagtcccactggttcacaaactaagtcaatcatgaatgctagcggaacttctggggcagttgtaagtaatacaccagagccagggttaaaaaggataccaactgttacattcagcgatccaaagttgggtagtctcagatcagatgtggagcaaactccacctaaccaggtggccagacagtccagcgaaaagaaagcaacgtctgtacacatcgcagcggagggtgcaaatcaaggaagaaacttgaaagacataaatacaaaagtaccaaaagatggcgaggcttctgcttcttctttttcgactccaacctctattctctccaatgctgatatggggaataacatatccagcctgctggctaaaaagctaagtttcaccggtggaacagattctattttaaactctgacaatagttccgatagccccagaaaggagcacccacatttctacgtggaagatcctttgcataccccatcggttagatcaaggtctaacagtactagtcctcgcccctctgtggtagtgaatacgtttaaccccatcaacattgaacgagagggctccatatcaaagactggagagcccacattgttggagtctgtcttggaagaagcaatgtctcccaatgcagtctcaaatcccttgaagagagaaaatattatgaccaatatggatccaaggcttccccaagatgacggcaagctacacgttctttttggggcaacaggttctttgtctgttttcaaactcaagcacatgatcagaaaattagaagaaatttacggaagggacaaaatatgcatacaagttatactaactaactcagcaaccaaattttttgcaatgaagtatatgaggaaaaataagaaacaacacaatagtatcgatacttctttcaacagcaccaattctaatgctggcaatataactggtaacaagaaaaaagtagcctctcttgaaaaatttagcattcagaagacgtcttcaaactcagcggcttctcagacaaataataaacaggaggaagaaaaacaaatggcctctactactggatttccttcgacacttggtggtagtcgtacgtacagcaactcttcaaacgttgtatcgcaacatcctcaaattgaactgccagcacatatacaattttggacagaccaagacgagtgggatgtatggcgacaacgaactgatcctgtattacacatagaactacatcgttgggcagatatattagttgtcgcaccattaaccgcaaacacgttggccaagattgcccttggtttatgtgacaaccttttgacagtgtataaggctggatccgggatcctctag

SEQ ID NO: 81260 - DNA, 756 bp, Saccharomyces pastorianus
atgttgaaattaccgtacgtccacacttttgctacaaagtttattaaacctcctctgatccctcagaatatcaaggaaattaatgaaaggctcgcggcaaacaacaatggaagtaaaggtctagttcaagacgtattttttgttattctccctcaaattcctccaaaattaacgtttattttgacgatattttatcaggtcttagcagtacttccacttttgtttgatccatcgttcaaaagatttgttggctcgttgactctctgtgggttggcatcgtttttgttcgggtggcatgtgcatgagaaagctataatgctagtcatcattccgttcacatttcttgttggatttgatcgtcgtcttttggtaccgtttatgttagttgcctcagctggttatgtttccttgtatcctcttctgtacaaaggccaagattttttcattaaaacattatacacttatgtttggtgtataatttattttgccgcttttagaaaaactacgaagatttcttcaagtgtagaaagaagaatctttttcttggataggttggcattaacgtacatcttttcattgttaccaatcgtcaccgtattacaaatattggatgaagtcaagtggagatattcatttttgcaaaaatttgaattcttaggattaatgatatatagtgtctattgttcattaggtataatcagctcgtggtttgccttatcgtggttatataattttgacgaattactatggcagtga

SEQ ID NO: 81261 - DNA, 159 bp, Saccharomyces pastorianus
atgccgcaagtgttgagcaggttattcccattctcaagaggactgacgcatgcatattgggcaccaatttctgggcgttgtattcttttatggataaatactcactacggtaatgttgaaattaccgtacgtccacacttttgctacaaagtttattaa

SEQ ID NO: 81262 - DNA, 147 bp, Saccharomyces pastorianus
atgaaaggtgatcgttcgaggcaaaatatggctgtgacaaagaagccaaagttaaaaaaaaatgacgagccaaaaaaggttttgaagactgccgcgaccgaaaaaggtgagggatccaagcgctactccttatggaattctggataa

SEQ ID NO: 81263 - DNA, 2028 bp, Saccharomyces pastorianus
atggactacgaggataatctagaagcacctgtttgggacgaactaaatcatgagggagataaaactcagagcctcgtttcaaattcaattgaatcaattggtcaaatatctacaaatgaagaaagaaaagacaatgagcttttagagaccacagcttcatttgcggacaagatagacttggatagtgcgccagaatggaaagaccctggtttgtcggtggctggtaatccgcaactagaggagcatgacaattccaaagctgacgatcttattaattctttagcccctgaacaggatccgattgctgatctcaagaatagcactacacaatttattgcaacaagagaatccggtggcgcattgttcactggaaacgccaactctcccttagtttttgacgatacgatatacgatgctaacacttcaccaaatacttcaaaaagcatctctggaagaagatccggcaaaccacgaattctgtttgattccgccagagctcaaagaaactccaaacgcaaccattctctgaaagcgaagagaacaactgcttccgatgataccatcaaaacaccctttactgatcccttaaagaaagctgaaaaagagaatgaatttgttgaagagccattggacgataggaatgaaaggagagaaaacaatgagggcaagttcacagcttctgttgaaaaaaatatccttgagcaagtggacaggcctttatacaatcttcctcagacaggtgctaatatttcaagtcctgctgaggtcgaggaaaactcagaaaagtttgggaaaaccaagattggctcaaaggtgccaccaaccgaaaaggctgtggcttttaaagttgaagttaaagacccggtcaaagtaggagagctaacatccattcatgtggagtatactgtaatcagtgaatcatcattacttgagctaaaatatgcacaggtaagcaggcgttacagagatttcaggtggctatatcgtcaattgcagaacaaccattggggtaaagtaataccaccaccaccagagaagcaatcagtgggcagttttaaggaaaatttcattgaaaatagaagatttcaaatggaaagcatgttaaaaaaaatatgtcaagatccggttctacaaaaggacaaagattttctactctttttgacaagtgatgactttggttcagagtctaaaaaaagggcatttttgactggatctggcgctattaatgatagcaacgatctgtcagaagtccggataagtgagatacaactactaggtgcagaggatgctgccgaggtcttaaaaaatgggggtatcgacgcggaatcgcacaagggattcatgagtatatcgttttcatcactgcccaagtacaacgaggcagatgaattctttatcgaaaagaaacaaaagatcgatggactggaagataatttaaaaaaattgagcaaatctttggaaatggtcgacacctcaagaaacaccctggctgcatcaacagaagaattctctagtatgatagaaaccctagcgtctttgaacgtgagtgaacctaattcggaactgctgaataactttgctgatgttcataaaagcataaaaagctctcttgagagaagctctttgcaagagactttgacgatgggtgtgatgctggacgactatattaggtcattggcaagcgtaaaagcaattttcaatcagagatccaaattggggtatttcttggtagtaatagaaaatgacatgaataagaaacactcacaattgggcaaattgggtcaaaatattcattcagaaaaattcagagaaatgagaaaggaatttcaaacattggagagaaggtatgaccttacaaaaaaacaatggcaagcggtaggagataaaataaaagatgaattccaaggtttctctactgataaaattcgggaattccgaaacggcatggaaatatcactagaagcggccattgaatctcaaaaagaatgcatcgagctttgggagacattctaccaaaccaatctttag

SEQ ID NO: 81264 - DNA, 138 bp, Saccharomyces pastorianus
atgagtagaagatacagagatgacttgacagtaacagtggcgttctttggtgattccggaacaccctcaaccgtctccaatgctacttcaatagttatgaacccggaggcaacaacaaagccaaaacctagattatga

SEQ ID NO: 81265 - DNA, 252 bp, Saccharomyces pastorianus
atggcttccgatggtttattcgaactactaactaatgaagaaattgcttccttggttatcaggtggatggatacaaatatgcatctggcacctgtgaaagcagaaccggggaattaccaaaagttatcgatgtatctgaagacaaggaagcgcaaagaccggcattcaggtacaaggataataattcgagctcaccatcaggatcaaacccagagtatcttattgaagacaaaaacgtcgccactcatttaa

SEQ ID NO: 81266 - DNA, 1134 bp, Saccharomyces pastorianus
atgtctcccttaactagaaccgtagctataaagaaaacggttaaggttctatctaaatgtcaatctggtagagaatacacacagaagtttctacaacgtgcatattcaacatcacatgccaatagcacatactattcaaggacaaagctattcatatcatcacattctaaagctctaaacattgctctactaagcgggtccctactgttgacctactcctactattcccctaaaaagatcctctcccttgatacaattaacggaataaaagattattctacaaatactagtggtaatattaacatgccgtcacctaatccaaaaggaacagagacacaaaagagtcaacggtctcagaatgaccaatctgttcttatcttgaacgattctaaaatagaggctaaactacatgatagagaggaaagccattttgttaaccgtggcactggtatattcaggtatgatgtggcacagttgccctctaaccatccaatagaagacgatcacgtagaacaaatcattaccattccgatagaaagtgaggatggcaagtccatagagaaggatttgtatttttttggaatttttgatggacatggtggtcctttcacttcggaaaaattatctaaagatctagtccgttatgtagcctatcaattaggtcaggtatatgaccagaacaaaacggttttccattccgaccccaaccaattaatcgattctgcaatttcgaaaggttttttgaaactagataatgatcttgtaatcgaatcgttcaggaagctgtttcaagatccaaacaacacaaatattgcaaacactttaccagcgatttctggttcttgtgcactattaagtttatacaactccactaactcaattttgaaagtggctgtcactggagactcaagggctttaatttgtggtttggacaacgagggcaattggacggtaaagtcgctatccaccgaccagaccggtgataatttggatgaagtacggagaattaggaaagaacatccaggagaaccgaacgttataagaaacggaagagtattgggttcattacaaccatccagggcatttggagactatcgctacaagatcaaagaagtcgatggaaaaccattatcg

SEQ ID NO: 81267 - DNA, 1506 bp, Saccharomyces pastorianus
atgtttcccaatatcagcgatctacccatcgcctatttgcaatccatggaccaagggtttatctttacagaagcagaaggtgagaaaggtgttgccaacgttatcatctttctggccatgtttttgatatgtgttttcaatttaggtggtttcagactaattgaaaacgatttccattacaaaggtgatgacgatgaagaaaatacgttgaccaatgatgattctgcccaacagccaacgcaaccaattgaaggcaattcttcttcttcatccaaccaagatatcctgaaagagcccaacgagtctaccgttcctaacagttcacaagcaagctacatttctgagaaaaataaaaaagaaaaaactgaactctctgtccccaagcctacacatactgctcctccagcaatagatgacaggagctcgaactcatccgcggtggtctctatcgatagcattacacactcactacgcacaaaccatgtggatgcccaatctgtaagcgagcttaacgatcctacttacagaactagaagtcaaccaatagcatacactaccgagtcaagaacatcacatgttcataataaccgcaggaattccatcactggctccttacgttccatcgatatgcgtgaactacccgcggaaggcatgtcggatttaattcgtgaatactccaatgttgatcaatacagtagaagaaggaaaagttctatcagctcccaaggagcaccctctgttttgcaggcagacggtactatttctccaaatttgactagaacctccactttacaaagagtcaaaacttccaacctaacaagaataatcacctcagatgccactgttagtaagaaagatattgagacttccggttcctctttaccaaaatggctacagaaatttcccttaacaaaatttttcgtcttttttttaaaaaattgtctaaggccttgttccatggctgttatcctggctttgattatcgcttttattccctgggtaaaagcccttttcgttacaaccagtaatacaccaaaaatcaaacaagccccagataatgcacctgctctaactttcattatggattttacatcttatgttggagccgcttcagttcccttcggtttgattcttttaggcgctactcttggtagattgaaaattggaaaattataccctggtttctggaaatccgcagtggtattagtctttctcagacaatgtatcatgccaatctttggtgtcttgtggtgtgaccgtctagtgaaggcaggatggctaaattgggaaaacgacaagatgttattgtttgttaccgctattacttggaacttaccaacaatgaccaccttaatctacttcactgcaagttatacccctgaggacgaaactgaacccgttcaaatggaatgtacctctttctttttgatgcttcaatatcctttgatggtcgttagtttaccatttttggtgtcttatttcatcaaagttcaaatgaaattataa

SEQ ID NO: 81268 - DNA, 102 bp, Saccharomyces pastorianus
atggaatgtacctctttctttttgatgcttcaatatcctttgatggtcgttagtttaccatttttggtgtcttatttcatcaaagttcaaatgaaattataa

SEQ ID NO: 81269 - DNA, 2430 bp, Saccharomyces pastorianus
atgaatgatttaactgaccaaattttcagaattctttggatttttcataaaatccaaccaatgtgcattttagttgtgccgagagatactttacctaggagatattgttctctggaattggccaatagcacggtagagaagaagtttttaaacaatgatctcagtgcacagtttgtaaagtttcaattcgataatgtcatattggattttttgccccattcagcgtactataatgagagtatattatccgagcatttatcaaaattgagaaagatggctttacaagaaaaatacgctatgatcgaaccagcatatcgtaatggcggtcccgttaaaccaaaacttgccctacaatgcagtggtgttgattacagagaggagtctgttgacactcgaagccatacaaaactcacagacttcaaatcgattttagagattctggaatggagaatttctaattatgggaacgaaacggcgttcagtgatggtacaaacacaaatctagtcaactcttcagctagtaacgataataacgttcacaaaaaggtatcatgggcaagttttggtaaaattgtcgcaggctttttgaaaaaaatcgtaggttctaaaatcccattgaagcatggtgaccctattattattatgtgtgaaaattcggttgaatacgtagcgatgatcatggcctgtctgtactgtaacttattggtaattcccctaccaagcgttaaggagtctgtcatagaagaggacctaaaaggcttggttaatattattcaaagttacaaagtgaaaagattatttgttgatgctaaattgcactcattgttgaatgataataatttcgtaaacaaatgttttaagaaatacaaaagtttaatacctaagattacagttttctcaaaagtcaagacaaagaatgcgttaacagtatctatgtttaaaaatgtgttaaagcagaaatttggggccaaaccaggtactaggattggtatgacaccgtgtgttgtatgggtaaatacagagtatgatgtgacatctaatattcacgtaacaatgacacattcgtctttacttaatgcaagcaaaatagtcaaagaaactttgcagttaagaaataatagtccacttttctctatatgttctcatacgtctggattgggctttatgttcagctgtttgttaggaatttatacgggtgcttcaacttgcttattcagccttactgatgttcttactgaccctaaggagtttttaattggccttcaaaatttaaacgtaaaagatttatatttgaagcttgaaacgttatatgctttactggatagagcctctagtttgattgagggattcaaaaataagaaggagaatataaactctaccaaaaacaatacatctggctcgcttagagaagatgttttcaagggtgttcgaaatatcatgataccttttcctagtaggccaaggatttatacaattgaaaatattttaaaacggtactcaaccatatccctatcatgtacacaaataagttatgtctatcaacatcacttcaatccgcttatatcattaaggtcgtatctggatattcctccggttgacctatatttagacccattttcactgagggaaggtataattaaagaagtcaaccccaatgatgtaagtgctggaaactatatcaagattcaagattctggtgttgttcctgtatgtactgacgtttcagtagttaacccagagacactcctaccatgtgttgatggagaattcggtgagatttggtgctgttcggaagctaatgcattcgactactttgtgtgtaacagttcaaaaaacaagttgtacaaagatccctttatcacagaacaattcaaaagtaagatgaagagcgaagtgaataacactttaagctatttgagaactggtgacctgggctttatcaaaaacgtaagttgcacgaattcacagggagaggtcgtcaatttgaacttgttgtttgttttgggaagtattcatgaatccattgaaattttaggattgacacattttgttagtgatttggagagaaccgttaaagatgttcacagtgacattggtagttgtttgattgccaaagcaggtggattattagtgtgcttaattaggtgtaaggaacgacataatcccatcttgggtaacctaacgactttaattgtttcagagttgttaaataagcatggtgtcattttagatttatgcacatttgtgagaactaaaggtataagcccaaaaaattctagtatgataatggaagtttgggcgaaaaatagagcatcgataatgcaagcctggtttgatcagaaaattcaaatagaagcacaatttggcataaactatggtgaaaatatttccatttatttattatcagattatgaaaaggacaatatttaa

SEQ ID NO: 81270 - DNA, 1029 bp, Saccharomyces pastorianus
atgaagtcgacagcaagtacagcggcagcaaatacggagaagctatcgaatggcttttcctttacaaagttcaatcacaataaagaaaagtcaaactctccaacttctttcttcgatggttctgcttcctcaacgccgattcctgtcttgggtaagccaacagacgctactggtaatacaacatctaaatctgcattttcattcggtactgctaacaccaatggtaccaatgcctcagcaaactccacatcattctcgtttaacgcccctgctacaggtaacggcacaactactacttccaatacctcaggaaccaatatagcgggtacatttaacgtaggaaaaccggatcaaagtatcgctagtggcaatacgaatggagcgggctcggcatttggcttttcgagctcaggaacagcggcaactggtgcagcttctaatcaatcttcatttaattttggaaacaatggtgcagggggtctcaatccttttacatcagcaacttcgtcaactaatgctaatgctggtttattcaataaacctccttccacgaatgcacaaaatatcaatgtgccctctgcttttaattttacgggaaataattcaacgcctggtggcggctctgtatttaatatgaacggcaacactaatgctaatacggtgtttgccggctctaataaccaaccacatcaatcgcaaaccccatctttcaatacaaacagctcattcacgccatcaacagttcctaatattaattttagcggattgaatggcggaattactaataccgcgaccaatacattaaggccaagtgatatatttggtgcgaatgctgcctctggttctaattcaaacgtaacaaatccatcatccatttttgggggggcaggtggtgtgccgacaacttcttttgggcagccgcagtcagcccctaatcagatggggatgggaacaaataatggcatgagcatgggcggtggtgttatggcgaacagaaagattgcaagaatgaggcactctaaaaggtaa

SEQ ID NO: 81271 - DNA, 1932 bp, Saccharomyces pastorianus
atgtcttcaaacacttcttctgtgatgtcttctccacgtgtcgaaaagagatcgttttcttccactttaaaatcattcttcacaaaccccaataaaaaacggccatcgagcaagaaagttttcagttcaaacctctcatacgcgaatcatttggaggaatcagatgttgaagacacactgcatgttaataagagaaagagggtgtccggtacatcacagcatagcgacagcttaactcagaacaacaataatgcgccaattataatatatggaaccgaaaacactgagagaccgccgcttttgccaattttgcccattcaaagactgaggttattaagggagaagcagagggtgagaaatatgcgtgagcttggattaattcaatcaactgaatttccatctattacatcgtcggttatattgggctctcaaagtaaaagcgatgagggaggatcgtacctatgcacatcatctactccttctcctattaaaaatggttcttgcactaggcagttggccggaaaaagcggtgaagacaccaatgttggactacccattctcaaatcattgaaaaatagatccaatagaaaaaagtttcatagtcagtcaaaggggaccgtgtggtcagcaaattttgaatatgatttgtcagaatatgacgctatacaaaaaaaggataacaaggataaggaaggtaacgctggcggtgatcagaagacaagcgagaatagaaataatattaagagtagtatttcaaatggcaatctggctacaggccctaacctgacaagcgaaattgaagacctacgtgcagacatcaactctaataggttatcgaatcctcaaaaaaatctacttttaaaaggaccagcttccacaattgcaaaaactgcccctattcaggagagctttgttcccaattcagagcgctctcgtacgcctacgttaaagaaaaatattgagcccaaaaaggacaaagaaagtattgttttgcccaccgtaggttttgactttatcaaggacaatgagactccatctaagaaaacttctcctaaggcagcttcttctgcaggtgcagtctttaaatcgagtgtagaaatgggaaaaaccgataagtcaacgaaaactgccgaggcgcctaccttatcattcaattttagccaaaaggctaataaaactaaggctgtcgacaatactgtcccttccacagctttattcaattttggtggtaaatcagataccgttacttctgccagtcaaccttttaaatttggaaagacatccgaaaaaagtgaaaatcatacagaatcagacgcgcctccaaaatcaactgctccaatattttcttttggtaaacaagaagagaatggtgataagggtgatgatgaaaatgagcccaaaagaaaaaggcgtttacctgttagcgaggatacaaacaccaagcctttattcgatttcggcaagaccggtgatcaaaaggagaccaaaaagggagagtcagaaaaggacgcatcagggaaaccaagctttgtctttggtgcaagtgataagcaagctggaggtacaccattatttacattcggaaaaaaagctgatgtaacaagcaatattgactcctctgcacaatttacctttggtaaagccgccaccgcgaaagaaacacacaccaaaccatctgagacacctgccacaatagtcaagaagcctactttacttttgggcagtcaacaagtgaaaataagatctctgagggaagtgcgaaacctacattctctttctctaagtcagaggaggaacgtaagagtagtccaatttcaaacgaagcagctaaaccctcgttttcgtttccgggcaagcctgttgatgttcaagcaccgacggatgataagactctcaagccaactttttcttttactgaacctgctcaaatag

SEQ ID NO: 81272 - DNA, 711 bp, Saccharomyces pastorianus
atgggtgagaagagaatcatctacggtgattctatctcttacagacacatgtgtcgttttgaatcaggcttcttttacagacatcctttgatggatgactacgattggtattggcgtgtggaacctgatatcaagttgcactgtgatatcgactacgatgtcttcaaattcatgaaagacaataagaaaaagtatgcctttgccatttccattaaggagtatgaagctactatccccactttatgggagactactcgtaaattcatggaatcccatcctgagcttatccatgaaaataatatgttagactttgttagcgacgatcagggactttcatacaatttgtgccatttttggtctaattttgaaattgctgctttggatttgtggagatctccagcatactccgcatattttgattatttagatcatgaaggtggattcttttatgaaagatggggtgatgctccagttcattctattggtgctgcgctgtttttggaccgctctgaaatccatcactttggtgatattggttattaccatgttccatttcactcctgtccaatagacacaagtatcagactggctaacaaatgtgactgtgatccaagcaaagatttcacatggcacagttattcatgtactactaaattctacaatataaacaagttgccaaagcctgctggttggcaaaaccatatcggttga

SEQ ID NO: 81273 - DNA, 1572 bp, Saccharomyces pastorianus
atgcctgcaggtcaattccacaagttgatcaacatcggtttcaaagaaatcgaagtgtctttcccctctgcatctcaaacagatttcgacttcaccaggtatgctgtagaaaacgctccagatgatgttggtattcaatgtcttgtccaatctagagaacacttgattaacagaaccgtggaagcattgactggtgctaaaagggctaccatacatacttacttggccacaagtgatatgttccgagaaattgtctttaatatgtctagagaggaagctatttctaaagctgtagaagccaccaaactggttaggaaactaaccaaggatgacccttcccagcaagctactcgttggtcctatgagttttctcccgaatgtttcagtgatacgccaggtgaatttgctgtagaaatttgtgaagctgttaaaaaggcttgggaacctaccgaggaaaatccgatcattttcaacttaccagctactgtagaagttgcctctccaaatgtttacgctgatcaaattgagtacttctctacccacattactgagcgtgagaaggtctgtatttctacgcattgtcacaatgaccgtggttgcggtgtcgccgccacagaattaggtatgcttgcaggtgctgatcgtgtagaaggttgtctatttggtaatggtgaacgtacaggtaatgttgatttggttacagttgccatgaatatgtatacccaaggtgtttctcctaatttagatttctcagatttaacttcaatttctgaaattgtccatcgctgtaacaagattccaattcccccaagagccccatatggcggtgaattggttgtttctgccttttctggctctcatcaggatgcaattaagaagggatttgcaatccaaaacaagaaacaggctcaaggagaaactcggtggagaattccatacttaccattggatccaaaggatattggacgtgattacgaagctgtcatcagagtcaactctcaatccggtaagggtggtgctgcttgggttattatgagatctctaggattagacgtaccaagaccaatgcaagttgatttctccaatactctacagaaaaatgcagatgccttaggaagagagttaaaatccgaagagattacaaaattgttcaaagaaacttacaactacaacaacaatgaacatatatacgtcaccttgttgaattacgaagttaagaaattgaacccagagcgtagagctttagtgggccaggtagaaatcaacgataaagttgtcaacatcgaaggctacggaaatggtcctatctcttctttgatggatgcgctatccaatttactgaatgttaagttgagcgttcaaaactactctgaacattccttgggttctggttccgcaacccaagcggcatctttcataaatctttcctacataaaggacaacaataatcatgctaccagtaatatgtggggtgttggtgtctccgaagacactggggatgcatctattaaggcggtatttgctactgtcaataatattattcattctggggatgttctactggcagagtaa

SEQ ID NO: 81274 - DNA, 264 bp, Saccharomyces pastorianus
atggtaaaacattcgttcatagagctagctgagcatgctagtaaactaagaaggtctatcccacccgtcaaactgacttataaaaatatgctacgggacccatcggtaaaatatagggcgtttgctccaccaaaaatggtcaagaggatttggcctgacaaaactattcaaaaggctccacgttggctgtctactgacttgagggacggtaatcaatctttaccggacccaatgtctgtggctcaaaagaaagaatatttccac

SEQ ID NO: 81275 - DNA, 588 bp, Saccharomyces pastorianus
atgggaatcaccgatttaaaaacaatggtttctacttttgaagagaatcttgataaaatgaattattctaccgatccgattggatatgtgtgcgatactagctggcataaagcgcagaatataatcgagattttgacagattacgaagatgaaaacccaaatgaaattgataaacctaagcttatcatatgtgcagacacaattattatagataagaatgggagaatctacgagaagcctaaaacaaaagaggtccaaaagaagtttttaatgaagttttgctatgaagatgatgaaccagttaacgttgtcaccgctgtgactttaattaaatggtacggcagagaaaactttgaattggtaccattccgagatgaaaccaaggtatactttgataacaaaatacctttgagaatattggaagaatatgtagaaagcggagatgggctagaggttggcggtggatttaaaatacaagggcaaggtgctattctaattgaaaaaattgaaggtgattactataacgtagttggtttaccgctcaataaaacgttcaaaggactctatgctgaggctaattccatataa

SEQ ID NO: 81276 - DNA, 1377 bp, Saccharomyces pastorianus
atgacacaaagcatcagtagtgctgccagccctataggcatgaacttcaacgcatcacataaactagtaccattcttagcgattgttttagacctaacttctgaaacgaacacctttccagttggtttcaacgaccttatcacccaaagttttaaactgccagataggcaagtaagatttcttttactaatatacctacccaaattaataggtccattgagcaaatcagagatctccagtaggatatatccacattttatccaaggtctgaccgactctgatgtcactcttagattacaaacactgaagacaattccatgcattgtgtcatgtttaacagagagacaactgaataatgagctactgaggtttctcgcaaaaacacaggttgattctgacgttgaaatccgaatatggacagtcatcataataagtaaaatctcaaccatattatcaacgtcagttggtaatcgctcgaatattttagctacggcattcacaaaatctttgaaagatcctcaagtaaaaccaagattggctgctctttatgggcttgagaagtcgattgagctgtttgatgtgaacacaatcgccaacaaaattttaacagtcattgcccctggtttattagataaaagtcccatagtaagaggcagagccaaaatcctgttcgaagaatatctggaaaaattggaaaaagaagcccaacttattcaaacaaacgatagtactgcagattcggaagatgtgaaagatattgattttgagaattacggttgtgatgaagaggatatgaataaagaagacaatttgttagccgcacaatttttaaataatttacgtttaaattctccctcagcaacgacaccaagtaacattaccgagagcgaaattgattccgcccaggacggaagtggatgggacgacctcagcgataccgatggctttattacaaatggtaccacagaatccttcgatgaaccaacaaaccctgtaacaaccgcaaacaccccaaaattattcggaaaacctattaaaattaataaaagttggaatgatgagttgaatgatgatggctggattcaagatgaaagcggcccatcgaaggtgcctcaaaaacacacaaggccacaaaattcaacgttggcaaaatccatcgctcctagctcaaggctttctatcaagaagaagaaaacaacgatcctagcgccaagaaacattgctagtaactctactgttaccaccaaatcgtcgctgtccaataaaactgcaagaagtaagcctataagtagtatccgcggctcggtaaccaagaaaggaaatgttgacggctgggatgatgatggggattcagactcctgggatacgaattggtga

SEQ ID NO: 81277 - DNA, 912 bp, Saccharomyces pastorianus
atgaatttttccagcattttcaaatctatttcgaatttccagttcccatacaccatagaggaaactgcaatcactgaaaccgccctttggcaatgttccgatggtataaggaaggcagattccttgccagtaacagtttttaaggcaaaaagatctccagaaaatgaatctttaattttaaatgctgtacacaagagcaaaattttgaagattccaggactttgtacggtgctggagacatttgattccgacccccaatccacatttattgttaccgaacgagtagttccatttccttgggataatctaggctctttatctcaaaacaaatttggtgttgaattaggaatatcacaattattggcaactttaggatttttaaaaaactttgtccttggtacgctttctaaagattctgtttttatcaatattaagggagagtgggtactatttgggctagaactttgttcaagcaaagaaggattaagtgcgtttgaatttgccagtagagcgaggtcatattacaacataattggctcacagttgccctgtgaagatccgaatacaattgattcaatggggttaggattgttgataaagagtcttatggctccttcttgtctgcccaaagattggattgtcaatgtaaatatgatttcagatggaaagataacaatcgaaaacttcagaaaaaggctagaaaatacagaaacttggcgttctaatcctttgataaacctttatcaagaattgagggagttgcatataaaggacctacagggaaaattggttgtgatgtcaaacttggaaaatttgtatctagagtcaagagagatttccgtaaatttaacgcctggaatgatagacaattttattattccagagcttcgtgacattatcacacattcttaa

SEQ ID NO: 81278 - DNA, 2118 bp, Saccharomyces pastorianus
atgcagcagtcacagcaaccgcagttccagcctagcagtagaagagaatcaaactctatgagacctccactgttaatacctgcagcaactactaaaagccagtccaatggcaccaataatagtgggaatatgaacataaatacagattatgaatcattttttaatactggtacaaacaacagtaattctaatcagaacccgtactttttgagttcaagaaataattctttgaagtttaatcctgaagatttcgattttcaattcaaaaggcggaattcttttgttagaggtactttggactatagcagccaaaatgcgtttatacctgaatcaagattaaactcactatccgttaacaacaaagctaatggtgatcctgtcgcggataatgttaccaacaacatgaaaggaaaaagtaatgaagttgacaatgatgatggcaatgacagtagcaataacaataacaacaacaacaacaacaacaacaacaatgaaaacaacaatgataacaataatgataataacgacaatagtattaattccgccaccagtactaatatcccaaaccaagaggaccatagccttgcttctaccgataccacgagcaatagtaggaaagatctaaaagaaatagaacaaagacttcgaaaacatttgaatgatgaggataattactctagtgctatatcaagaccattggataaaaacgacgtaattgaaggcagtgagggattgaacaaacatatagacgagtctggtatgcaatctaatattatcaagaaaaggaaaaaggatgattctactgtgtacgtcaagaatgagatgccccgtactgatcccccgatgagtaaagacaattctacttctgctgaaggggcagcaatggcaaacttttctggtaaagaacctcctatacctgacataagttcagtaagtgatgatgctactaacctgataggtgcaacaaaggtcgaccaactaatgttgattattcaagcaagaaagaaaggtttcacggagaaagtaaataccactcaagatggagacttactgtttaaccaaacgatggacattttaccagctaaaagcgagctagtaggtggtgtggagaaaccaaaaggcacacaaaatacacgagcagttaaaaaacatgaatgtccctattgtcatcggcttttttcgcaagcgactcatctggaggttcacgttcgttctcatatagggtacaaaccattcgtttgcgattattgtggcaaacgttttactcagggtgggaacttaagaactcatgaacgactacacacaggtgaaaaaccgtattcatgtgatatttgtgataaaaaattttctaggaaagggaacttagctgctcacttggttactcaccaaaaattgaaaccatttgtttgcaagcttgaaaactgcaacaagaccttcactcaattaggaaatatgaaggcccatcaaaatagatttcataaggaaacattgaatgccttaacggcaaaattagctgagatgaatccatctgagaacattccacttgaagagcggcaacttttggagtactttgcgtccatttataaaaattcaaacaggggaattaaaggtagaggaaaaggtgtaggaaccaaaaaatcaacaatttcctcaccagaaaaccatcctgcgagcacaattttaaatccaaatacaaatgcaaataatgttattgctaatgattctgaaaataacggcaaccctgaaggtaacattgacagcagtagtaacagcaatccgggctcacatagtatgatttcgccgacgcaaaaagacatgggtacgttgcaatcacaatttatccaaaataattttaataattctgtgaacagttcgaatccgtccaaccaaccaatcataaactacaattacaccacacttcctcattctagattaggaagtagtagttccagcaataccaacaataataacagcaacttttcggtaggtgcagctccgggtgtattaatggcgccaaccaccaataatgacttcagtttcaacttggatcaatctaatgataatgaaagatctcaacaagaacaagtgagatttaagaacattaattacaaaagctag

SEQ ID NO: 81279 - DNA, 675 bp, Saccharomyces pastorianus
atgcctcctccaactgcacagttcatgggccctacgcaggcgggacaaaatgaaagccaaaatcaatcatcaggcgaagctggggagcaaaaccaggagcatgggcaaggccctactcctattcttaatcaaagtcaaccggcctcttctcaaccgcaacatcaacaacaaaggaatgagtcgatttcatattatacaaatttcaaccagccacgatattccacggacgcctctatcaactcattcttgaacatatctgataacgtaccagtaacaagtacaggaggacctagttctggcggcgcctattccaatcttccacgattatccacttcaagtacacatcaaccgccagacctgtcgcaaatcggacgcggcttttccattgtaaacaacctcttcccacaacaacagcagcttcaaaatcagcatcggcaacagcagcagtcgcatcagcagcctcccttcaagaccccttcattttcgacgggattaacgggaagttcttctcaatatcaatttttaccaagaaatgataatacttcgcagccaccttcaaaaagaaactctgtttatcttggacctaatgatgggcctgatttgaatttttcagtatgcagcagtcacagcaaccgcagttccagcctagcagtagaagagaatcaaactctatga

SEQ ID NO: 81280 - DNA, 669 bp, Saccharomyces pastorianus
atgctgttgaacgagatggttcctctagctatgggcattgagaggcgaatatcaggcgatgttatcagttctgatagcaatgtaacttccgaaaatggtaacatcaacaatatgataaagagactgaagatagaggaacatcatacagtagatatcatacgttctcataacttgatacatgagctgtataaggcagatgaagaggaaaaagaaaaggttttagcaagactgaggaatattgggtttcaaatcggattgaagctgtcagagttattgatattttctaacaacccaaatttaaaattcaaggaaatggaccttctattaataatgaagttcatttgtagggatgtctggaaacaaatatttggtaaacagatcgataatttaaaaacaaaccacagaggaacgttttaccttcttgattatgactatcgacctattcaatcattttctttggaagaagatgcaaaaaacgaggagttaaaaatgatagaaccgtttttggagatacctgtgggaattattagaggtgtgttgtcttccttaggttattcatctgaagaggttatttgcttggcgtcttttatcgacaggccaacagataggcctaaaacagcttttcccaagggagttagcttccatgttcaagtcacaataccgcagtaa

SEQ ID NO: 81281 - DNA, 120 bp, Saccharomyces pastorianus
atgtcctctacacatagtaataatgtaggacatccccaatcttctccacaaggtccactaacggaacaacaagagcacaacagcaatatcaaatttttgagaattcattaccaaaagtaa

SEQ ID NO: 81282 - DNA, 1302 bp, Saccharomyces pastorianus
atgttaggcctattagaacctcctgcaaaagaattacaaggtattgatccagatgaaaccgttcctaataatgttaaaacatctgtaagccaactttatagaatcagtgaaaaatcggtgagaaagtttttagagattgctcttttcaaatatcgtaaggcaagactggagccaggtactgctattggtgccattggtgctcaatccattggtgaaccaggtacacaaatgacattgaagacctttcattttgcaggtgtggcttccatgaatgttacattaggtgttcctcgtatcaaagaaattatcaatgcttccaaggtcatttctacacctattataaatgctgtattagtaaatgataacgatgaaagggctgctagggttgttaaaggtagagtagaaaagacactgctatctgacgtagctttctatgtccaagatgtttacaaagacaacttgtctttcattcaagtgcgtattgatttaggtacgattgataaactacaattggagttgaccatagaagatatcgcggttgctataaccagggcttctaaattgaaaatacaagcctctgatgtcaatattattggtaaagatcgaattgcaatcaacgtattcccagaagggtacaaagcaaaatcgatatctacatctgcgaaagaaccaagtgagaatgatgttttttaccgaatgcaacagttacgtcgtgcgcttcctgatgttgttgttaaaggtttacctgatatttctcgtgcggttattaatattcgcgatgacggcaagagggaattattggttgaaggttacggcctgcgagatgtgatgtgtacagatggtgtcattggttctagaactacaactaaccatgttttagaagtcttttccgttttgggtatcgaagctgcaagatatagcattattagagaaattaactataccatgagtaatcacggtatgagtgtcgatccacgtcatatccaactattaggtgatgtgatgacatataagggtgaagtgttgggtattacaagatttggtttgagtaaaatgagggactctgttttgcagctagcctccttcgaaaagacaactgaccatttattcgatgcggccttttatatgaaaaaggacgctgttgaaggtgtttctgaatgtattattttgggtcaaacgatgtcgatcggtaccggttcctttaaagttgttaaaggtactaatatatctgaaaaggatctggttcctaagcgatgtctatttgaaagtctctcaaatgaggcagctttaaaagcgaactaa

SEQ ID NO: 81283 - DNA, 3066 bp, Saccharomyces pastorianus
atgaaggaagtcgttgtaagtgaaaccccgaaaaggattaaagggctggaatttagcgctttaagcgctgccgatattgtcgcccagtctgaagtggaagtgtctacaagagatctcttcgatttagaaaaagatcgtgctcctaaggcgaacggtgctttagaccccaagatgggtgtctcttcctccagtcttgaatgtgcaacctgtcacggcaacttggcatcgtgtcatggccattttggtcacttaaaattagctttgcctgttttccacattgggtacttcaaagccaccattcaaatactgcaaggtatctgtaaaaactgttctgccatattgttatcagaaacagataaaagacaatttttgcatgaacttcgtcgtccaggcgtagataatttaagacgtatgggtatattgaagaagattttggaccaatgtaaaaagcaaagaaggtgtctgcattgtggtgctcttaatggtgtcgtgaaaaaagccgctgctggtgctggttcagccgcgttgaagattatccatgatacatttcgttgggtaggtaaaaagtccgctcctgaaaaggatatttgggtgggagaatggaaggaagttcttgctcataatccagaactagagcgttatgtgaaacgttgtatggatgatttaaatccactgaaaactttaaatcttttcaagcaaattaagtctgcagattgtgagctgcttggtatagatgcaacagttccctctggtagaccagagacttacatatggagatatttacccgcacctccggtttgtataaggccttccgttatgatgcaagactctccagcatctaacgaagatgacttgacagtaaaacttacggaaatagtttggacttcgtctttaatcaaagccggtcttgacaagggtatttccattaacaatatgatggaacattgggattacttacaactgactgttgcaatgtacatcaactcagactcagtcaatcctgcgatgctaccaggttcatccaatggcggcggaaaagtgaaaccaattagagggttctgccaaagactaaagggtaaacaaggtcgattcaggggtaatttgtctggtaagcgtgtcgatttttctggtagaactgttatttctccggacccaaacttgtccattgacgaggttgctgtcccagatcgtgtcgcaaaagtcttgacgtatcccgaaaaggtaacaaggtataatagacataaattacaagaattgattgtaaatggacccaatgtccatcctggggcgaactatttactgaagagaaacgaagatgcaagaagaaacctaagatatggtgatcgtatgaagttagccaaaaatttacaaattggtgatgtcgtcgaaagacatttagaagacggtgatgtggtcctattcaaccgtcaaccatctttgcatagactatcaattttatcgcattatgctaagattcgtccttggagaacctttagattaaatgaatgtgtttgcacaccttataacgctgacttcgacggtgacgaaatgaatttgcatgttccacaaaccgaagaggctcgtgcagaagctatcaatttaatgggtgtgaaaaataacttattaacacctaagtcaggtgaacctattattgcggctactcaagatttcatcactggttcatatttaatatcacataaggattctttctatgatcgtgctacattaactcaactattgtctatgatgtctgacggtatcgagcactttgacataccacctcctgctatcatgaaaccgtattacttatggaccggtaaacaagttttttcacttttgataaaaccaaatcacaattccccagttgtgataaacttagacgcgaagaacaaagtctttgtccctccaaaatcaaaatccctaccaaatgaaatgtcacaaaacgacgggtttgtaattattagaggctctcaaattttaagtggggtgatggacaagtctgttctaggtgatggtaagaagcattctgtgttttatacgatattaagagattacggcccacaagaagccgctaatgctatgaatagaatggcaaaactatgtgctaggttcttaggtaatagagggttttctattggtattaatgatgtcacacctgctgatgatttgaagcaaaagaaggaagaactagtcgaaattgcataccgtaagtgtgacgaattgatcacattattcaataaaggtgaattagaaacacaacctggttgcaatgaagaacaaacattggaagctaagattggtgggcttctatctaaagtcagagaagaagttggtgatgtttgtattaatgaattagataattggaatgcaccattaattatggctacttgtggttctaaaggttccacattaaatgtttcacagatggtggctgtcgttggtcaacaaattatttctggtaatcgtgttccagatggttttcaagatcgttcgttaccgcatttccccaagaattcgaaaacaccccaatccaaaggttttgtaagaaattctttcttttcaggcttatctcccccagaatttctgttccatgctatttcgggtcgtgaaggtttagttgacacagctgttaaaaccgcagagactggttacatgtctcgtagattaatgaagtctttagaagatctttcttgtcagtatgacaatacggtcagaacttcagccaacggtatcgtccaattcacatatggtggtgacgggttggatcccctggaaatggaaggtaatgcacaaccggtcaatttcaatagaagttgggaccatgcatacaatattacttttaataaccaagataagggcttactaccctatgcaattatggaaactgcaaacgaaatattaggaccattggaggaaaggttggtcagatatgataatagtggatgtttagtgaaaagggaagatttgaataaagcggaatatgtggatcagtatgatgccgagagagatttttaccattccttgagagaatatattaatggcaaagcaactgcttggctaatttaa

SEQ ID NO: 81284 - DNA, 366 bp, Saccharomyces pastorianus
atggctagctccgatgatcgtgtcaaagtcttggcggctaccaatagagttgatgttttagatcctgctttgttaagatcaggaagattggatagaaaaattgaattcccactcccatccgaagactcgagagctcaaattttacaaatccattcaagaaaaatgaccactgatgatgatattaactggcaagaacttgccaggtctactgatgagtttaatggtgcccagttaaaggcggtaactgtggaggcaggtatgattgccttaaggaatgggcaatcttccgttaaacacgaagatttcgttgagggtataagtgaagttcaagcaagaaaatcgaaatcggtatccttttatgcataa

SEQ ID NO: 81285 - DNA, 738 bp, Saccharomyces pastorianus
atggccaccttggaagaattggatgctcaaactttaccaggagacgatgaattagatcaagagattttgaatctttcgacgcaggagcttcaaacaagagccaagctcttggacaatgaaattcgtatttttagatctgaattgcaaagactgtcccatgaaaacaacgttatgctcgagaagattaaggacaataaggaaaaaatcaagaataatagacagttaccgtaccttgtggctaacgttgtcgaggtcatggatatgaatgagattgaagacaaagaaaatagtgaatctactacacaaggtggcaatgtcaacttagataacaccgctgttggcaaagctgctgtagtcaagacttcttctagacagactgttttcttgcccatggtcggtttagtagatcctgataaacttaagccaaatgacctggtaggtgtgaataaagactcgtatttgattttggatactttaccctctgaatttgattctcgtgtaaaagctatggaggtagatgaaaaacccacagaaacttactcggacgtgggtgggttggataaacagattgaagagctggtggaggccattgtgttacctatgaaacgtgcagataaattcaaagatatgggaattagagcgcccaagggtgccctaatgtacgggcctccgggtacaggtaaaactttattagctcgtgcttgcgcggctcagacgaatgctacttttttgaagctg

SEQ ID NO: 81286 - DNA, 177 bp, Saccharomyces pastorianus
atgttgttgagagctgacgatagaagtatctacggtagacatgatgctgagggagttgtttgtgtaagaactaagcaaaccgttattattgctcattatccaccaaccgtacaagccggtgaggccaccaagattgtcgagcaattggctgactacttgattggtgttcaatactaa

SEQ ID NO: 81287 - DNA, 1095 bp, Saccharomyces pastorianus
atgagcgttttgagaaggctgaatgttcttcagttggaaaaccttctggacgctttgaaaagacgagaaattccacctaatatagcactaaaagatgaatatatcatgttttataaagattttttcattttcccggagttctttgattattttacactgcatagtattgaactattgtctaacttggataattgtttatttagcttaggaaacacatgccagttattttccacagagcaaatatattcccaattaagccaaatattggacattgttaaagagctgtttcgcatggtatcggtaagcaggacaaacattgagaagtttttaaacgcttgtttgaactattctccgttcaaaatattacccacagctcagttacacggtgataatatttctaggtggagttttgaaagcgaagtgcgtcagggtttcgataattttaacagctatatgggcatcgaaaaagatccccacggtgttatagtatcagcaatagatctttttactcaaatttacagttttgatatcttggcgtttttcctcacatttattacaaaagaaagtgggcaggatttgcccttcacaaaatctctgtccaggaaaagaacgtatttgaccagaattgctcaatcttcttcattgagacagtttttacaactgagtacacgccctaatataaggattctgggaggcaatgggcaaggtattggaaattccaattatcccgaatttacaaacgcatcatcagtcatctcacccaagctaagggcttctcctctactagaaagaagggcgtcaaaaatctgctatgctattacgaaattactctataggttagaatgtcatcccataggtatggcccttttaaagaagtatctccacagtcaattgcgagaagcctatctagaatcaaaacgacactttatttccaaaaagggagattcgaccaacacttcctctaccattgcatcatcatctttcgctggcgcatctgttcctctatcttcaaacgaatcaggaatgctaaacggcttgaagcaaattaacgaacaacaagaatctacattagaaaccactcaaaaggaagactag

SEQ ID NO: 81288 - DNA, 1356 bp, Saccharomyces pastorianus
atgttgcgaagagaactaaataactctatcagcaacaggtcgatggaaaatgaatcctttccttttgaaaggccgaatgtcagctatataatatccgcagaatttgataataaattaggtcctattttgaagcaccaatacccgaaagatattccaggtttcaatcagttctcacatgagcaacgcaacggcaatacgtcggtgtctatgaacttggcaagtttaatgataccgagtagcatagagagaaatcccggcaaacaagatattacagtgtttaccctttattacaataagttcactcaaaactatcaactctttcctgtgccaaaagaccctcgtttcagtttcaatctgcatcatcgtgaacagtcagatggtagtgttaccaatagcatatattacgatgccgaaaatcatcaagatgcaaaaaataatagatacactattgtcttggaagatgatgagctcgaatgccaggaagttcagaataatcagaatgccatcgacaacgaacctttatttttcataaatgtcgccaacacagtattagacaccacgaacgatagaggggcagtaatcaagtcgattgccatcggaacaccattaaaaaccttctttgcattcaaaaatattattgtattagtgttagacttgtatatgaaagctcccactcaagctgctgctacagacatactgcttgattgctttaatatgctaaacagtattgaccttacattgattaatgacatacattccaaaagtagtatacaagaagtgctacactctatccatgacgaatctatcattaccaaagtatttttagacccggattccactttaaagaaacttttttgcatcaatggatttgacactaaggacaagtatggtaacattgtgacttttcatgaccaactcattcaatatcattttacaagatttcagccaaagacgctcccgccatttttgttaaaaatcccattgcaatttaatatgattagaagagagcctatttatattgaaaatgattataatgaactagttttaaaatttttggataaatttgtcccttaccttcttaaagccggacaaaaagttaatgcatggaagttagtcatcaattcaactaaactgagtaaagaagacctatgcgcttttattttgtcattagccaacataacggcaacttatgctagcgatccacaatcatacttcaaaggaaatgctgcgttgatttttccctatatggacatttctcttgttgacggtttgcgggcgtatgtagcatcgaatagtgattttgtcggatgctttgcaattatcggaactgccaatccattttccgataccagttag

SEQ ID NO: 81289 - DNA, 1194 bp, Saccharomyces pastorianus
atgtcgagggcccaccgtacaatagattctctttgtgctgtaaatgctgccgctaccgctgcctctgtcgcccctgcacccgcgcccacatccacatctgcatatgcacccaaatctcagtatgagatgatggttcctccagggaaccagtatgtcccgcagaaatcttcctcgaccacgaacatcccttcgagattcaatacggcttcagtgccgccctcgcaactttttgtacaataccaaccgcagtcgcaacaacatgtgacttatgcgaagcaaccggcacatgtaccaaactttatcaatcagccgatacccatccaacaactacctccacaatatgcagacacttttagcactccacaaatgatgcacaatccttttgcctcgaaaaataacaacaaaccgggcaacacgaagaggaccaatagtgttctcatggacccgccgactcccacagcgagtgttggagttcagggtccactaaactatcctatcatgaatattaatccttctgtccgtgactacaacaagcctgtccctcaaaatatggctccgagtccaatatatcctattaatgaaccaacaacgagattgtattctcaaccaaaaatgagaagtctcaggtctacaagctctttgcccaacggtagaagaaacagtcctctaaagctgacaccgagatcatcgttgaatgaagatagtctgtatcccaaacctagaaactctctcaaatccagtatttcgggcacgtctttatcctcctcttttacactagttgccaacaatccagccccaattcggtactctcagcagggattgcttcgctcattaaacaaagctgcaaattgtgctccagattcggtaactccattagactcgtctgtcttgacgggccctcctccaaaaaacatggacaatcttcctgttgtttcttcaaatttaataaactcccccatgaacgtcgagcacagctcaagcctatcacaggcagaacctgcaccacaaatagaactaccgcagccatctttgcccacaacgagcaccactaagaataccggcgaggctgacaatagtaagagaaaagggagcggtgcttattctttactgaatcaagaggatagcagcacgtctagtgctgatcctaaaactgaagataaagccgctccggcactcaaaaaggtcaagatgtga

SEQ ID NO: 81290 - DNA, 1062 bp, Saccharomyces pastorianus
atgagtgaagaggaaacggtctcagccccagctccagcttctacaccggccccggctggaaccgatgtaggtagtggtggagcagcagctggaatagctaatgctggtgctgaaggcggcgacggtgccgaggatgttaagaaacatgggtcgaagatgctggtggggcccaggccgccacaaaatgcgatattcatccataagctataccagattctggaggacgaatcgctacacgacttgatatggtggaccccttcgggcttatccttcatgattaagcccgtggaacggtttagtaaggctttggctacatatttcaagcatactaatattacgagctttgtaagacagttgaacatttacggctttcacaaggtgtcgcatgatcatagcagcaacgacgctaatagtggcgatgacgccaatactaatgatgacagcaatactcacgatgataatagtggcaacaaaaacagcagtggcgacgaaaataccggtggcggtgtgcaagaaaaggagaaaagtaaccccactaaaatctgggaatttaagcatagttctggtattttcaagaaaggtgatattgagggactcaaacacattaagagaagagcttcttcccgtaataactcctcaattaacagtcgaaagaattctagtaatcaaaactacgatatagattccggtgcaagagtaagaccctcttcaattcaagacccgtccaccagttccaattcctttggtaatttcgttccgcaaattccgggcgccaataactctatccccgagtactttaataactctcatgtaacttacgaaaacgcaaaccatgttccgctggaatccaataacccggaaatgcaagagcaaaacagacctccgaactttcaagatgaaacactgaaacatttgaaagaaataaattttgatatggttaagattatagagtctatgcagcatttcatatctttgcaacacagtttttgttcacagagtttcaccttcaagaatgtaagcaagaaaaaatcggaaaatatcgtgaaggatcgacctgcaggc

SEQ ID NO: 81291 - DNA, 426 bp, Saccharomyces pastorianus
atgacagaatctacattaaattttttggcgtcaagaataccgaagtatgaccatcttcagtcggcaagaaggacgagaaattcgaagaaaatttctaatattttgaaccaattcaaaggaatttataatgatgaaactctgaacgaaaatgccgagattgatctgctgagcgccacaactcaacaaattaaagcggaaatcaatcccttcgtttttgaaatcgctaaaagtgacgccaatgtcaagaatgaaaataaacaaatatttgagttgcatagtgaaaatgtatcagaaagacgatacaaagatttggtctatcagttgtcacaagagggtgtcttgaaaaacgtatggttcaacgctgatccgagcatagtcgtgagaaaatgggagcatttgcactcaggcttttcaaagaacaaataa

SEQ ID NO: 81292 - DNA, 1842 bp, Saccharomyces pastorianus
atgaaaaggcacgtgtctttatctgatatattgacaggaagtaagagaaaagtgagaagacaagatgctctacagattaccatcgatgacgaaaatgatactgaatcaggcacttttgacgccagaacagccaaacatgacgattcttcagtaatatttttaaaccactctgttgtgaagccaattgaagctgtttctactaatcacaaatctgcaaaggagtttttgatgacgaaacgcacaaaagaaaaatgcgatgacgacgatgatgatcttattgtaatcagtgataagagtcccaaaagtgagactaattgtagcaaaattgcactttcacaggagcatgaagatgatatttctataatttccacatcgagaatcaaatcatcgcttcttaatgaaagagcatcaaagattaaaaacttccttaaacatgagacaaccgacacgttcaaaagattaaatagcatctctaaactaaatgaaatagagccaccattaccattacatcaatcgatttacccagtaggtgacaaagagctgtcagatcggagtgttgatatcccgcttcgtttccgcacaataccgccattaaatcataattttcttcctagtgactatgaatcgttgaaagacaagaattcagcatcttgtattcctgttcgctatcaagcacccgcattacttggcacaaatattaaaagaaatacaactctcacatggccgcagctattcaagcctgtcactttaaaacaagtattaattgaacccaaattgaaacttcgaatcaaaaattggattgaaacatcctttcatacgctagaaaagcctaccttgaggaaccgtctattgaacagaatgaatcccaataaacaacagggatctggtgatgagcttgccaacttcattgtacctgatctcgaagaagacgaaaacttgcgtccagatttctacagaaatggcgaagcaaatagcagcttgagcgaatttgttccactaatgatattacacggaaattcaataggcaagaaaacgctgatacagacaatcatgagagagattgctggcgacgataattcttaccaaatatatgaagttaactcaaacatgaacaggagcaaaaaagatttgcttgatatcctattagattttaccaccacacactatgtcaaagattcctcaaaaaggaaaagtgactacgggcttgttttatttaatgatgttgatgttttatttaaagaacatgataggggatattgggcaatgatcagcaagctttgtgaattttcacgaaggcccctcgtattgacttgtaaggatttgtcactagttcctagtgaacttattgccttagcaagtgaacaaaactctttgtttcatactaagaaaattagtacacccacagtctatgcgtttctaacaaaatatttaaagtcccttgaaatcgaagtttgtgacgactggcttcgcgatgttgtaaaacaaaataatgcggatattaggaagtgcttgatgcacttgcagttttggtgcgttgatactggggctgatttgatttcatccaagaacagactaccggtcctaacatcaactcttggttcaagcgttaaagatatatcgcaatcaactgatctactctccataaatgatgttattggtcaagcaacgctcaatcgttccatggttagacaagaaatagattctaccacaatgaccccagaaaaagttaatactttccaggatcaaaatctggatgatgaaatgaaattaaaatttgattacgtgatagattataaattgcatttaaatgaccccaatgcaaccattataccctttggggat

SEQ ID NO: 81293 - DNA, 1869 bp, Saccharomyces pastorianus
atgctaatcacacgtttacgggtccctacaataaagcggccactgcttccaattacaagtcatctcgtaagacactgtattcgaacttacgtcgcaactaatcatggaaatgtcagaccttttataacaccttacaagagttcgttacctgttagatgtttgatcgcccaaaggcacatccgaacatttccaagcaatgacaagttcactaccaaggcttccaatattgagactattttgcttagaaaaaataatgagcgagagttcaagcaatcgcttttagcagatgcaaagaattttcaagaaaggttcaaaatcaatctaaagtggattcttattaaaaacaacaggccgttctctctgaatgaaataagtattatagcgtcttggctgatattgtcacaaattctatggctcattctgagcaccaccactttcatttcgttctatctattcgtcattaactctgttttcagtcaggaatacatccatgagaagaaaatctatgaaaggcttctaaaatggttgttgaaagatcataagtgctccaatcaagatttggaaatcacattttctccggaagataaagcatcaatgcttgtgctctctccagactgggagtcaaattcaatacttataaaaaggctaaatgtcagggatgagattttggacttagacttaaaatttcaccacattaacctgaatgtttccctaaaaaattggttacttggcaggggactaattacaaatgtttcaatatacggtattagaggatgtttgaacttatccaatttcatcaatttagtaaactcttttcaaggagatcaaaagacggagaattttttgaaaactttaaataacgttgaaattactgactcagaaattcttttgaaacaatctctgagtgcccaggaaactccgagtctaaaattttccatttacaatctatctttaccacgactaagactgaaccattttatttctgatattctgagtgccaaaacattttccggttcaattaataattctcttttcaacttatttaagaggcaacaaaagttaacagcagttattgaaaataataacaaaaataggatggcaagctcgaagtttgatttcacggacaacaatcaggaaaattaccgcacagtgactcatcaggatgatccgaattatgtaacgacgttaagattgaactttatcaacattaatgatttaaaatttaatggcgatggtaagttcaactggttgaaagacggccaagttgaaatacttgctgacataatgctaacaaattctacttctcatctatcatcggagtcgaaatatgcagtggtggatttgaaggtaacttgtagggacttgaagacaactttccctcaggaacctccagtattatcgacaggtgacagtattgtttcattggatgaattgaaacctataataacatttattaactcatatgaagggatggctaatcctatattgaaagatttctcggaaaacgagagattgaccaattccataatctggaactcgccaaatgtatcgattaataggcaaaggaaatcttatcctttaactacaaaagtcacttccaattccacgaaggaaatcatcaagtttcataatcaaccaaatactaatgcaaacgaaattgttttacgctgtaagatggtcaaaaacttgtcagatttacagcttattaacattaatcaaatactagaccaaattaccatggagctatatgttgatttaaccaaaatagtagaagattgggagtttaaaaacaaaaatgattggatgaaacaatggggtactacctttgcatcccaattattgttgtttgggtttggtgccatggtttga

SEQ ID NO: 81294 - DNA, 99 bp, Saccharomyces pastorianus
atgcatattaaagttgacagtagatttgcgtcaagaagtattaaaacaaaaggcacatacagattatcaggtggtgggaggtttataaattcatgctaa

SEQ ID NO: 81295 - DNA, 180 bp, Saccharomyces pastorianus
aattttgaaaaagtagtagcggtatgttgcctaaaaataattgagaagcaacggttagaccgcttaaaagttttcgatggaagtgaaaacccttataaacaaaatattactgcctttgcccatgagcaatcatcaataccagagcctcttaaagaatcaatttttaaccaattgaaatag

SEQ ID NO: 81296 - DNA, 276 bp, Saccharomyces pastorianus
atgtcgcagaagattggacacagtggcttggcttttgcgcgtctttggcaccatgtcgacgttgcccgtgataagaggacattgggtagattggcttcagcaattgcaattaccttaattggtaaacataagccggtctatcatccgtcacaagactgtggagactacgtagtagtgactaattgccaaaaaatccgtgtaacaggtaagaaatttgagcagaagacttactggtctcattcaggtagacctggtcagctaaagttacagacatga

SEQ ID NO: 81297 - DNA, 1344 bp, Saccharomyces pastorianus
atgggtgtgtttttaacaaactataatgtgcgtatggatactatggccaatattctatattatcctcaaaaaccattgggtactacacgtgcgatggaatatttgaagtttagagaattacccgctggtcaaaatgcaattgttgctattgcatgttactccggttataatcaagaagattctatgattatgaatcagtcttcaattgatcgtggtctattcagatctctgtttttcagatcttatatggatcaggaaaagaagtacggtatgtctataacggagacttttgagaaaccacaacgtacaaacaccttaagaatgaaacatggtacatacgataagttggacgatgatggtctaattgcgcctggtgttagagtttcaggagaagatgtgattatcggtaaaaccacaccaatctcaccagatgaagaggaactcggtcaaagaacagcataccattccaaacgtgatgcttccacaccattgagaagtactgaaaacggtattgttgatcaagttttagtcacaacaaaccaagatgggttaaagtttgtcaaagttcgtgtaagaactacaaagattcctcaaattggtgacaaatttgcttctcgtcacggtcaaaagggtactattggtatcacatatcgtagagaagatatgccatttaccgcagaaggtattgttccagatttgattattaaccctcatgctattccatctcgtatgactgttgcccatttaattgaatgtttgttgagtaaagtcgcggcactatctggtaatgaaggtgacgcctctcctttcacggacattactgtagaaggtatatccaaactactgcgtgaacatggttatcaatctcgtgggtttgaagttatgtataatggtcacacaggtaaaaaactaatggctcaaattttctttggtcctacatattatcaacgactaagacacatggtggatgacaagatacatgccagagcacgtggtccaatgcaagtattgacgagacagcctgtagagggtagatcgagagacggtggtttaagattcggtgagatggaacgtgactgtatgattgctcatggtgctgcctcattcttgaaggagagattaatggaagcatccgatgcctttagagtccatatttgtggtatttgcgggctgatgacagttatcgcgaaattaaatcataaccaatttgaatgtaagggatgtgataataagattgatatttaccaaattcatattccatacgccgcgaagttattattccaagaacttatggctatgaacattacaccacgtttatataccgatcgttcgagagatttttaa

SEQ ID NO: 81298 - DNA, 2106 bp, Saccharomyces pastorianus
atgtctgaccttgcaaactcagaaaagtattatgatgaggacccatatggattcgaggatgaaagtgcaccaattactgcagaagattcgtgggctgttatatccgctttttttcgcgagaaggggctagtttcacaacaacttgactctttcaatcaattcgttgattatactttacaagacattatttgcgaggattccaccttgattttagagcagttggctcaacatactaccgaatcagacaacatcagtagaaagtatgagattagttttggtaaaatctatgttacaaagccaatggtaaatgaatctgatggtgttacccatgcgttgtatccacaagaagcacgtttacgtaatttgacatattcgtctggtttatttgttgatgttaagaagagaacatatgaagctattgatgttccaggtagggaactgaaatatgaattaattgccgaagaatctgaagatgacagcgaaagcggaaaagttttcattggccgtttaccgattatgttaagatcaaagaattgttacctaagtgaggctacagaatcagatttatataagctgaaagaatgtccctttgatatgggtggttatttcatcattaatggttctgaaaaagttttgattgcacaggagcgttctgcaggtaatattgttcaagtgtttaaaaaagccgccccatctccaatttctcatgtagcagaaattagatctgcccttgaaaaaggttctaggtttatcagtacccttcaagtcaagctttatggtcgtgagggtagttcagctcgtactattaaagccacattaccatatatcaaacaggatattcctattgtaatcatattcagagctttaggtattattccagacggtgaaattttagaacatatctgctacgacgtaaatgattggcaaatgctggaaatgcttaagccttgtgttgaagacgggtttgttattcaagatcgtgaaactgcattagactttattggtcgtcgtggtactgcccttggtatcaagaaagaaaaaagaatccaatatgcaaaagacattttacaaaaagaattcctacctcatattactcaattagaaggttttgaaagtagaaaggcatttttcttaggttatatgataaacagattattactgtgtgctttagatcgtaaagaccaagatgatcgtgatcatttcgggaaaaaaagattagatttggcaggtccattattggcccaacttttcaagacattgttcaaaaaattaactaaagatattttccgttatatgcaaagaactgtagaggaagcccatgactttaacatgaaattagcgattaacgcaaaaaccataacatcaggtcttaagtacgctttggctactggtaactggggtgaacaaaaaaaagccatgtcttctagggcaggtgtttctcaggttttgaaccgttacacttattcatccactttatcacatttaagaagaacaaacactcctattggtcgtgatggtaaattagccaaaccacgtcaattgcataatacacattgggggttggtctgtcctgcagaaactcctgaaggccaagcgtgtggtttagttaagaatctgtcactgatgtcttgtatttctgttggtacagatccaatgcctatcatcacttttttaagtgaatggggtatggaaccactggaagattacgtaccacatcaatcacctgacgcgacaagggtcttcgtcaatggtgtgtggcacggtgttcacagaaacccagcaagattaatggaaacccttagaacattgagaagaaagggtgatatcaatccggaagtttctatgattagagatattcgtgaaaaggagctaaaaatctttacagatgccggtagagtttatagaccattatttattgttgaagacgatgaatcactaggccataaggaattaaaggtaagaaagggtcatattgccaaactgatggctaccgaataccaagatattgaaggtggatttgaagatgtagaagaatatacatggtcatcattattgaatgagggtttagtggaataccttgatgctgaagaagaggacttatattga

SEQ ID NO: 81299 - DNA, 2202 bp, Saccharomyces pastorianus
atggcttatgtcgtcttctttttctttgtctatctattcttatgtgaatacaacgagggtgctaaacaaaaaggtgaaatattagttttcccacgcactatagttaaaagaatgaagaaaagaggtgtattaactgaaaagaatgcaaatgaccccgaaaacgttggggaacgtagtgacttatccagcgataggaaaatgctacaagaaagctctgaagaggaagccgatacttacggggaaattggtttatccaagtcagaggctatatttcactggagaaacctttgttacgaagttcagattaaggccgaaacaagacgtattttgaacaatgttgatggttgggttaaaccaggtactttaacagctttaatgggtgcttcaggtgctggtaaaaccacacttctggattgtttggccgaaagggttaccatgggtgttataactggtgatatcttggtcaatggtattccccgtgataaatctttcccaagatccattggttattgtcagcaacaagatttgcatttgaaaactgccactgtgagggagtcattgagattttctgcttacctacgtcaaccagctgaagtttccattgaagaaaagaacagatatgttgaagaagttattaaaattcttgaaatggaaaaatatgctgatgctgttgttggtgttgctggtgaaggtttaaacgttgaacaaagaaaaagattaaccattggtgttgaattaactgccaaaccaaaactgttggtctttttagatgaacctacttctggtttggattctcaaactgcttggtctatttgtcagctaatgaaaaagttggcaaatcatggtcaagcaattctatgtactattcaccaaccctctgctattttgatgcaagaattcgatcgtttactatttatgcaacgtggtggtaagactgtctactttggcgacttgggcgaaggttgtaaaactatgatcgattattttgaaagccatggtgctcataaatgccctgctgacgccaacccagctgaatggatgctagaagttgttggtgcagctccaggctctcatgcaaatcaagattattacgaagtttggaggaattctgaagagtacagggccgttcaatctgaattagattggatggaaagagaattaccaaagaaaggttccataactgcagctgaggacaaacacgaattttcacaatcaattatttatcaaacaaaattggtcagtattcgtttattccagcaatattggagatctccagattatttatggtcgaagtttattttaactattttcaatcaattgttcatcggtttcactttcttcaaagcaggaacctcgctacagggtttacaaaatcaaatgttggctgtattcatgtttacggttattttcaatcctattctacaacaatatctaccatcttttgtccagcaaagagatttgtatgaggccagggaacgcccctcaaggactttttcttggatttcatttatcttcgctcaaatattcgtggaagttccatggaatatattggcaggtactattgcttattttatctactattatccaattggattttactccaacgcgtctgcagctggccagttgcatgaaaggggtgctttattttggttgttctcttgtgctttctacgtttatgttggttctatgggtctgcttgtcatttctttcaaccaagttgcagaaagtgcagctaacttagcctctttgttgtttactatgtctttgtctttttgtggtgttatgactaccccaagtgccatgcctagattttggatattcatgtacagggtttcacctttgacttatttcattcaggctctgttggctgttggtgttgctaacgtagacgtcaaatgcgctgattacgaattgctaaaattcacaccaccatccggtatgacatgtgggcagtacatggaaccatatttacaactagcaaagactggttacttaactgatgaaaatgccactgacacctgtagtttctgtcaaatatctacaaccaatgattacttagctaatgtcaattctttctacagtgagagatggagaaattatggtattttcatctgttatattgcattcaattatatcgctggtgtctttttctactggttagcaagagtgcctaaaaagaacggtaaactctccaagaaataa

SEQ ID NO: 81300 - DNA, 720 bp, Saccharomyces pastorianus
atgagcgatgaagcaagccgtgaagctattaaggaagcccacattgctaagcagtccaagagagcaagaccttcctctccttatactgtcagctacatgatgcaagttaaatacctattaatcagaaatatgtggagactgcgaaataatatcgggtttacattatttaggattttgggtaactgtagtatggctttattcttgggttcaatgtttttcaagatcatgaaaaagggtgatacttctacattctatttccgtggttctgctatgttttttgcaattctattcaatgcattttcttctctgttagaaatcttttcgttatatgaggccagaccaatcactgaaaaacatagaacatattcgttataccatccaagtgctgacgcttttgcatcagttctatcagaaataccctcaaagttaatcatcactgtttgcttcaatataatcttctatttcttagtagactttagaagaaatggtggtgtattctttttctacttattaataaacattgtcgcggttttctccatgtctcacttgtttagatgtgttggttccttaacaaagacatttgcagaagctatggttcccgcttctatgttattgttggctctatccatgtataccggttttgctattcctaagaagaagacctacgttggtctaaatggattggtatatcatccgttggctacttatcgaatcttgtga

SEQ ID NO: 81301 - DNA, 300 bp, Saccharomyces pastorianus
atgatgagtaatctagatctgctgaataactttgccaatcaattgaaagatcaatctttacgtatattagaagaacagaaactggagaatgacaaatttactaaccgtcatttattgcatttggaaagattggaaaaagaagtcagttttcaaagaagaattgtttatgcgtcatttgtcgccttcgtagggttgatatcctatctattaataacgagagagctttactttgaagatttcgaagagagcaaaaatggcgctattgaaaaggcagacattattcaacaagcaatcagatga

SEQ ID NO: 81302 - DNA, 1284 bp, Saccharomyces pastorianus
atggcgaaccgtcttctcatatacggccttattttgtgggtaagtataatcggatcttttgcattagataggaacaaaactgctcaaaatgcgaagattggtctacatgataccactgtgatcacgactggaagtacaacgaacgtgcagaaagaacattcctcaccactatccaccggttctttaagaacccatgattttggacaggcctctaaagttgacatacggcaggctgacatacgggaaaacggtgagaggaaagagcaagatgcactaacacagcctgcaacaccaaggaatccgggtgattcgagtaattcatttttatcgttcgacgaatggaagaaggtcaagtcgaaggagcactcatcaggccctgaacgtcatcttagtcgagtgagggagccagtcgatccctcttgctataaagagaaagaatgcataggagaagagttggaaatcgatttggggtttttgacaaacaaaaacgggtggagtgaaagagaagaaaatcaaaaaggattcaatgaggaaaaggacatagagaaagtttacaaaaaaaaattcaactatgcatccttggattgcgctgcaacaattgtcaaaagcaatccagaagcgattggagcgacttctacgttaattgagagcaaagacaagtatttactgaatccctgttcagctccgcagcaattcattgttatagagctttgtgaagatatcctggtggaggaaattgaaattgctaattacgaattcttttcctcgaccttcaagagatttagggtgtcagtttctgatagaataccgatggttaaaaatgaatggaccatattaggagaattcgaggcaggaaattcaagagagttacaaaagtttcaaatacataatccccaaatctgggcaagttatttgaaaattgaaattctatcccattatgaggacgaattttattgtcccatatccttaatcaaagtatatggtaaatcaatgatggatgagtttaagatcgatcaactaaaggctcaagaggataaagaacaatccataggaactaacaatataaacaatttgaatgaacaaaatatccaagacagatgtaacaatatagaaacgcgtttagagactccaaacacaagcaatctctcagacttagctggtgcattatcatgtacttcaaagctcatccctttgaagttcgatgaatttttcaaggtgcttaatgcatccttttgtccttccaagcaaatgatatcttcttcttctcttcggctgttcctgtaa

SEQ ID NO: 81303 - DNA, 594 bp, Saccharomyces pastorianus
atggaccaagataattatcaagatgcttttcaaatgaggtcattcttgaaccaaggcgctactacgaatataaatgacacaccgacgaacaatagcagtattaattccttcgttacggcgacgaatggtgacagcagaatattctacaatagagggccatcaacgccactattaccggctgttctacaaaatttgactaatcaaacggaagcgcagagaaacccctacggacctaattacaataccacagctcaagatcgtaatcttttgggaatcgaaggtgatttgcctccaatcccccctgtggacccaaattcagaagcagaaactgaactaccaacaaggaccacatcggcggcacatctccctccatatatacacttgagcaccagcggccatggagatgatggaaaaattaggaagagaaggcattctaatgtttctatctacattccgaagaatccatacgccacccttatgaaacggagaccacaggcaaatcacgccataatgaataaaactctggcccaaactaatgactttaacacatcggctcaagataactcggaagtggtcgatttaacatcagattga

SEQ ID NO: 81304 - DNA, 978 bp, Saccharomyces pastorianus
  modified_base (20)..(42): a, c, g, t, unknown, or other
  modified_base (59)..(63): a, c, g, t, unknown, or other
atggcaagtgtcatgtcaannnnnnnnnnnnnnnnnnnnnnnatacttacaccttgccnnnnngccagttatatgtttacgaaccctttgtccaacacaggtggtggactcataaatgaaataaaagatgcaataaatgaaatggaacaattaaaggttctagagttaaagcaaatatgcaaatctctggatttatccataacgggcaaaaaggctgtcttacaagaccgaataaaacaattcttaagaaaatcctgtgatattggacatatagatccgtggaggcctaaggctattaagattcttatcgcgaaagtaaggataaactcatcattaccaaaatactctaccctttgggaaactttaaagacgggtgcgttcaagcatcctgtagcatcggggcaactacccgtgacagctctccagagtactgcattgccaccttattcccaacaacaggccttagcatattcctttacctcaccgttttacaaaccaatagtacaaataccggatgccaataaaaaattgaagcaatctgcaggaagaggttgtacaaaaatgaagttcaaggtaagtaaatctaatcatgatcttttgaaatctaacaagagttataaactgtatttgttttctggcttttcaataccgtttatatatgaaactgtgggccatgaggcaatagatttcccgtatccctgtgaactagtgtctaatggcaccaaactagaggacaacgtgaaaggtttaaagaaacaaaatgggacaggtaatcctgcaaatttaacgccttatcttaaagtaccgaccgagatgaatcacctagacttacattatctcaatattgataaagagtactctataagttgctttatagtggaagatttttcacctgaagctcttctggggaaaattctgaaaaggcccaataattatcaagcaagccaccacagcatacatcaaaagaaccttgaatga

SEQ ID NO: 81305 - DNA, 312 bp, Saccharomyces pastorianus
atgaagtatccggcgaagactgaccaatgtaagcatatccaatgttttgatgctctctggtttcttcactctcagtcacaagtccctacatggcagtgtccgatttgtcaacaccctataaaattcgaccagttgaagatttccgaatttgtagataatattattcaaaattgcaatgaagatgttgagcaagttgagatatctgttgatggctcatggaaaccgattcataatagttcggccgttataacggatactgttaaccaaaatcacagtgacctgcaggcatgcaagcatgcactgccgtcgttt

SEQ ID NO: 81306 - DNA, 138 bp, Saccharomyces pastorianus
ggcactgtcaaacaagagcaagattatgacagccgaaatgccttcgatactgattggcgtaatggttcataccacaacgaacccgaaataatatctctggatagctcagatgatgaagcctttattccggctagttaa

SEQ ID NO: 81307 - DNA, 981 bp, Saccharomyces pastorianus
  modified_base (71)..(71): a, c, g, t, unknown, or other
atgatcacaaggattattgaagtatggggaaaggttccgcccaagtatggttttaaaactgggtttttccncacaacaaggtccattctgaagagccccactacaaagcagactgatattattaataaggtaaaatcacccaagcccaaaggtgttcttggtattgggtatgccaaaggtgtaaaacatccaaaaggatcacatagattatcacccaaggtaaactttatcgacgtggataatctcattgcgaagaccgttgctgaaccccagagtataaaatccagtaacggttcagcacagaaagtgagattacaaaaagctgaattaagaagaaagtttttgattgaagcatttcgcaaggaagaggctaggctattacacaaacacgagtatttgcagaagaggacaaaggaactggaaaaagcaaaagaactggagctagaaaaactaaataaggaaaaatcttcagacttgactattatgactctagataaaatgatgtctcaacctcttttaaggaacagatcaccagaagagagcgaattgttgaagttgaaaaggaattacattcgatcgttgttgaactttcaggcgcacaagaaaaagctaaacgaattattaaacctctaccatgtcgctaatgaattcatcgttacagaatcccaactactaaagaaaattgataaggtttttaacgatgaaacggaggaattcactgatgcctatgatgtaacttctaacttcacgcaatttggaaatagaaaattattactttcaggtaacaccaccctacaaacccaaattaacaacgcaataatgggctctttgtcaaacgaaaagtttttcgatatttctttagtggattcatatctgaacaaggatttaaaaaacatttccaataaaattgattccaaattaaaccccacctctaatggagctggaaataatggtaataataataatacaaccaacttgtaa

SEQ ID NO: 81308 - DNA, 465 bp, Saccharomyces pastorianus
atgattgccctgatgtttaaactggaaatagagctaaaaatttctcctgctaagagaaacaatccggggttcaaatccaccgtgtcaacaggtcatcgagatgttccagatgaatggagaacaagtattaacgaagtcgtgatagcccacgtaaccaatgatattagtgtattcatcgggctggttactacttttgaaaacaccgctcattcagatgccatcagttgtattgtaaaatgtttaaggatattgacagaggcaaacaacaacgatgccactatttgcatcgattggatttacaaagtggtggaacaacttggccaagtaacccttaatgaaagagataatttggcgaaggccgtggttgaggggttgaattcaaaggattacagaaaggtgagggaaggaattagggcgtttgttggatggtattcaagaaagaatatcagttcgaggtttgaatag

SEQ ID NO: 81309 - DNA, 2535 bp, Saccharomyces pastorianus
  modified_base (2504)..(2504): a, c, g, t, unknown, or other
atggacaacttacaggtatctgatatagaaactgctttacaatgcatatcgtctactgcatctcaagatgataaaaacaaagcgcttcaatttttagaacaattccaaagatcaactgttgcctggtctatttgcaatgaaatattgtctaaagaagatcctacaaacgctcttctagaattaaatatttttgctgcgcaaactttaaggaataaagtcacatatgatctatcacaattagaaaataatctaccacaattcaaggattctttgttgacgcttttattatcgcataaccaaaaattgattattacacaactgaatgtcgcgttagcacgtttggcgatccaatttttagaatggcagaatccaattttcgagatcatttcattgttgaattcttcaccatctatattattaaactttttaagaattttacctgaggaaaccttagacattgcatctactcccttgacagaagtggaattcaattccagaattcatgaactaattgatccgatagcagaagatgtattgaaattccttgtatcatgcatagacctattacaaaatacagacgggaattccagctcatctatttcattagaacaaattttacggtgtttgaactcttggtcgtatgaattccctgttgaacagttgctaaccgtacaacccttaataaatctcgtgtttgaaactatttccaatggtaatgaaagtgacatggaggcattcgattccgctattgattgtctctgcgttatcctcagagaaagcagagatactactaatgagcagttgatttctgctttatttcatcagttaatgcttttacaagaaaaactattgcctactctgttcacagaccaccctttgaacgatgaatatgatgacgatctcctagaaggtatgacacgattattcgtagaagctggcgaggcttggtcggttgtcatttctaaaaaccccgatttttttaaaccaatggttttggtattattgatgttgacctgcaaaaatgaagacttagatgtcgtttcctatactttccccttttggtttaacttcaaacaaagtttagttttgccaagatatcaagaatcaagaaaggcttactctgatatttttgttaaattaataaatggtataattactcatttacaatatccatcaggccagttttcatctaaagaggaagaagataaatttaaagatttcaggtatcatatgggcgatgtgttaaaagactgtactgcagtggtgggaacttctgaggctttatcgcaaccactaataagaattaagtccgcaatagaaaacaacaatagctggcaaataatggaagccccattattttccctgaggactatggctaaagaaatttcgttgactgaaaacactatattgccagaaatcattaaaatcatttgtaaccttccagagcaggccaagattaggtatgcatcaacattagttcttggtagatataccgaatggacagccaagcatccagaactactagaagttcaattgcaatatatttttaacggttttcaactgcatgagggttcatcggatatgcaaagtataatcactgcatcatcacatgcattaatgttcttctgttcggactgctctaaactattagttgggtatattgatcagttgattaatttcttcctcaacgtgcagagttcgattgatattgagtcacaatttgaactatgtcaaggattaagtgcagtaataaataatcagccagaggccaaagtttcagtaatatttcaaaagctcgtagatgataatttgcgacaaatcgaggctttgattcctcaatggaaagcaaatccaacgctcttggctccacagattgctgataagattgatttgctatatgcgctttttgaagaattgaaaccgagatacaattatcctcagcaaggatcggaacctttactccccaggatagaatttatttggaaggcattaagaactctgctagttgatgcaggtgcaatgactgatagtattatcgtagaaagagtagctaaattgttacgcagaatttttgagagatttcatgtattttgcgagccaatattaccttctgttgccgaatttctaatccaaggttatttaacgactggattcggttcctatctgtggtgttctggttcccttattgttatatttggtgacgatgaatcattccccatatccccgagtctgaaagatgctgtctggaaatttgccctctcccaatgcgagacgttcatactgaatttcaacaagtttgataaacttcaattaaacgattatcatgaggcaataatcgattttttctcattaatttcagacttgataatgttttatcctggcgcatttttgaattcaacagagcttctaggccccgtactgaatgttgccctcgagtgtgttaataagcttgataactacgatgcttacatatgtatcttgcgttgcttagatgatatcatatnctgggggttcaagactccaccgatcctatag

SEQ ID NO: 81310 - DNA, 276 bp, Saccharomyces pastorianus
atgaccgctttgttcacgttcttgtatctaaggtttacctcgcctcaatacaattcgaacggcgcttacaacggcgccctaatggcattctcatttgttattgctttacagatttgcaacattgcaacagaagccattagatccggtactgcaactttctttgttgctcttggtaataacccggaggtcttccatcattcttaccctcataggtttgatgagatttttagggcatatcctgatgtactcagaaaattgagtcaccagaatgtgtga

SEQ ID NO: 81311 - DNA, 1347 bp, Saccharomyces pastorianus
atgccattgaatgaaaaatacgagaggcctccacaacctcctccagcatatgatcccaatcataggccgcccagttcttccgagaactctgccgcggcgaatgtcaacgatggccagacgccgtaccattttagacaggatcaatattacaatctaaattccaaaacgagtggggctcctatagggagcttcgacgaggcctttcctactgaaaatgacaacaagcccaggtggaacgattggccatttaccatttttttcctatgcacggtaggcggattcatcgccattgctgccataaccttaagagcgtggtcccaaacctatagcagtacgggttccggaatatacgatggtgtgaatactggtacgctgaacaccaatgctgccatcctgctagttttcgtgtgcattattgccctggtattctccgttttgggcctcacactttgtcgaatttttccgaagcagtttatatattgcggtatggtcatcaacctagtggcttctcttgggactgccatcatgtacatgtctttgaggtactggtctgcaggtattgtgtttttagtcttcacgttcatgaccgcgtggtgctactggggtatgaggtctagaattcccctttctgtggcggtattgaaagtcgtcgtcgatgccatgaagaaatgcccacagatcttctttgtttcatttgttggagcgctagttgctagtgcgtttgggtttctcttctcagcagtcattgtggctacgtacataaagtacgatcctaatagctcgaatggcggctgtgacgtttctggtggcagctgttcgcattccaaattgattggtgttttggttgtggtttttttctgcggctattatatctctgaagtaataagaaacgtcatacattgtgttatttctggcgtctttggcagctggtattatatgtcaaagtctgaccaaggaatgccaaggtggcccgcatttggagcattgaagagagccatgacttactcgttcggttccatttgctttgggtccttgctagtcgctttgatcgacctgttgagacaaatattacaaatgatcagacacgatgttacctccagcggtggcggtcaaattgccatccagattttgtttatggtgtttgactggattatcggctttctgaagtggctcgccgagtatttcaatcattatgcatactcgttcatcgctctttatggtaaaccgtatttaagagcggccaaagaaacctggtatatgttaagagaaaagggaatggacgccctaatcaatgataatttaattaacattgcactgggtctattttcaatgttgctagttatatga

SEQ ID NO: 81312 - DNA, 648 bp, Saccharomyces pastorianus
atggcgttatcaatgaacctcacggcagggcttttttccaaaacattggtgtttttttgttctctgatctactttaagttgacgcttttcgaaaatggactatgtctatccaacgatatggaagttggatggtcggatttgacgaaattgactgttcctttagacaaggatctatctttaggtacagcaatgagcttgtactcgtcaatcttcgatcgcttgttcacggccggaaataaagaattaatacgcacaatgcatagatcatcacaatttgtgatagagctagctattgaaaggacctataggactattcttggcaacgttattgaattcagaaagttgaccgaggaaacatggctagcacaaatcaaacaagaactagatccgcagagcgataatccatcatcagaagctaaaattgtgagtgataggcagcgggatctcagccttgcagttccaacgcccacgccctcaataattccaatgtcaccctcgcctggtgaaactaagaaccatgcaaagagtcaatcagagatcattcagatgctgacagatgaattttgggcaaattataactcaggctgggaagagttgcttaatcaatctgaattttccactcttttcgatgattacaaagacaattaa

SEQ ID NO: 81313 - DNA, 1704 bp, Saccharomyces pastorianus
atgaaaagaagaagcgatgctttgttgggaagtttccaggccaccaacgttacgccgccaagcgataatagtaatagtacggccggtggagccaatggaagtaactcaggaacaccaacttctactagcggtaagaagagaaacaagcttataaaatcttgtggcttttgcagaaggagaaaacttcgttgtgatcagcaaaaacctatgtgttctacatgcatttctagaaacttaacaacctgtcaatatgctgaagaattcaacaaaaacatcgaaaagaaagctacctatggtccctatcctaacgccgatttacttaagaaagttgaagaactagaaaacaaaatacgtattctagaagctgaaaaaaacactaattcgtctgcgagctccatgtacacttcgccaaatttccctcctttaggcactagtgtaggtagaggttctactgaaacttcatctccattacccgatagtgtaataaatccatatgccgaccggtactacctacaaagtaaacattccggaagatcaacactatacggccccacttctatgagaacccaaattgcaaatagtaattgggggttcattgaaaaatataaacaattatgggcgaaggttaaagtagaaagaaataaatggaagcaaaacaaccaaaaaacgatgtgcagggaactaggccttttggatgagtcggattggcagccagatccattaatcaaacagatatgtcgtttcctaccatcatataacaaaattttgtctattttagatgatttctttaatgatggagcatgcaatgagatcaacgtgattcttgataaggcaaaagttagaagagactttttagattatttcatgcccgaaaaagaggtaaaggcggaaggtgacagatccatagtttatattttatccaatccaaagaaaaattattacaaagctgctgtgatactattaatcctatgtctgaaatacttccatacagatgtcccaaccccaattgagaagttctttactttactaaagggggcctccaccgctaaggtgttctacattgagcgtgcacaaatgttaatacttttctactactatcgtgaaacatattcattcggtggagatggctccgatttggttaatataaatgaatgtttagttactacggttactacaatagggttgcatttaaacattagagaaactttcaaggaacatgaggtttttatgggtagcatcgaaagtttagaaaatgtctggttaatggcaatatttatcgattataacatatcttgtaacgttggtagacccttattgattaacaaattttatctagacgaaaaccaagatcattgcatattgaatagtaaaagtaaaacatatgaggggaagctgaaaagatatttaaaacttacaaggccaatgttgttaactctttatgatagagataaattcccggatttgaaagcttattccaagcgaattatcaattttgtagaagaagaacttggcccacttggacattacacaggtgaaaatatatcggaagaagttccattaagggaaagtagaattttaagtatggcagtcggactattattgtcgttttatgcactaatacattctgtgctgaaagtcagaaacatagaatccaaaaataatacgtttcaattggtctatgatcgatttattccatcattgtga

SEQ ID NO: 81314 - DNA, 1254 bp, Saccharomyces pastorianus
atggagaaacgagaagctttaaatacaaagctgaattcacatatttcaggtacaattaatgagttcttgaaatcattaatggaaaagttatgggacgatttaaaattggaggtgtcttctagagacaaagctactacctcttttgtagaaagtgtggcagcaggtaagagtaagattgagaaagaatttaacgaatcaatggagaccttcaaaaagttagggctactaatatcaaacgaagagattacctgcaaattttccgacgatattgaagaaagaatcaagcaactacgtgatgctgaattgaaagcaaaaatcggtcgtattagaaaaaatctggttcccgaattaaaggatcatgtgattcatttactatcacatccatccaaaaaggtttgggatgatataatgaacgattttgaatctactatcaaagacaatatatctgcgtatcaagtggaaaaagataaatatgattttaaaattggactttcagagagcgaaaacgcgaagatttacaaaattattagaatattggcgtggagaaccttggataccacagtacatgactacctgaaaatagatacgattgttagtatattgagagacaggtttgaagatgtattcagatatgatgcagaaggttctccaagattgtggaaaacagaagaagagattgatggggcattccgtgttgcaaaagaacatgccctggaagtttttgaggttctttcacttgctgtaacctcagataacgttgaaattattcctgatgtaccaatggctgaagaggaaagcggcgaggacaacgaaatatatcgggacaacgaaggtgtgtttcattcccgtcgtttcgcacacatcttgactgaattgcaaaaggagaatgttttagatcaattccgtaggcagattaacattactgttctggattcgaaaaggtctatcatcactactagaacgcatattccaccttggatttacgttttgctagccgtattagggtggaacgaattcgtggctgtcataagaaaccccttatttgtaacccttaccttgatcttaggtgcaaccttttttgttattcataagttcggcctctggggccctgttgttaatgttgttcaaagtgcagttggtgaaacaagaaccgcaataaaggataaactaaggcaatttgtcgttgaagatcatgaagtgaaggaatcttttgaaatgaaagacttctcaaaaaacgagcaaaaagaaaaatga

SEQ ID NO: 81315 - DNA, 1041 bp, Saccharomyces pastorianus
atgactgatagatctgctattcagttgatagatgaagagaaggaatttcatcaaagtgcattacaatattttcaacaatgtattggaaatcgtgatgttggtctagattaccatgtcatctcagttttcggttctcaatcgagtggtaaatcgactttacttaacgtcttgtttaacaccaactttgataccatggatgctcaggtgaaaaggcagcagactactaaaggcatttggttggctcacactaaacaggttaatacaactattgaaatcgataatgatcgtccagatatttttgtgctagatgttgagggctccgatggttcagaaagaggtgaagaccaagattttgagagaaaagccgctttgtttgccattgcagtatctgaagttcttatagttaatatgtgggagcagcaaattgggctatatcaaggtaataatatggctttattaaaaacagtttttgaggtcaatctttccctatttggcaagaatgataatgatcacaaggtgctgttactttttgtaattagagatcatgtaggtgtgactccactctcgagtttgagtgattccgttacgagagaattggaaaaaatatggacagagttaagtaaacctgctggttgtgagggttctagcctgtatgattatttcgatttaaagtttgtcgggctagctcataagttgttgcaagaagacaaatttacccaggatgtcaaaaaattaggtgattcgtttgtgatgaaaggtacggaaaactattatttcaaacctcaatatcaccataggttgccattagatggttggactatgtacgcagaaaattgttgggatcaaattgaacgtaacaaggatttagatcttccaactcagcaaattcttgttgctagattcaaaactgaagaaatatctaatgaagctctagaagagttcatttcaaaatatgatgaatcgattgctcctttaaagggtaacttaggatctttaacatctcagctagtgaagctaaaagaagaatgtctgacaaaatga

SEQ ID NO: 81316 - DNA, 150 bp, Saccharomyces pastorianus
atgttccatgacagattctttataaacgacttcactttctgggttgatgtccttcaagaagccttcaggatgagaagatggattttcagatttgaacaattggttgtaaaccctagtttcagtaactctcaatggagaattatattttga

SEQ ID NO: 81317 - DNA, 414 bp, Saccharomyces pastorianus
atgacggaaccagtacctagagactgggagaaaatggattcagagctaactgataacttaacaatcttttacacagggaaaatgccgtatattgctaaggacaccaaattttttcccgctgctttaccagcggatggtaccattgatttagtcataacggatgcaagaatcccagtgacaagaatgacaccaattttattatccttggataaaggttctcatgtattagagccagaagttattcactcaaaaatattggcttataagattataccaaaagtggagtcaggtttattttcagtggatggtgaaaagtttcctttggaacccttgcaagtggaaataatgcccatgttatgcaagacgttgctaaggaatggtagatatatcgatacagagtttgaatccatgtag

SEQ ID NO: 81318 - DNA, 369 bp, Saccharomyces pastorianus
atgagcatttcatgtcattggacaaataacccatcgtacgccgctctgtgccttgtcaaatccattgaaacaagaatagacttaatgtgttgttcccaaccttcttatatgaacgaatggccaagattatcctttttgagtcagacgtacggcgttattgcagaatctgatattaacactgaattcatcagatggatgggtcccgttaggtttaatttgggtgtagcattcaacattatccaaggtaagaaatatccctgcgaagttttcgtcaaatatgctgccaaatctaaaaaggaattaaaagttcatttcttagaaaataaagataaaaacaaaggatgtttaaccttcgaaccaaatccctag

SEQ ID NO: 81319 - DNA, 597 bp, Saccharomyces pastorianus
  modified_base (530)..(530): a, c, g, t, unknown, or other
atggtggtgcagaaaaaacttagggctatcttgaccgatgaaggtgtattgatcaaatcgcaatcacaccatatgttcaataagcatggtcaactcagaagcggagattctttatccttgttgagctgcttgtcctgtctggatgatggaactttgagctctgatggaggttcttttgatgaggatgattccctggaactgttgcctcttaatactaccattccgttcaacagaattttgaacgcaaaatatgtgaatgtcggtcagaaaggcttcaataatggcaaaatttcttcgaatccttttcaaacggaaaatctgagttcttcgtctgaaaatgacgacgttgagaatcatagtttgagcaatgataaggctcctgtaagcgaatcacagtcatttcccaaaaaagacaagtgggatacaaaaacgaacactgtgaaggtgtctcccgatgattcacaggattactcacccatctttagggattcaagatatcaaacggtaattgagttacttttgctgtaccnagggcctgatgttataccacaaataccttgtaatcaacacgtcttagaaacgagagcaattcgggag

SEQ ID NO: 81320 - DNA, 738 bp, Saccharomyces pastorianus
atgctaaaagatggcgtgaagaaggcagtggccttttctcaatatcctcatttctcttattccactaccgggtcatccatcaacgaattgtggagacagattaaggcattggactccgagagatctatatcttggtcggttattgatcgttggcctacaaatgaaggtctaatcaaggccttctccgaaaatatcaccaaaaaactacaagagtttccgcaacctgtcagagacaaggttgttttattgttttccgcacattctctacccatggatgttgttaacaccggtgatgcctacccagctgaggtagctgcgacggtttacaacatcatgcaaaaattaaagtttaaaaacccttataggttggtttggcaatcccaagttggaccaaaaccatggttgggagcgcagacagctgaaattgcggaatttttaggccccaaagttgatggcctaatgtttattcctatcgcctttacctctgatcatattgaaacattgcatgaaattgacttaggcgtcattggggaatcggaatataaggataaatttaagagatgcgaatctttaaatggcaaccagacctttattgaaggcatggcagatctcgtcaaaagccacttacagagtaaccaactctattctaatcaactacctcttgattttgcacttggcaagtccaatgatcctgtaaaggacctttcattggtatttggcaatcacgaatctacttga

SEQ ID NO: 81321 - DNA, 168 bp, Saccharomyces pastorianus
atgctttccagaacaatccgtacacaaggttccttcctaagaagatcacaactgaccattacaagatcattttcggttacattcaacatgcagaatgcacaaaagagatcacccacaggaattgttttgatgaacatgggtgcccctctaaagttgaggaacatatga

SEQ ID NO: 81322 - DNA, 1302 bp, Saccharomyces pastorianus
atgacaccatctaagccaaatgtaaggtttggtgatgatgatgttaacatttttgatcaaagaaaaaaagtaaatgaaatcaacaagaataacaccgtcataaggtcgatcccatcatcgataagcaccgctattacccccaacaagtctagcttaaagtcaccaaggggaaaaagggcttcgaagaattcttttgataatgaaactaagttagaatcgaaaaatgaaactctgaaagaggtcaatgacgcggttaaccgttgctatgcgctttgtaacattccaactaagcatgtatccataaatagtatttctgatttggcgcagacgttcgaaacgcttgctgtagggataacccatgaaacgaacagaaaagctgagtgtgaacggagcaagaatgcaatagattcactttactaccatgaacagctagaaaaaaaagaacttaatgaaaaaagccttcaaatggcaatcgatcacttgctgaaggtcacaaagcaaaatttgagacaagctgacgatggaaacaaactgaaagaaacagaagcactcaaaagtttcattgaggaaatagaggaagttgacgataataagatttccatcaacagtttacaacaacagttgcttgaagaaaaaacggcaaacaacattttgcgaagggattattataaactccaggaacgtggaaggcgtttatgtcacgagtttcaggagttgcaagatgattattccaaacaaatgaaacaaaaggaatatgaggtgcaaaaactcaagaatgaaattaaagttttattaaacatgaacgataacttaaaggcagagaaggcccattactctcagaaagagaaacaatattttcaaaaatatacctatatagagaaatacatgaatcatgtcaaggaagagtataatagaaaagaggacgaatgcaaaaaattgaactttattattgacaagagcatgaaaaaaatagaacatttggagaggtcgcttcagactcaatttaccgctcaaaacagcttctcaactgcaatgatccaagaggaaggcccgaaagatgcccatttgaaggatcgctatcacaaagtcaaagagtttatggaacaaaagttgcagacttccaaaattaatgacccctcttgttctgaggcagaggcacttgataatgtactttgcttaatcgaaagcagtatgaaaacactggaccaaaatagtaaatgttatccaattgcgacaaaaaagtgcataaagtatgttactgactcaccaagacttaaagaaaatgaacacgttacaaattga

SEQ ID NO: 81323 - DNA, 87 bp, Saccharomyces pastorianus
atgccagaagatacaagctatagcaactccttcgaggagtattacaacgattctcacgcgatttccccttacaaggattcattttaa

SEQ ID NO: 81324 - DNA, 303 bp, Saccharomyces pastorianus
atgattttcagtacaccagttctgtttaaagaattgataggaactattattacaaaaaattatcaactgacaaatactgaaacatttaatgaaaaagttcttcaggacataaagcagaatttagaaggcctttatccgaaaagtgtactaggtatgaaagaattgttacacagtgaaatgaaacagaagcttatcaaagcacaagcaatggagactaacggaaccttgcctttttgggcaagtggcgagccattcaaaagatttaaacagcttcaagagggaaacaggcgccacaagttataa

SEQ ID NO: 81325 - DNA, 195 bp, Saccharomyces pastorianus
atgagcagtcgtgtgtgctaccatattaatggtccctttttcataatcaaattaattgatccaaaacttttgaactctttaactttcgaggattttgtatacattgcactattactgcataaggcaaacgatattgattctgtcttgtatactagttctacaaagctcaggcaagtatttctcctcgggaggtaa

SEQ ID NO: 81326 - DNA, 222 bp, Saccharomyces pastorianus
atgaaaaatttttttttttcaaattctcctcaggctaaagttcacggttctctagctcgtgctggtaaagttaagtctcaaactccaaaggttgaaaaaactgaaaagccaaagaaaccaaagggtcgtgcttacaagagattattgtacaccagaagattcgtcaacgttaccttggttaacggtaagagaagaatgaacccaggtccatctgtccaatag

SEQ ID NO: 81327 - DNA, 255 bp, Saccharomyces pastorianus
atgctatgtataacgcaaccaagcaattttcgaaactcaatttggcttataaatgttcgagataaaatgcgaattacgtgttcaacgtcgtcgagatcagttattttttttcaccgccacagtgcgggtaagcaatttttcgcgtaccaccaccattacacatgtataatatatataggcttattatgtgtgtttgtgctactttatatgacggttatttacaagttagaatattatctattaacaatgcagtag

SEQ ID NO: 81328 - DNA, 585 bp, Saccharomyces pastorianus
atggcagatcaattgaccgatttcctgatcatgcaaaactttagagctaccgccattcatggtgaccgtacccaatctgagagagaacgtgccttggccgccttcagatctggtgccgctactttattggttgccacagctgtcgcagctagaggtctagatattccaaacgtcacccacgttatcaactacgatttaccaagtgatgtcgatgattacgtccatagaattggtagaactggtcgtgccggtaacaccggtcttgccactgcctttttcaacagtgaaaacagtaacattgttaaaggtttgcatgaaattttgactgaagctaaccaagaagtcccatcattcttgaaggacgctatgatgagtgctccaggtagcagaagcaacagccgtagaggcggtttcggtcgcaacaacaacagagattaccgtaaggccggaggcgctagcgcaggcggctggggctcttcaagaagcagagataactctttcagaggcggtagtggctggggtagcgattccaagtcttctggctggggtaacagcggtggttcaaacaactcttcttggtggtga

SEQ ID NO: 81329 - DNA, 1446 bp, Saccharomyces pastorianus
  modified_base (58)..(112): a, c, g, t, unknown, or other
atgcctgctgacttagcacctaacgacacgattttaccgaattggctaaaattctgcnnnnnnnnnnnnnnnnnnnnnnnnnnnnnnnnnnnnnnnnnnnnnnnnnnnnnnnctttagaaaattttgaaatgcaaagattagagaaatgcctgaaattcaagaaaaagcctttacatcaaaagcagctatcacaaaagcagaggggtccgcaatccacggatgattcaaaattatattctttaactagtttgcaacgacagtataaaagttctttgaaaagcaacatacagaaaaatcaaaagctaaaattaattataccaaaaaacaacacatcttcttcgccatcaccattatcttccgatgatactataatgacaccaataaatgattacgaacttactgaaggaattcagtcttttactaagaatagatattctaatatcttaccttacgaacattcaagagtaaagttacctcactccccgaaaccacctgcagtttctgaagcatccacaaccgaaactaaaacagataagtcatatccgatgtgtcccgtagatgcaaaaaaccactcctgcaaaccgaacgactatatcaatgcgaactatttgaagctcacgcaaattaatcctgatttcaagtatattgctacccaagctccgcttccttctacgatggatgatttttggaaggttattactttaaataaagttaaagtaataatatcattgaattctgacgatgaattgaatttaagaaaatgggatatttactggaataatctgtcatattccaaccacactatcaaacttcagaacacctgggagaatatttgcaatattaatggctgtgttctcagagtctttcaagtcaagaaaacagctccacaaaatgataatatcagtcaagattgtgaccttccgcataatggtgaccttacttccactaccatggctgtatccgagccgtttattgtttaccaattacaatacaagaattggttagattcatgcggcgtagatatgaatgacatcattaaactacacaaagtcaaaaattcgttattgtttaacccgcaaagttttattacaagcctcgaaaaggatgtttgcaagcctgatttgatagatgataataatagtgatttacatctcgatacagcaaattcatcgccactattagtccattgttctgcagggtgtggaagaacaggtgttttcgttaccttggatttcctactaagtattctttcacctacaacaaatcactcaaacaagattgatgtttggaatatgactcaggaccttatctttatcatagtgaatgaattaagaaagcaaaggatttcaatggtacagaatctaactcaatatatcgcttgttatgaggcattattaaattattttgccctgcaaaagcagataaagaacgcgttaccttgttaa

SEQ ID NO: 81330 - DNA, 255 bp, Saccharomyces pastorianus
atggatcgcatagcacagcaatatggtagtggcaaaagagacaataacggcaatagaatggcttcttccgctatatcggaaaagggccacatacaagtcaatcaaactagaacacctggtcaaatgcccgtctatagaggtgaaactataaatctgtctaaccttccccaaaatcaaattaaaccgtgcaaagatttggacgacgttaacatacggcggacaactctaataggcattctaaaatacttttactag

SEQ ID NO: 81331 - DNA, 303 bp, Saccharomyces pastorianus
atgtctcttcgtatagccgatttgccctggattaaaagccttgcgcttatagatgaggatatgatgacagacgtggttcagatgatattgaatgatcctgcagtacagagagcaattgaaaatcatcccaggagggagcagttttttatgtttataacacaactaccagatgatttgttaatgaaaattcaggcatttttgaaattaccgaacaaaaattccactaaacaagaaaggacaaattttgggtcagacgcgacacataaggacgagccagtgaaggctcataacaagctaaagtag

SEQ ID NO: 81332 - DNA, 378 bp, Saccharomyces pastorianus
atggctgtcgcgccagtaacaaactggacattgtatgattccgtttacacggaaagatatatgaaccaaccatcggaaaaccatgaaggctattttgaagtatccaccatccaaaatttcaaatcattcgaatctttaaagcgtcttttcattgtgcacggaactttcgatgataatgttcacatacaaaatacttttagattagttgatcaactgaatctattgggattgacgaactatgacatgcacatttttccagactctgatcattccatccggtaccacaacgctcaaagaattgtattccaaaaactatactattggttaagggatgcctttgctgaacgctttgacaacactgaagttttgcatttataa

SEQ ID NO: 81333 - DNA, 2112 bp, Saccharomyces pastorianus
atgtctacttcaactcattcgcataaaaggaagaatagtcatttatttccgcaaaggaaaagttcaaactcttccatggataagccattctttcctaataacgatagtgtagctaacacagatcctcaaagtaacgagaatggacatacaattaacgagattagaccgacagaagctacaatagatgttacagatgttcctcaaaccccctttctccaggaacaatactcaatgcgtcccagacgagaaagcttccagtttaatgatattgaaaaccagcatcacacgcattcctttttcagtgtaaacaaatttaatcgtcgatggggagaatggtctctgcccgagaaaagatcttatgtcttagtctttacattaatagcactatcagttttagttctacttgttattctaataccttcaaaacttctacctaccaaaatcacgcgtcctaagacatctgcaggagattctagtttgggcaaaagatctttctcaattgaaaacgttttgaacggagattttgccatccctgaggatactttccactttcttgacccaccacagcgcttattaggccaagactcagatccggggctatattttactacaaaagaaattgatggacatacgcattttattgcaaagcagttatttgatgagacttttgaagtaaaccttggcggcaataggttcctatatgaaggagtagaatttaccgtaagcactgtccaaattaattataaattggataaacttatatttggaactaacttagagtctgagtttagacactcctcgaaggggttttattggatcaaagacttaaacacaggtaatattgaaccgatattacctcccgaaaaatcagatgataattatgaacttggattatcaaaactttcctatgcgcatttttctcctgcatacaattatatctattttgtttacgagaacaatctgtttttgcaacaagtaaatagcggagttgccaagaaggtaacggaagatggctccaaggatatattcaatgccaaaccagactggatatatgaagaagaggtccttgcttctgatcaagcaatatggtgggctccagacgattcgaaggctgtatttgcaagattcaatgacaccagtgttgacgatatccgattaaaccgttacacaaatatgaacgaagcatacctttccgacaccaaaatcaaatacccgaagccagggttccaaaatccacagttcgacttgtttctcgttaacttacagaacggtataatttactcaattaatactggtggtcagaaggattccattctgtataacggaaaatggattagtccagatacattcaggttcgaaatcaccgatagaaactctaagatattagacgtaaaagtgtatgatataccatcatctcaaatgcttactgtgaggaacaccaattcaaacctgttcaacggatggatcgaaaagacgaaggatattttaagcatccccccaaagccagagttgaaaagaatggattatgggtacattgatattcatgcagacagtagagggttcagtcatctcttttattacccaaccgtttttgccaaagagcctatccagttgaccaaagggaactgggaagtgactggaaatggaatagtcggctacgaatatgaaacagatactatattttttactgccaatgagattggtgtcatgtcacaacacctttatagtatcagccttacggattctacaactcagaatactttccaaagtttacaaaacccatcagacaaatacgatttttatgacttcgaattaagttctagtgcgagatatgctatttctaaaaaactggggcctgatacacctattaaagtagctggtccgcttacaagggttttgaacgttgccgaaattcacgatgattcaatcttgcaactgacgaaggatgaaaagttcaaggaaaaaataaagaactacgatttacctatcacaagctataaaaccatggtcctagacgatggcgtagaaataaattacattgagatcaaaccagcaattaatcctaagaaaaataccgatataagcactttatgggcgcaggactcaaaatta

SEQ ID NO: 81334 - DNA, 1083 bp, Saccharomyces pastorianus
atgaagctactaaccttcccaggtcaagggacctccatctccatttcgatattaaaagcgataataagaaacaaatcaagagaattccaaacaatactgagtcagaacggcaaggaatcaaatgatctattgcagtacatcttccagaacccttccagccccggaagcattgcagtctgctccaaccttttctatcaattgtaccagatactctcgaatccttctgatcctcaagatcaaacaccaaaaaatatgactaagatcgatgcccccgacaagaaagacaatgaacaatgttaccttttcggtcactcgctaggcgagttaacatgtctgagtgttaattcactgttttcgttaaaggatctttttgatattgctaattttagaaataagttaatggtaacatctactgaaaagtacttagtagcccacaatatcaacagatccaacaaatttgaaatgtgggcactctcttctccgagggccacagatttaccgcaagaagtgcaaaaactactaaattcccctaatttattatcatcttcacaaaataccatttctgtagcaaatgcaaattcagtaaagcaatgtgtagtcaccggtctagttgatgatttagagtccttaagaacagaattgaacctaaggttcccgcgtttaagaattacagaattaactaacccatacaacatccccttccataatagcactgtgttgaggcccgttcaggaaccactctatgactacatttgggatatattaaagaaaaacggaactcacacgttgatggagttgaaccatccaataatagctaacttagatggtaacatatcttactatattcatcatgccctagatagattcgttaagtgttcaagcaggactgtgcaattcaccatgtgttatgataccataaactctggaaccccagtggaaattgataagagtatttgctttggcccgggcaatgtgatttataatcttattcggagaaattgtccccaagtggacactatagaatacacctctttagcaactatagacgcttatcacaaggcggcagaggagaacaaagattga

SEQ ID NO: 81335 - DNA, 204 bp, Saccharomyces pastorianus
atgcttgtcttgagaaagttggaagaaaattataggcccttaaatatactcaaaatgcagaaagtgtcatcttcttacatggcatcttttggccgtatgacaaggcgcatttcaacctccgatggaggaagtaaactgagtatcgaactcaaggataaaacaaagcttaccagtaacttgctgcatattagaactattcaataa

SEQ ID NO: 81336 - DNA, 96 bp, Saccharomyces pastorianus
atgaagtttgatggattgttcaacagacggcaaaaaatggcgatttttgccggtgtgattgttaatgttatgttttgtcttgtgagaggtttttag

SEQ ID NO: 81337 - DNA, 153 bp, Saccharomyces pastorianus
atgtatggtaccgcttacaagtttgaggaagtaagcaaggatctaattgccgtttactactcattcggtggcctcttaatgagattagaaggtaactatagaaatttgaataacttgaagcaagagaacgcttatcttttgattcgtcgttag

SEQ ID NO: 81338 - DNA, 783 bp, Saccharomyces pastorianus
atggatacggtagtaaagtcacaaagtaacggctacgaggaggacagcatcttgaaaatcatcgacaactccgatagaccgggagatatattacgtacagtgcacgttccagggaccaacgtgactcactcagttagattttttaacaaccatttatttgcatcttgttcagatgacaacattttaagattctgggacacaagaacagcggacaaaccgctttggacgctaagcgaaccgaaaaatggacgactaacgtccttcgattcctctcaagttactgaaaacctatttgtcactgggttcagcacgggtgtcatcaagctatgggatgcgcgtgctgtgcaactggctactactgacctcacacataggcagaacggcgaggaaccgatccaaaacgaaatagccaagttgttccattctggcggcgattccgttgtcgatatcctgttctcacaaacctctgcaacagaatttgttacggttggaggaacgggtaatgtctaccactgggacatggagtactctttttcaagaaacgacgatgacaacgaagacgaagttcgagtggctgctccggaggaacttcagggtcaatgtttaaaatttttccacacaggtggcacaagaagatcgagcaacccattcgggaagaggaacactgtggcgctacaccccgtaatcaatgattttgttggcactgttgattcagatagtcttgttactgcctacaaaccatttctggccagtgacttcattggcagaggttacgacgattaa

SEQ ID NO: 81339 - DNA, 609 bp, Saccharomyces pastorianus
atggcgaaaagcaaatccaatcagggtgcgagtggagcacgccataaaccggcaccttctttataccaacacatttctagctttaaaccacaattcagcacaagagtcgacgatgttttacattttagcaagacactgacatggagaagtgagattattccagacaaatccaagggcaccttgacgactagtcttttatattctcaaggtagtgatatttacgaaatagacactactttaccattaaagacattctatgacgacgacgacgacgacgacaacgacgacgacgacgaagaaggtaacggcaagacgaagtctgcagccaccccaaatccagagtatggtgatgctttccaagatgttgaggggaaaccattgcgcccaaagtggatttaccagggcgaaacagtggcaaaaatgcaatacttggaaagctcagacgacagtacggcgatcgcgatgtccaagaacggctctttggcatggttcagagatgagatcaaggttcccgttcatatcgtacaggaaatgatgggccctgctactagatactctagtattcactctctaaccagaccaggttcatttagcagtgtcagattttga

SEQ ID NO: 81340 - DNA, 225 bp, Saccharomyces pastorianus
atgacaagagatgtttttgaaaacaccctaagaaagcacggtattgaaaaattagacccattgggagaaccatttgatccaaataaacacgaagcaacgttcgagttgccacaacctgataaggaaccgggtactgttttccatgtacaacaattaggtttcaccttgaatgacagagttatcagaccagcaaaagtcggaattgttaagggcgaagagaactaa

SEQ ID NO: 81341 - DNA, 279 bp, Saccharomyces pastorianus
atgagagctttttcagcagccaccgttagggccacaactaggaagtcgttcatcccaatggcaccaagaactccttttgtgactccatcatttacaaagagtgtaggctcaatgagaagaatgagattttattctgatgaagccaaaagtgaagaatccaaagaaaacaatgaagatttgactgaagagcaatcagaaatcaagaaattagagagccagttaagcgcgaagactaaagaagcttctgaactcaaggacagattatcaagatctgtggca

SEQ ID NO: 81342 - DNA, 126 bp, Saccharomyces pastorianus
atgtggggcaaagtcaccagaactcacggtaactctggtgtcgttagagctacctttagaaacaacttgccagccaagactttcggtgcctctgtcagaattttcttgtacccatctaacatttaa

SEQ ID NO: 81343 - DNA, 1062 bp, Saccharomyces pastorianus
atgttggcggttgttaggtggtttatttctactttgagatctcaatactgctctagaagcgaatcgatgggttctgaaaagaagcctttgaacccattcttgggtgaggtatttgttggaaagtggaaaaatgatgagcatccagagtttggtgaaacggttcttttaagtgagcaagtttcacatcatccacctatgacagcattttcgatttttaatgaaaaaaatgatgtttctcttcaaggatacaatcaaattaaaactggttttaccaaaacattgacgctaacggtcaaaccatacgggcatgtcattttgaagattaaagatgagacctacctgattacaaccccgcctttgcatatcgaaggtattttagtcgcttctccatttgttgaattaggaggcaggtcattcatacagtcatcaaatggtatgttatgtgttatagaattttcaggaagggggtatttcacagggaagaagaactcctttaaggcaagaatttacagaagcccacaagagcatagtcataaagaaaatgcgctatacctaatctctggccaatggtcaggtgtttcaacaattataaaaaaagactcgcaagtttcacatcagttttacgattcatcggaaactcctactgaacatttattagttaagccaatcgaagaacaacatcctctggaaagtaggagggcatggaaggatgtggcagaagcaatcagacaaggaaatattagtatgataaaaaagactaaggaagaactagaaaataagcaaagagccttgagagaacaagaacgcgtgaaaggtgtggaatggcaaagaagatggttcaaacaagtggactacatgaatgaaaatacatcaaatgatgtagagaaagcaagtgaagatgatgcctttaggaaattggcgtccaaactgcagctttctgtgaaaaatgtgccaagtgggacattgattggcggcaaagatgataagaaagatgtttcaaccgcattgcattggaggtttgataaaaatttgtggatgagggagaacgaaattactatataa

SEQ ID NO: 81344 - DNA, 1089 bp, Saccharomyces pastorianus
atgatttggaagttgttggtgactcttgtcttaggcattgatcaacagcataatagggagcatttgaaagcgttaactcaggacgttaaagaagagacgttagagaatattgcgcacgagggcagaggtgataacacaggcgatcagaatgcagtagaaaaatcagatttcgaaaaatcagatacagaaggttcaagaataggccgcgacttaccctttgaatttggaaaacgtaacttgaccgaggaatcagacgtttgggatcataacgcttgggataatgttgagtggggtgaagaacaagtccagcaggcggaggaaaaaatcaaagagcagtttaagcatcctgtacctgagtttgacaaaaaactatacaatgaaaatccggcacgttattgggacattttttataaaaacaacaaggaaaactttttcaaggacagaaagtggttacaaattgaatttccaatcttatacgcatctaccagaaaagacgcagaacccgttacaatatttgaaattggctgtggggcaggtaacacttttttcccgatcttgaaagataatgagaacgaaaacttgaggataatagccacagattttgctccaagagccgtcgaattagttaaaaattctgaacagttcaaccccaagtacggccacgcaacagtatgggatttggccaatcctgacggtaatttacctgatggcgtcgaacctcattctgtggatattgcagtaatgatcttcgtttttagtgctttagcaccaaaccaatgggatcaagccatggataaccttcacaaaattttgaaaccaggcggtaagatcatatttcgtgattacggtgcatatgatttaactcaagttagattcaaaaagaacagaatcctagaagagaacttctacgttagaggtgatggtacaagagtttattttttctctgaagaaaaactaagagaaattttcacgaaaaagtacttcttggaaaataaaattggaactgatagaaggttgttggttaacagaaaaaggcaactaaaaatgtaccgctgctgggtacaagctgtgtttgacgttcctcaatag

SEQ ID NO: 81345 - DNA, 840 bp, Saccharomyces pastorianus
atgggtgtcgcagatttgatcaagaaattcgaaagcatctcaaaggaagaaggcgatgctaccgttgatacaaacagttcatcaaagcctctcaaatcaaacgatgaaaccaaagaattgcatcaacaagagtctactgctgttccgcaagaggttgacgtaaatgaagagtttgagaatgaaccagaaacaactaacagtagtagaactgctgagaaaccattggaaacaaacctcccaaaacctgaaactaacaaagaagacgaagaagagggctccatcagcgagaataaactagattctaaaagtgaaaatgctgacatcaacgttaatgattttcaagaatctaaagaaatggaaaatactggcgctgaagttcttgcaagtagtgttgaggaatccgatgctattcaagaaggtgtggctgaggaaactgaagggattgctactcctaaacaaaaagaaaacgaaaaaaatgatgaatcagaagaagaatctgcaaataatgcatctgaaccagccgaagaatattctcaatctgaagaagatgctgacatcgagcaatctaatggcaaagaaactgaaaatgccgaaaacgcttctcaacaagctaatgatggctctacaagtaccacgacttctaagaataagaagaaaaaaaacaaaaaaaaaaacaagaagaagagaaatggaaatgttaacaccaacgctaatgtcgacgacagcaccaaaaccggtgaaaatgatgatacaaccggcgacaccacgtcatcaacaacctccgccattcaagaagtgaatgatttggaagttgttggtgactcttgtcttaggcattga

SEQ ID NO: 81346 - DNA, 117 bp, Saccharomyces pastorianus
  modified_base (38)..(60): a, c, g, t, unknown, or other
atgagagctatggaagaatacgaacaaaagggctcatnnnnnnnnnnnnnnnnnnnnnnnacatggacaatatggtacgggaaagatattacagaccagccttgcattgacttgtag

SEQ ID NO: 81347 - DNA, 1599 bp, Saccharomyces pastorianus
atggaaacggcaaaaaaattcgaagataaatctgttagaactaaaattcaccaactgttacgtgaggcatttaaaaatgaattagaatctgtgactactgatactaacacttttaagattgcaagatcaaatagaaattcaagaaccaataaacaagagaaaattaaccaaaccagggacgctaacggtgtagaaaattggggatatggccccagtaaagattttattcacttcactctacataaagaaaataaggatactatggaagctgtcaatgttataacaaagttgttaagagttccaagccgtgtgattagatatgcaggtactaaggatcgtagagcagtaacgtgccaaagggtttcgatttcaaagattggtttggatagactaaatgctttaaataagactttaaaaggaatgattatcggaaattacaatttttcgaatgcaagtttgaatctgggagacttgaagggaaatgagttcgttgttgttattagagatgttaccaccggcaatagtgaggtatcactggaagaaattgtgtctaacggctgtaagtctttatcagaaaatgggtttatcaattattttggtatgcagagattcggtacattcagtatttctacgcacacaattggtagagaattgctcctttcaaactggaagaaggctgctgagttgattttatctgaccaggataacgtgcttcctaaatctaaggaagctaggaagatttgggcagaaactaaggacgcggctttagcattgaagcagatgccaagacagtgtctcgcagaaaatgcgttgctatattctttatctaatcaaagaaaagaagaagatggaacttattctgagaacgcttattatactgctattatgaaaattcccagaaatttgagaactatgtatgtacatgcctaccaaagttacgtctggaattctattgctagtaagcggatagaactacatggtttgaagttagttgtaggtgaccttgtcattgatactagtgaaaagtcaccactaatttctgggattgacgatgaagactttgatgaagatgtccgtgaagctcagttcattcgtgcaaaagcagtaactcaagaggatatcgactcaggtaagtataccatggaagatgtcgtgttaccatcgccgggttttgatgtgctttatccttccaacgaagaattgaagcaactgtatgtggatatattgaaagcagataatatggacccatttaatatgagaagaaaagttcgcgatttttcattggctggctcttatagaactgttattcaaaagccaaagagtttagagtatagaataattcactatgatgatccttctcaacaattggtgaacactgatttggacatcctgaataacaccagagcaaaagaaagcggccagaagtatatgaaagccaagttggacagatatatgccagataaaggcggtgagaagactgcggtggtgttaaaatttcaattaggaacctccgcatatgccaccatggcattacgtgaactcatgaagcttgagacttctcgccgtggcgacatgtgtgatgttaaggagaatatctaa

SEQ ID NO: 81348 - DNA, 411 bp, Saccharomyces pastorianus
atgtctgactcctcagaagccactgtaaagagaccccttgatgctcacgtaggaccttccgaaaatgctgcaaagaagttgaaaattgagcaacgtactcaggcagatggtattcacgaagcagatgtcggtattactttgttcttatctccagaattgccaggatttagaggccaaattaagcagcgttatactgactttttggtcaacgaaatagatcaagaaggtaaggtcattcacttaactgataaaggatttaaaatgccaaagaaaccacaacgctctaaagaagaggtcaatgcagaaaaggagtctgaagcagctagaagacaagaattcaacgtcgaccccgaattaagacatcaattggtggagatatttggtgaggaagatgtattgaaaatagaatcc

SEQ ID NO: 81349 - DNA, 267 bp, Saccharomyces pastorianus
atggttcaaagaaaactttggttttaccattcccattttttctacgcaagaggattattcaattacgatttcggtttgttgccatttagagcgcctatcaatgttgttgttggaaggcctatatacgttgaaaagaaaataacaaatccgccagatgatgttgttaatcatttccatgatttgtatattgcggagttgaaaagactatattacgaaaatagagaaaaatatggggtaccggatgcagaattgaagatagttgggtaa

SEQ ID NO: 81350 - DNA, 1134 bp, Saccharomyces pastorianus
atgtcaggaacattcaatgatataagaagaaggaagaaggaagaaggaagccctacagccggtattaccgaaaggcatgagaataagtctttgtcaagcatcgataaaagagaacagactctcaaaccacaactagagtcatgctgtccattggcgaccccttttgaaagaaggttacaaactctggctgtggcatggcacacttcttcatttgtactcttctccatatttacgttatttgcaatctcgacaccagcactgtgggttcttgctattccatatatgatttatttttttttcgacaggtctcctgcaactggcgaagtggtaaatcgatactctcttcgatttcgttcattgcccatttggaagtggtattgtgattatttccctataagtttgattaaaactgtcaatttaaaaccaacttttacgctttcaaaaaacaagagagttaacgaaaaaatttacaagattagattgtggccaactaagtattccattaatctcaaaagcaactctactattgactatcgcaaccaggaatgtacagggccaacgtacttatttggttaccatccacacggcataggagcacttggtgcgtttggagcgtttgcaacagaaggttgtaactattccaagattttcccaggtattcctatttctctgatgacactggtcacacaatttcatatcccattgtatagagactacttattggcgttaggtatttcttcagtatctcggaaaaacgctttaaggactctaagcaaaaatcagtcgatctgcattgttgttggtggcgctagggaatctttattaagttcaacaaatgttacacaactgattttaaacaaaagaaagggttttattaaactggccattcaaacggggaatattaacctagtgcctgtgtttgcatttggagaggtggactgttataatgttctgagcacaaaaaaagattcagtcctgggtaaaatgcaactatggttcaaagaaaactttggttttaccattcccattttttctacgcaagaggattattcaattacgatttcggtttgttgccatttagagcgcctatcaatgttgttgttggaaggcctatatacgttgaaaagaaaataa

SEQ ID NO: 81351 - DNA, 129 bp, Saccharomyces pastorianus
atggaggcagagtgcttgatcagctgtaacctatcaaccattctagaattcccatttgtaaggaagaagacagatgagcttttggaatctcttagtgttgaaggggatagggatgttcaaatgacttga

SEQ ID NO: 81352 - DNA, 1725 bp, Saccharomyces pastorianus
atgagtaagtatggtccattggatattactaactttattactccgtacgatctatgcatattaatcctaatacatgctcactgctcacaagataatggcatatcagtgccaacagcagtatttcttcggttaatatctcctactagaccttcactagaatggaatcctctgctcaaggataatagtaatttaagatcttcatctgttgttcctcctcctgtacttcctattctagataatataataaggatactgttagatgacaaggatggtaacaaaatagctctgacattaatgggctatttggaagcaattaatggactggattcaatcaacagactaatgatggatttagaaaagaactgtttggttaataattacaggtcaatgaaaatgcgtacaacatcaacaagaagacaaatgacaagagcgagttttttaggaacatttttgtcaacttgtatacgcaagtatcaaattggtgattttgaaatgagggagacaatctggattaatctacaaaatttcaaaactgtatttaagcatactccgctatggctacgatttaaagataacattcatattcaaaaggtaaaaaactgtcttctggctaacgacgagatctcggtggaggatcaacagatggtggaatttttccaacacttcaataatggtaatgacgctgattcaaaaacaatgaacgaagaaaattatgggacattgatttccatccaacatttacaatcaatagttaatcgacaaattgtgaattggttagataatacagaatttaatctgatgggtcaagaagaaactagttccacatatgaagaacaatgcggactagtttttgatttgctagatacgctttcattgaacgatgccacaaaattccctttgatttttatattaaagtatctcgaagctataaaagagaacagttatcaaaccgcactagattctctacataactattttgattacaagtccacgggcaattctcaaaattacttccatatctccttgttgtcccttgccaccttccactcaagtttcaatgagtgtgatgcagcgataaattcttttgaggaagccacgagaatcgcaagggaaaataaagatatggaaacgttgaatttgataatgatatggataataaacttcatagaggtgcacccggaatatgcaaacagattttatatcacagtagaacaaataataaaatatctgaaaaatagttcagatgtagaagatgccaatattttcagtaacgcctacaagtttgaaacattgttatctatggtcaaagaatcgaaaactgctgaagtttctagttcacttctgaaattcatggctatcactttgcagaacgtgccttctcaaaactttgatcttttccaaagtcttgttagctatgaagtaaaattttggaaagaactgggatacgaatccatatccgatgtatatgagaaattcctgtctaaaacatcctcttcctctttaaggaactacgactcttctattatcaaccaagatataaaggtagctttcaaggcacttgaagaagacgattttttaaaagtaaaacaataccttttgaaatcagaatcactgaaactagactacgaccaaaaaataaatttgaaatatttaagagtgaagtatctcgttaaaataggtgactatgacctaagcatgcgattaatcaaccaatatgtcagggat

SEQ ID NO: 81353 - DNA, 537 bp, Saccharomyces pastorianus
atgccggttactaaatctttatcaaagctgcaaaagaacttatccaagaaagggaaaaatatcacggttcatccgaagggtagaaagtatgaaaagctggtcagggctactatgcgtgaagataaaatcgcagccaaaaagaagcttcatcaagacaaaagagtccacgaactagctcgggtaaaatttatgcaggatgtagttaactctgatacattcaaagggcaaccaatatttgatcacgcccacacaagagagtttattcaaagttttattgaaagagatgatacggaattagacgaactcaagaagaagaggaggtcaaacaggccaccaagcaatagacaagtgctactgcaacaaaggagggatcaagagttaaaagaatttaaggcggggtttctctgtccagacttgagtgatgcgaagaatatggaatttctaagaaactggaatggcacttttggccttttgaatactctaagattgatcagaattaatgataaaggtgaacaagtcgttggaggaaatgaataa

SEQ ID NO: 81354 - DNA, 786 bp, Saccharomyces pastorianus
atgaatgaaatgtgtaaaaagattaatgccaaggaaaaactcattggatggtatcatagtggtcctaaattaagggcttctgaccttaagattaacgagctgtttaaaaaatatactcagaataatccgctattattaattgttgatgtcaaacaacaaggtgttggtttaccaacagatgcatatgtcgcgattgagcaagttaaggatgatggtacgtctacagaaaagacgtttctacatttgccttgtactattgaggccgaagaagctgaagaaattggtgtagaacacttattgagagacgtacgtgatcaagcagcaggtggcttatctatccggttgaccaaccaattaaaatctttgaaaggattacaaagtaaactaaaagacgttgtcgagtacttagacaaagtcattaataaggaattaccgataaaccacactatattgggcaagctacaagatgttttcaaccttttaccaaatctcggaacacctgatgatgacgaaatagatgtggagaatcacgacagaattaatatttcaaataacttacaaaaggctttaactgtgaaaactaatgatgaattaatgattatatatataagcaatttggttaggtcaattatcgcgtttgatgatttgattgaaaacaaaattcaaaataaaaaaattcaagaacaaagagtaaaggacaaacaatcaaaagtctctgatgacagtgagagtggtgacaaagaagcaactgcgccattgatccaacaaaagaacaagaaaaattaa

SEQ ID NO: 81355 - DNA, 765 bp, Saccharomyces pastorianus
atgttggaaatctactataagacgggcaaaaaaccaagcgagacatttaacgaacaaaaaataactttgaagtttgataccctatttttatggctatacagtaagccggagccacttttccaaaggcttgacgatcgtgtagacgacatgctagaaagaggcgccttgcaagaaatcaagcaattatatgaatattacagtcaaaataaatttacgccggagcaatgcgagaatggtgtttggcaagttattggcttcaaagaattcttaccgtggctaaccgggaaaactgatgacaacacagtaaaattggaggattgtatagaaagaatgaaaacgagaacacgtcaatacgcaaaaaggcaggtaaaatggatcaagaaaatgctgatacctgacatcaaaggcgatatatacttactggatgccactgacctttctcaatgggacacgaatgcatctcaaagagcgatagctatttccaatgactttattagcaatcgacccatcaagcaagaaagggcacctaaagccctagaggagctgttgtctaaaggcgaaactacgatgaagaaattggacgattggacacattatacttgcaacgtctgtcgtaacgcagatggtaagaacgttgtagctattggcgaaaaatattggaaaattcatttgggtagcagaagacataaatccaacttgaaaagaaacactcgtcaagctgattttgaaaaatggaaaataaacaagaaggagactgtggaatga

SEQ ID NO: 81356 - DNA, 327 bp, Saccharomyces pastorianus
atgctaaagggaccgcttaaaggttgcttaaatatgtctaaaaaagttatagtgattgctggtacaacaggagtaggaaagtctcagttgtccatacaattggcacaaaaatttaatggcgaagttatcaattcggattctatgcaggtatataaagatattcctattataacaaataaacatccgcttcaagaaagagagggcattcctcaccatgtaatgaatcacgtagattggtcagaagaatactattcccatcgttttgaaactgaatgcatgaacgctattgaaagatattcaccggaggggtacgatacccatcgttga

SEQ ID NO: 81357 - DNA, 201 bp, Saccharomyces pastorianus
tgcaggtcgactctagaggatcccgagatatccttcaaactgcttgatgaggtgaaagaaaatttaagtgccggcacagcattttacgaaaatttaattacttctaccagcaatctgtacaatgaggtacaggaatatgatacagcaagaagagcagaaaaagctaggcttgataagagtttgacatttgaagaccaatga

SEQ ID NO: 81358 - DNA, 747 bp, Saccharomyces pastorianus
atgagtacaaatacggaaatcataaaaaatagtgatttgcaaagtttaatcaatgataagaggaggttaataaatgaaataaaagactttaataaatccattaaacccttggagtttgaatcgtatcaggattatttcctgataaaaacgttcaaaaaaggaatttctgcaagtggccatgtggatattgacagtttaagaaataaagaatatggaatatactacaagaaaatcaagaggaactctacacaagaagttggcgaaccaatccctcgcaacacatcctcctcctcatcttctactagatcaaactcatcagctgatatcagcgatacagaatattcaggtgagaacactcctacaactactggtgctgccagtcgaagaagacgtacgagatctcgagctattcaaagagaaaatagtctaccagcatctttaccctcaattagtgaagcgaatgcaaacaatgatgatgttactatttctgaaataaatggaagtgaattgccatttccaattccaatatcagaagtggaaaatattgacattgcttcagatataactgaaagggatggtattagaaggagatcatcaaggatatcagaaagagacaaaagacgttcacagtctagactggggtcagaagaagatgaagaaggcgacggacatgacggagatgaaggggagaccaaaatccaagacctatatgagagtttggtacccaaaattttggagccaacgtag

SEQ ID NO: 81359 - DNA, 198 bp, Saccharomyces pastorianus
atggaggtgctatccagaatgattttacaatggttaaagtatgaaaatcatcaagctcataagatcattgttttcaacacctctgtcactatagtggattacgtcaaggactccaagcagtttattgtgagacgtgtcggaaacacccaacatcttggtgatggcgaatttgtcgtcagtgacttaagattacgttag

SEQ ID NO: 81360 - DNA, 495 bp, Saccharomyces pastorianus
atgactaaggaagtaccatattattgcgataatgacgataacaacatcatcagattattcattattaggcatggacaaacagaacacaatgtaaaaaaaattttgcaaggtcacaaagatacctcgatcaatcctacgggagaagaacaagccactaaattggggcattacttgcgttcaagaggtattcattttgataaggttgtcagtagtgatttaaaaaggtgtaggcaaactacggctttagttttgaaacattcaaagcaagaaaatgtgcctacttcctatacttcggggttaagggagcgttatatgggtgttattgaaggtatgcagattactgaggctgaaaagtatgctgataaacatggtgaaggctcttttagaaattttggggaaaaaagtgacgattttgttgctaggttaactggatgtgtcgaagccgcagtagctgcagcatctaatgaaggtgtcacgaatctagccctagaatag

SEQ ID NO: 81361 - DNA, 147 bp, Saccharomyces pastorianus
atggacgataactcaccactcgactttactgtatttgatgaacagtatggcaccagacccctcgtcttgcctcctgttgttacgtcaagcgtggctgaatctttcacagatgaagcagactcgagcatgacagaagcgagtgtatag

SEQ ID NO: 81362 - DNA, 351 bp, Saccharomyces pastorianus
atgatctttttactaacttatcttcaatttcaacggagagatgtaaacatcattctctcctatgataatttctttttttatacagaaggtgttgttgtcgccaagaaggatttcaaccaagccaagcacgaagaaattgacaccaagaacttgtatgtcattaaggctttacaatccttgacttctaagggttacgtcaagactcaattctcatggcaatactactactacaccttgactgaagaaggtgttgaatacttgagagaatacttgaacttgccagaacacattgttccaggtacctacattcaagaaagaaacccaactcaaagaccacaaagaagatattaa

SEQ ID NO: 81363 - DNA, 582 bp, Saccharomyces pastorianus
atgcaatcgcacgttgaatcacagggaaaagcaattaacaaattgattaggaaacatctagatcttgtaaaagaaaggccgcgcttcgaaagatctcgtgaggatctgctaaaggaaaatgctactttggcgattgagctcaccaaggaaattaccgtaagcaaacgatcatctggagaggaaaagaacgatagcgaaaccaaaggtactcatgttgagaagaaaaaagggactgttagtaagtcacctatttcaacacgaaaagttacactatctaaatcattagcgagtttgctaggagagcatgaattgacgaggaccgaagtagtacgacgactctgggcatatattaaagcgcataatctgcagaatcctaacaacaagaaagaaatactttgcgacgaaaaattagaattaatacttggcaagagtaccaatatgtttgagatgcacaaaattttggcaagtcatatgacagagcctaaaaaaataagcgactgtcctcctcttatccaagaagtccgcagaaaggaaaagcccatcgtttcagattccgagcaatcagatacaaagggcatttga

SEQ ID NO: 81364 - DNA, 123 bp, Saccharomyces pastorianus
atggctgaattaaacgattatagtacgatgatcgatattcttctctctgatatggatttggaaacggtcacaactaaaaaggttaggatggctttgaaagaagtatatgcaatcgcacgttga

SEQ ID NO: 81365 - DNA, 900 bp, Saccharomyces pastorianus
atgggaagaatatatagatcttttagcaggtcaagagatcgtgcaataaacctaatagtcaacaaattttctgattttattgcatttgccttctcgagaaccacattaaaaacagtgtgtggtcaccatggttctgcacttgcgtctgacgaagcagtatatgacgcaattttaccactatttgactatttaaacgcaaatttgaacattctggcatcagaactttcacagagattgttgtttatggtaatgctaagagcgtggaacctcgttttagagaacgctgatttacttcttctacctgcattgaatagcgctaaagttaatatattgcgttcagcaaagaaatctttgtgggaaaatactctttcaacaacaaaaacggtatcaggatacggtcgtcctttgactcaagcggaaatcgaggctgtattcaaatggcttgatgcgctgtgtgtagatttttttcataataaaggagaaggtccccctcttgcagaattgaaaaatgagtattaccaaaatatattgctgatcccagctttttatgataaaagtgtctccgaattgaaggatgaagttcagcgattgattcccctatatgaagagtatttgagatggttttatctgaagaaaactccgattacttttacgaataaatccgctggaacaatatctcgaaaaaagtcgctagcagctaacattgtaaaagagcctaaggaacaactggaacgtgatgcagaagtaatgaatattatattgagaatattgatcgcgaaaggccaacatgattacgttcatcgaattttacatgacagaaaagaacttgttaatactatgaaaaatagaagagcggtgagtagagcggtcactcctacaggaaaaaagggcagaaactga

SEQ ID NO: 81366 - DNA, 2811 bp, Saccharomyces pastorianus
atgaatcgaacagtctccacattatcatctactgtatctgatgtatccgtggaaataccgtcaatatgcaacgtcattaataccgaattaccaacatcagatgtctatctttacactttaaaactaattttgttggattatatcaacgaaccgcgatttaaagaagcagctttgctatcgaataggacaagaacgtcaagtgttttatctgacaaaacgaatcatcagcaaacgcaacatgggaagaaactagtggttgacaaacaagacgatatgtcggaacgcgatatagtacaggcaactttacgtatattaaaagggaagttggcacaaatttcaggaaataaaaacttggcgccgaatgagatgcattggaaaagtattgttaagatgtattatagcatgctcgattcttctagtgcagatacattttccaagatgggtcaaatggaggaggtggtcggttatttcacaaatattgccagtaatgaactaaagaaaatgactattaaaaattctcgtgacgagctgttcagtgaagttgcttattttatagacctagtaattgatgtacttccagatagttgtgcaaatatcataaagagactgcttgattataagattaatcttaaaaaaggcgagacaacagtaaagaagaaaagagccgcctcacctgccacagtccctcaatatagaagcatttccgggagcacgattagcaataagcaaccctctttcaaagtccaagatatttcacatatgaagtattttatgcagttattcgaaacagatgaaacaaagcttcaacaagacgtaatggctgttaaggacgattgtacaaatcccatattttgcggtgaactaagatatcttaggaaaaaaatcaagaaagacaacggtactttgacggcttctgatttttcaagtgacagagaatacaatttatggaagaattatgaacttcttgaaattgcaaatttaatggatcgatttgagataggcgaaaaggttacctctcacggaaaccgtcttatacccaaggatgcaaaaagcgtatttgtccgtctcataggccttgttttaaaaaaagagtgttctaatgctgtaaatgccataaatctttctcaagaagctctattcttctttcataaatcagcgaggtattggagaatagaatatccttccaccatctcctcgttggtttattcagcagcaaatttaagtgttctaggagatgaagagctaaatatcccaataactgaaaacttgttttctgtcatccgcaataaatatttatgttcagaggataatctggatccatccgcttggaatgctcaggatcgctatttatgggctgcaaacctttttcatacgactgatcagtctatgaggacaataaataaccttttaactgcgatattttcaggtacaaagccaaaattttctccagttttgtcattttattattcaaacattgttggggatccagtaatggaattctatgaaacgcagtccgtagctgtaaagaaatactggatcaaattatttaagaagactctttttaaagcatcagaggattattttgtctcccttctgcaggatatgctaaaggctaacacaatagaaattcaaaacgttcagaatctcgtagaaacaattatagaagccataaaagcgattcaaaaacgttacaataaacctttattggacgaaatatctctgcctagacaatgcgcagtatttctatgtgaagtatacggttcggattctttaaatctaataaaaaccgctgaaaagagtaccatgaaaatgactggacaaaagttgggtccaatagatgcgctagatatgtatgatgtactgaaagaactgagacagatttacctgcaggtaaagccaaaagggaaatttttctttaaccttgaaaattacttcatcaaatatttgactcgattatgtgatgatgtgagccgtaatgttcaaaaagttattaaatcttcactagaaagcgagaattggcaacccgtaaatgaccaggaccatttcagtagatcagttttggacatattcaaaatgataaatgaatcaactagcatgttggagaaatttggttggcaaaatgaatttcaactggcacaaatgatcacggtaatattaaaggcgttttcagatggtatgctttcatactcagctcaactaatggaattgatccagagagatttacaggagggtgatgaaccatcctactctttagaaagctcagacactcgatcttcacttagcctgaataacgctaacgtaaatcatgaaaaatcaagaagtagtaggctgtttgaagatttgaaaaatgtagttaaatcaactccgaagatggtagctcctgctccatatcagttcaagaagcgtacgtgcgtactgctaaatgatcttgataaaacactttttctgttagagagcttcgaagaaaaagcagatccatcaaaaatatcctctgttattgcacagtaccactcctcccataatttagaggataatgggaagtcattcgatgaccagaatatgaagcaagtttatacccttcgaattatcggtgctgaaaatattaaaggcttcagcaaaacggggctttcaaactcctacgtttccatgagaaacatcactttacaacgggaaataggtactactaagattgttgcaagatcgattactcccaaatgggacgaagagtttgtgtttgagtctccattcggaaagtcgaacgatattatgtttactatatggcaccatccacacagcagattaaagacttag

SEQ ID NO: 81367 - DNA, 171 bp, Saccharomyces pastorianus
atggcaccatccacacagcagattaaagacttagcggaagatgatctatgtggaaaagccaatatgaaattcactccgagaaagctcaaggatgatgggtttcctatcgatatttcgctcacattgaatccgcagggaactttatattggcaaatatccctggaaagtgag

SEQ ID NO: 81368 - DNA, 456 bp, Saccharomyces pastorianus
atgtctgactgggatacaaatactattattggtagcagagcaagagctggtggttctggcccaagggccaacgttgccagatctcaaggccaaattaatgctgcaagaagacaggggttggttgtttccgttgacaagaagtacggatcaaccaatacgaggggtgacaacgagggtcagaggttgaccaaggtcgaccgtgagacagatattgtcaaacccaagaaattggatccaaatgtcggtagggccatctcgcgtgccagaacagacaagaaaatgtcgcagaaggatttggcaaccaaaattaacgaaaagccaaccgtggtaaacgattatgaagccgctagagctattccaaaccaacaagttttgtctaagttggaaagagccttaggcgttaaattgagaggtaacaacattggttcgcctttgggagctccaaagaagaaatga

SEQ ID NO: 81369 - DNA, 660 bp, Saccharomyces pastorianus
atggaagaagaataccaaaaatcatcatcttcgttaccaaaggacgttaacaaacaagaagaacagcctctgagggctaaacggctgtgtgaacgatggttagacaacctcttcatgcttttatatgaagacctgaagatgtatacattatggcaaaccgaacaactgtacatggatgcacagaataacaaccacaataagttgactttcgaatgggagttatttggcctttgtgcacgtcgactgggccatttccctgaggccgccaaggccttccagaacggtttatcgcagagattttcatcaaggtgcgcgaggaaactgctggaatattgtataaacgaacgccaacgggtcaaaaattttataagctcacctaattcgcatgacatggtccctgaaatagtaagctcacgcataagagagctagacaatagcattatcgacctttgcgtgaagatatgctgctggaaccaccgttggtatacggaattttccataagtttacttgattgtttaagtgtggtcattcaagatatgggtctgaccaaagtttcgaatgaaatctcgtcaagatatccagaaactgttctcaacttggtgcaggagaatttgctcaatttcttcactacttgcaccattggatgctacgatgcataa

SEQ ID NO: 81370 - DNA, 1476 bp, Saccharomyces pastorianus
atgattacgcagaattctataccagaggtaaaagaagattttattggttatgttttacatgagagaagaattcggttaccgcagtttcaagacttagggccggcagacttggtcacactaacaaagtatttgcccacttcaagtaacataaatgccataaacagtacgagtagaaatggtgcggccattattcagtcccctgcagccgttgtagccgatgactctgccgcttccatggcaaccaatggcgatgctagtgacaccgccgttaccacaaattatacaaatgcatctatatacagtagcagcagaaatgccaatgatggagccccgatggtcgctgagctccatccacttgataaactgaaggacgaagtagggacatttttttactcaatgggtgtcgatacatccggtccaacttcaatcgcaatttttttgaaggagatttcagaggtcatcagcgagaaaccccaagtttggtttggcaggaagaaaaccttcaatgttgctcgaatttcattttccacttggaatgcgttcaggagatgcgacataaatgtcgtcgttcatattccaggatcgattcagaactttatagtggattgcaacggtgaaagtcaaaatatagagatgtgtgcggattatgacttaatttgggctgaaacgttcgtaagtggcgtagtacggtcaatcatgttaatgaaggaaaacgctgaagagggagaattacaaaatttggtggaaacattgattttgaacccgtttactgcaggacaaatcgacgatgtaccagaaatgttcattgatctgttccctatagtttaccataagggcccattattgggagctccgtattatattaccaatgtgacgaacactaataactatttggtagaaacactcgtagagatagttaagctgactcgtaatgttagcagggcggaaataatgttgaagaatctggctactgacaaccctgaggcgatcataatactaatcaagatctttttggtgtgtgatcaagaattagacgcaataaagctcacatacgatatgctttcgcaggataaaataataaacaacactaataaccgcatggattataaatctgaattactgtgcttacaagcgcaatttttgatagacaaaaggcaggattacagcttggcgcaaaacatagcgcaagaggcagtcaattgttctcccagtgaatttagaccttggtatcttttatccaaagtgtatgtaaagctaaatgatattgaaaatgccttactgatactgaattcatgccctatgtctccattaaaggaaaaatacgtactgaaaagagtagctccgttgccttcgaataatagtcttcatttgccattgccaattgacgttgtactggatgaagtgacgtcgttgaatccacaagacgttcagaatgaacaccagctctgcgagatccacatgctgtgtcacatttag

SEQ ID NO: 81371 - DNA, 138 bp, Saccharomyces pastorianus
atgcattttatattgaagacctgcaagatgtatacattatggcaaaccgaacaactgtacatggatgcacagaataacaaccacaataaagttgactttcgaatgggagtatttggcctttgtgcacgtcgactgggc

SEQ ID NO: 81372 - DNA, 2103 bp, Saccharomyces pastorianus
atgacagacatgcaaatacaatggtataaatcattattagagaaggatatagacgctgttaacggtgctgttggaaaaagagaaggcaaaacgaggttactgaatattgttatgcaattaaggaaatgctgtaatcatccatatctttttgaaggcgcagaacctggacctccatacactaccgatgaacatttgattttcaattccgggaaaatgattatattagataagttactgaaaagactgaaggaaaagggatctagagtattgattttcagtcaaatgtcgagactattggatatcttagaagattattgctattttagagattttgaatattgcagaatcgacggttctactagccatgaagaacgtatagaagctatcgatgagtataataaacctaattctgaaaagttcgtttttttgctaacaacacgtgccggtggtttaggtattaaccttgtcacagccgacactgttattctttttgattctgattggaaccctcaagctgatctacaagcaatggatagagcgcatagaattggtcaaaagaaacaagttcatgtttatagatttgtcacagaaaatgctattgaagagaaagtcattgagcgtgccgcacaaaagctgagactagaccagttggttatccaacagggcacgggcaagaaaactgcatctcttggtaactcaaaggatgatctgttggatatgattcaatttggcgctaaaaatatgtttgaaaagaaagcaagtaaagtcactgttgatgctgatatcgatgatattttgaaaaagggggaacagaagacacaagaactaaatgccaaataccaaagtttaggacttgacgacttacaaaagttcaatgggatcgagaaccaatctgcttacgaatggaatggtaaaagctttcaaaaaaaatccaacgacaaagtagttgaatggattaatccttcccgaagagaaagaagaagagagcaaaccacttattcagttgacgattattataaggaaattattggtggtggctctaaatcagcaagcaagcaaactccgcagccaaaagcaccccgcgctccaaaggttatacacggtcaagatttccagttcttccccaaggagttagatgccttacaagaaaaggaacagctttacttcaagaaaaaggtcaactataaggttacttcttatgatattacgggagatatacgtaatgaaggaagcgatgctgaagaagaagaaggagaatacaaaaatgccgctaatacagaaggtcataaaggtcatgaggaacttaaaagaaggattgaggaggagcaagagaagattaattcagcaccggattttacccaagaagatgaattacgaaagcaagaattgatatcaaaagcctttactaactggaataagagggactttatggcgtttatcaacgcctgcgccaaatacggtagagatgatatggaaaacattaagaaatctattgattccaaaacaccagaagaggttgaagtgtatgcaaaaatattctgggaaagactaaaggaaatcaatgggtgggagaagtatttacataatgtagaacttggtgaaaaaaaaaatgaaaaactgaaattccaggaaactctattgaggcagaaaatcgaacagtgtaaacatccattacatgagctgataatacagtatccacctaataatgctagaagaacttacaataccttagaagataaatttttattattagctgttaacaagtacggacttcgtgctgacaagctctatgaaaaattaaagcaagaaatcatgatgagtgatttgttcacttttgattggtttataaagacaagaacggtgcatgagctatcaaaaagagtccatacgctattaactttaattgtaagagagtatgagcaacctgacgcaaataagaagaaaaggagtagaacttcagcgactagagaggatactcctttatcccaaaatgaaagcactagagcttcaacggttccaaatctcccgacgacgatggtgacaaatcaaaaagatacaaacgatcatgttgataaaagaaccaaaattgatcaagaagcatga

SEQ ID NO: 81373 - DNA, 750 bp, Saccharomyces pastorianus
atgacgacccagcaagaggagcaacgaagtgataccaagaatagcaaaagcgagtcaccttcagaagttttagtcgatactcctgactcaaagtcaaatggcagtagtgatgatgataatatcggacaaagtgaagagctatcagataaagaaatatatacagtagaagatagaccaccagaatattgggctcaaagaaagaaaaaattcgtacttgatgtagatccaaaatacgccaagcaaaaggacaagtccgatacgtacaaaagattcaaatatttattaggcgtcacagaccttttccgtcattttattggaattaaggcaaaacatgataaaaatattcaaaaactcttaaaacaactagattctgatgcaaacaaactttccaaatcacacagcaccgtcagttcgtcatcacgtcaccatagaaaaacagaaaaggaggaagatgctgaattaatggctgatgaggaagaagagattgtagatacatatcaggaagacatattcgtctcagaatctccctccttcgtcaagtcaggaaaattaagagactatcaagttcaaggcttaaactggttaatatcgttgcacgaaaacaaactatctggtatcttggccgatgaaatggggctgggtaaaaccttacaaacaatttcattcctaggttatttgagatacgtcaaacaaattgagggaccctttctaataatagtaccgaagtcaacactagataattggagatga

SEQ ID NO: 81374 - DNA, 1755 bp, Saccharomyces pastorianus
atggtttatctgcgattaccgcccagtggccttattgatattgatatcattgtgtacgttagaacagaaaaaaagaaatttggaaaatttttcaacctcatcgaaaattttcagaaaagcaagaattatttatgctttcgcaaaaatttcgcatatgttatttttgaaatagcagtcgataccaaattagctgtagaacctcaacctcctcatacaatggcttacgttttaactgaaacttcagctggttatgctcttttaaaagcttccgataagaaaatctacaaatcttcaagcttaattcaagacttggatagctctgacaaagtcttgaaggaattcaagatcgccgccttttccaagttcaactctgcagctaacgctttagaggaagccaactccattattgaaggtaaagtttcttcccaattagaaaaacttctggaagaaattaaaaaggacaagaagtcgaccttgattgttagtgaaactaaactggcaaacgctattaataagttgggattgaacttcaatgttgtttccgatgctgtaaccttagatatctatagagctatcaaagaatatttgccagaattgctgccaggtatgtctgataatgatctaagcaagatgtctttgggtttagctcattccatcggtcgtcacaaattaaaattttctgctgacaaagttgatgttatgattattcaagcaattgctttattggatgatttagataaagaattaaacacatatgccatgagatgtaaagaatggtacgggtggcactttcctgagttagctaagattgttactgattccgtcgcttatgcgagaattattctaacaatgggtatcagatccaaggcttctgaaacagatttgagtgaaatcttaccagaagagattgaagaacgtgtcaaaaccgctgctgaagtgtctatgggtactgaaatcactcaaaccgatctagacaacatcaatgctttagctgaacaaatagtcgaatttgccgcttacagagaacagttgtccaattacttgtctgcaagaatgaaggctattgctccaaacttgactcagttggttggtgaattagttggtgctagacttatcgctcattcaggttccttaatttccttggccaaatcaccagcttctaccatccaaatattaggtgccgaaaaggctttattcagagctttaaagaccaagcatgatacaccaaagtatggtttgctatatcatgcctctcttgttggtcaagctactggtaagaacaaaggtaagattgcaagagttctggctgctaaggccgctgtctcattgcgttatgatgctttagctgaagatagagacgattcaggtgacattggtctagaatcaagagccaaagtagaaaatagattatcccaattagaaggtagagatttaagaactactccaaaggttgttcgtgaggctaagaaggtggaaatgactgaagctagggcctacaatgcagatgctgataccgcaaaggctgcttctgattctgaatccgattctgatgatgaagaggaagaaaagaaagaaaagaaagaaaagaagagaaagagagacgatgatgaagattccaaggattctaaaaaagctaagaaggaaaagaagaaggaaaagaaggaaaagaaggaaaagaaggaaaagaaggaaaagaaagagaagaaagagaagaaggaaaagaagtccaagaaagagaagaaagagaagaaataa

SEQ ID NO: 81375 - DNA, 978 bp, Saccharomyces pastorianus
atgcctgcaggtcctgagcggtgttgtcgtagagcagttgaacattacgtaaacagatatctacgcatttctgtcatttggattcatacagggtttacagacaatatggggaccgaagatgccattgcccttccaaatagcacgctagggccgcgtaccgaagctaagcaaagactatcatctaagagtcatcaagtctcggcgaaagtaacggttccagcaaaagatgaaattagtagtagcgatgacgatgcacacgttccagtgacagaaatacatttgaaatctcatgaatggttcggcgattttataactaaacatgaaattccccgtaaggtgttccattcttccattggctttattactttgtacctgtatacgcagggtattaattataaaaatgttttatggcctttgatatacgccttcatcatattgtttattttggatctgataagactaaactggccctttttcaatatgctttactgtagaactgtgggtgcgctaatgagaaaaaaggagattcatacatacaatggggtattgtggtacattcttgggttaatcttttcttttaactttttctctaaagatgttaccttaatatcgttatttttgctaagttggtccgatacagccgccgcaactattggaagaaagtatggtcatttaacacccaaattggcaagaaataaatcccttgcaggttcgatagctgcgtttacagttggtgttatcacctgctgggtattttatggctattttgttcctgcctacagctacgtcaacaaacctggcgagatccaatggagcccagaaacaagcagattaagtttgaatatgctatccttgttaggtggtgtggtagctgctttgagtgaaggtatagatttgttcaactgggatgataatttcactattcctgtcctgtcatcactttttatgaacgcagtaatcaaaacattcaagaagtaa

SEQ ID NO: 81376 - DNA, 441 bp, Saccharomyces pastorianus
atgagaatttttgcttcaaatgaagtcatcgccaagtctcgttactggtatttcttgcaaaaattgcacaaggttaagaaggcttctggtgaaattgtttccatcaaccaaatcaacgaagctcacccaaccaaggtcaagaacttcggtgtttgggttagatacgattccagatctggtactcacaacatgtacaaggaaatcagagacgtatccagagttgctgccgtcgaaaccttataccaagacatggctgctagacacagagctagatttagatctattcacatcttgaaggttgctgaaattgaaaagactgctgatgtcaagagacaatacgtcaagcaattcttgaccaaggatttaaaattcccattacctcacagagtccaaaaatctaccaagactttctcttacaagagaccatcaaccttctactaa

SEQ ID NO: 81377 - DNA, 852 bp, Saccharomyces pastorianus
atgcatatgccatcatcccacacacatacacatgcccatgttgatggaatagagaatactacaccaatggatagcacggataacattagtgagattatgcctaatgctatagtagatagttttatgaacgaaaatactagattattgacaccggaaaatgcatccaagacgccatcatactcaacgtcaagccatacgattgccagcggcggaaattacacagaacacaacaagcgcaagagatctttaaatatgcatggtgtgtttcttcacgttttgggcgatgctcttggcaacatcggcgttatgttgtctgcatttttcatttggaagaccgactattcttggaagtattatacagatccgcttgtctcattgataattaccggtataattttttcctctgcgcttcctctatcgtgcaaggcttccaaaatattgttacaagcgacaccttccactttatccggcgatcaagtagaaggtgatcttttgaaaataccaggaataatagctattcatgatttccatatttggaatttaacagagtctatttttattgcatctttgcatattcaactagatatcagcccggaacaatttactgacctggccaaaatagttagatcaaaacttcaccgctatggcattcactccgctactttgcaacctgaatttattaccagagaggttacttcaaccgaaagagccggagactcccaaggtgatcatctacaaaatgacccgctttcattaaggccaaagacatatggtactggcatttcaggttccacttgtcttatcgacgacgctgccaactgcaacacagctgattgcttagaggatcattaa

SEQ ID NO: 81378 - DNA, 222 bp, Saccharomyces pastorianus
atggatatgcttctggagcttcttcttccagtctatgcgagattgaatgagagcggctggttgctatggtttgtcttccatgatgtgtacgaagctgtgaaaatgagtactaaggagtcagtgcacaccagggtaatcaatttccctgatattttgtcaactcaacaaatgagacagggtccatctcagatcaggacacctctggtaatgcttcttatgtga

SEQ ID NO: 81379 - DNA, 513 bp, Saccharomyces pastorianus
atgggggtattagtgatttcatgcattgaaattgcagaaaatgctgcgaatctcgcttcacttttctttataatgtcattatctttctgcggtgttctggctacgccaaatattctaccaagattctggatttttatgtatagagtatcgccactgacatacctcattgatgctctgctatcggtaggactggccaatgctagtgtcgtttgttccagcaacgaacttttaaaaattgttcctccaagcggtatgacatgctcggaatatatggaaccttatatgcaatccaccgggacgggttatctgctcgatgggagttccgaaactgaatgtcacttttgtcaattcagttctaccaatgattatctggcgactgtgagttcttcgtattcacgtagatggatgaactatggtatttttagtgcatatattgtctttgactattgtgcagcaatatttttatactggctggtgcgggttccaaagaaaagcaaaaaattaaagaaataa

SEQ ID NO: 81380 - DNA, 1056 bp, Saccharomyces pastorianus
atggttatgtcagcagcaggattgcattttgaaaccgcaactgtgagagagtcattaaggttttccgcgtatctgcgtcaagccgatgatgtatccatcgaggagaaagataaatacgttgaagaagtcattgaggtattggagatgaaactttatgctgatgccatagtaggcgttcctggtgaaggtttaaatgtggaacaaagaaaaaggttaaccataggtgtggagttagctgccaaaccaaaactgttggtatttttagatgagcccacgtctgggcttgattcccaaactgcatggtcaacttgtcaattaatgaaaaaattggctagtcgcggacaagcaattttatgtaccattcatcaaccttctgctctcttaatgcaagagtttgataggttactatttttgcaagagggcggacaaactgtatattttggagagctagggaaaggttgcaaaacaatgatcaactatttcgaagctcatggtgcccataaatgcccaccagatgccaatccagccgaatggatgttagaaatagtaggtgctgcaccaggaactcacgctagtcaagattattttgccatttggagagattctgaagaatatagggaaatgcagaaagagttggactggatggaacgagaattgcctaaacggacggaaggttcctcaaatgaggagcagaaggagtttgctacgtcaactttgtaccagatcaaattggtgagttatcgattattccatcaatattggagaacaccattttacttatggtcaaaatttttttcaacaattgtgtctgaactcttcataggcttcacttttttcaaggcgaatacatcattacagggcctacagaatcaaatgctggccatttttatgtttacagtagtattcaacccaatattgcaacaatatttaccacttttcgttcagcagagggaactttatgaagctacgagaaaggccatcaagaaccttttcgtggaaacgcatttattgtatcgcacgacttctcgtggaacatccctatggaactttactggc

SEQ ID NO: 81381 - DNA, 93 bp, Saccharomyces pastorianus
atgctgtatcggatggtgcgtggcctgttctgtgcctcttttgtaaaacagttacaaacaacttttcttgcaactgctattgttctttgctga

SEQ ID NO: 81382 - DNA, 435 bp, Saccharomyces pastorianus
atgtcgtccttcatcgactcgattaaatcgacgtctctttcaagagccttgacaatcgccttaggttccaacaacttcaaaagagcctccacgatcaatgattgcaaaatgggcttgtactcgtcccggttgttggcaattcctgacaacttttccttggtttcctcgaatatcccgtctagcgactgttcacgagcagaaagaaccttcaacctcattttgtttgctatcgttgacttagtaatctgttgcgaaagcatggccttcttcaacttgctcttgaagttgccgtcaatgttgttggtttcatttcttacgatgttggtcttctcgatttcgtactcttggtcagccttcaattggatttccttcgctttttcttcagcttcctttctgatgaaagcttgcatcttgttcaattcatcgttcacttga

SEQ ID NO: 81383 - DNA, 621 bp, Saccharomyces pastorianus
atggaactgaagcctgtgaagctcaaagaatggctgaacagtttgctgctgatttggatgctgcagacagctgccgtctctccaatcaaagaaaagaagttgaaggaacttggtgtcaaacttggtcaactttcaatttctgttatcacaaaaaatgaactgaagcaaaaatttaacaaaattgaaaaagcagtgaaggatgaagttaagtcaagggccaaaaaagaaaacaaacaaactcttgatgaagtgaagacatttttcgaaaccaatgagaatgctccatacctagttaaattcattgatatttctccaaatgctaaagctatcactgaagcgatcaactacatgaaatccaatgatgctgtcaaagacaagtcaatctatctattggcaggtaatgaccctgaaggtcgtgttgctcacggttgttacatctccaatgctgctttagccaagggtattgatggttctgcgcttgccaaaaaggtgtccagtatcatcggcggtaaggctggtggtaaaggtaatgttttccaaggtatgggtgataaaccagccgctataaaggatgcagttgatgatttggaaagtttgttcaaggagaagctttccatttaa

SEQ ID NO: 81384 - DNA, 2193 bp, Saccharomyces pastorianus
atgacgatcggtgataagcaaaaatggaccgctactaatgtccgtaatacctttctagactatttcaaatctaaagaacacaagtttgtcaaatcctctccagtagttccatttgatgatccaactttacttttcgctaatgccggtatgaaccaatacaagcctatctttttaggtactgtcgatccagcttccgatttctacaccttgaaaagggcttacaactctcaaaagtgtatcagagctggtggtaaacacaacgatttagaagatgtcggtaaggattcttatcatcataccttttttgaaatgctgggtaactggtcgtttggcgactatttcaagaaggaagctattacttactcatggactttgttgactgaagtatacggcattccaaaggatagattatacgttacctattttgaaggtgatgaaaagttaggcttggaacctgatactgaagcccgtgaactatggaaaaatgttggtgttcccgatgaccatatattacctggtaatgcaaaggacaacttttgggaaatgggtgaccaaggcccatgtggtccttgttctgaaattcactacgatagaataggtggtagaaatgctgcttccttggttaatatggacgaccctgatgtcttggaagtttggaatttggttttcattcaattcaacagagaacaagacgggtctttgaagcctttacctgccaagcatatcgacacaggtatggggttcgaaagattggtttctgttctgcaagatgttagatctaactatgataccgatgttttcacacctttgttcgagcgtatccaagaaatcacttcagttagaccatattctggcaattttggtgagaatgacaaggacggtatcgatactgcctacagagttttagctgatcatgtccgtacattgacttttgccttagctgacggtggcgttccaaacaatgaaggtagaggatatgttttgagacgtattctaagaagaggtgcccgttacgcccgtaaatacatgaattacccaatcggtaactttttctccactttggctccaactttaatttctcaggttcaagatatctttcccgaattagccaaggatcctgcattcctctttgaaatcttggatgaagaagaagcttctttcgctaagaccttggatcgtggtgaaagactatttgaaaaatatgcttctgctgcttctaagactgaatctaagactttagacggtaaacaagtttggagactttacgacacttatggtttcccagtcgacttgactgaattgatggctgaagaacaaggcttgaagattgatggacccggtttcgaaaaggccaaacaagagtcatacgaagcatccaaaagaggtggtaagaaggaccaaagtgatttgattaagttaaacgtccatgaattatccgagttgaacgatgctaaggtgcccaagactaatgatgaattcaaatacggcagcgccaacgtcgaaggtaccattttgaaactgcatgacggtaccaactttgttgatgagatcactgaaccaggtaagaagtacggtattattttggataaaacatgtttctacgccgaacaaggtggtcaagaatatgacactggtaaaattgttattgatgacgctgctgagtttaatgttgaaaatgttcaattgtataacggttttgttttccacaccgggtctttagaagaaggtaagttgtctgtcggtgacaagattatcgcttcattcgatgaactacgtcgtttccctattaagaacaatcatactggtacacatatcttaaactttgctctgaaggaaactttgggtaatgatgtcgatcaaaagggttctttggttgccccagaaaaattgagattcgatttctctcataaaaaggctgtgtcaaatgaagaattgaaaaaagttgaagatatctgtaatgagcaaattaaagaaaacttacaagtgttttacaaggaaattccattggacttggccaaatccattgatggtgttcgtgctgtctttggtgagacttacccagatccagttcgtgtagtttctgttggtaagccaatcgaagaattgttggccaacccagctaacgaagagtggaccaagtattctattgaattttgcggtggtacccatgtcaacaagacaggcgatatgtaa

SEQ ID NO: 81385 - DNA, 246 bp, Saccharomyces pastorianus
atgtcaacaagacaggcgatatgtaaatacttcgtcattttaacagagagcggtattgcaaagggtatcagaagaattgttgctgttaatggaactgaagcctgtgaagctcaaagaatggctgaacagtttgctgctgatttggatgctgcagacagctgccgtctctccaatcaaagaaaagaagttgaaggaacttggtgtcaaacttggtcaactttcaatttctgttatcacaaaaaatga

SEQ ID NO: 81386 - DNA, 1614 bp, Saccharomyces pastorianus
atgatctcctccattttaactaggttgttttaccaaggtacacatatatacaataatggtattgattataccactgaaagtagcttaccaagaatggatttgagcgagttttttagacctaataatttaacgatgtttgaagatggaaaatcagcttctattgatttactactaattttagatccacttgaagagagaacgcaaatgattctttctcttgttgagcaattcaggcctttgaaatttgttaatattcaggtaattttaatgccgacactggaattaaacattgtccctattagaagaatatacgttgatgacgcagatattgtcaaatcaataacttctgaggatagcagatcagatccagaagtagatattgaaatggatgttcctaattctttcattgtagataataattatcggataaaaaaattgctcatagaattacattccttctctagcaaaacagtcctttcagctggcaatattgatggtatggggggtgtatgcctagcacttgtcgattctgcagggaacattattgacaaaactacaacaatgaaaacctttggctatggacaatttcataccgacaaatttttaaagggttgctatataaaaagttgtgattcaagatataccgttcagtcattttctactgacgggcatcccgactttataccatcagattccttggatatactgtcgtacaatccacaaaaaatcgctgtaaaaatttcagaagagcctacacacgaggaagaatacgaggaaggtcgcaacaatgatacaataatcaatatttttactattttagagtccgggccagatgaggaagagaggtacatgcaaatgattttatccattttgtcaaagtgtcccgaaacgcaaaaggtgaattttttcattttagatcagccgtttatctccgacactttaaggaaatcatgtgagtatataaattcctctgatgaaatgagaggcaatgtcatttttttgaattatgaatggcctcaatggttaagaccgcaaagattttcttcaaggagaagggatgtctctagatttctgttcttggatgtccttttacctcaaaacatctccaaagtgttatatatgagtccaactgaagtaccgctggatccttttgacatttttcaatttcaaggcctcaaacgtgcacctctaggactattccgaatgagtggtgatggttattggaaagaaggatactgggaaaaaatgttaagggagaataatttagaattttattctaccgaaccggcctttttagtaaacttagagaggtttcgggagttagatgctggtgataaatacaggattcactatcaacgtatttctacagacgccatgtctcttgtcaatatcggccaagatctagttaacaacctacaactcgaggttccgattaggtttctcaagggatcgtataagaagaaattagttattaatgatgaatgtgtttctgaatggaagaaaaaaataaataagttcgcatcctctcctggcgatgaagacgtacctggagaaagtgttagcagcaaataccaagattccgacaatgccgctcctctgcatgacgaattataa

SEQ ID NO: 81387 - DNA, 666 bp, Saccharomyces pastorianus
atgaaaacaacgaaaaggattcctaacaaagaaaataggaaattgaaagtggtaaaatctgttgtgaactcagaagctctgcccaagagaagaagatacgataggaaaattaagagaagatcaagggagttgtacggagatgatggaaacaggtcagaaaactatgatgaagaaagtactcaagaagttccagttagatcagtgactccgatacgtcaagttaaaaggtctcttcatactatttcttcgccattggcctcacagggcgtagtgaataatgtccccaagtatattccaagcatgtcgtgggaaaagttgccggattactcacctcctcttcacactttgccgaatagtaataataaagttttaaaagtggaatggaaaggctctccaatggacttgaatcatgatcctctcaaacagcgtctgcatcctgcagaactagttctcgcacagattctgagacttccatgtgatctttatttggactctaaaagaagatttttcttggaaaaagttcatagattcaaaaaggggttgccgttcaggagaacggatgctcaaaaggcttgtagaatagacgttaataaagcatcaaggctatttgcagcatttgaaaaggtaggttggttacaagataaacattttgaaaagtatttgtaa

SEQ ID NO: 81388 - DNA, 429 bp, Saccharomyces pastorianus
atgctagataacatgcaatttcattctccagcaccggaacatcctcaattgaatgggggtattaacaaaattcccgcttcccacaaaataggttacaaattaaaccagcaagtgcagagattggctgtggtcaggaataatattgaagagagattgaactcgatggaatcctcacacggacagatatccgatagtagcgttgtccgtgctatcgatgcaagtatcgatgacttcctaataccttcacctccattatcgccaaagctgaggcaatgccccataataagccagcctcagctggttaatgtggaaagcgaccatagggagctgatcatgttgacccccgtttgggaagcgggcttgaactctcagaatacaaccataatacaaggaatttcttatcgcaatatagcttcttccgagatatga

SEQ ID NO: 81389 - DNA, 336 bp, Saccharomyces pastorianus
atgggtgaatcttcgctaccgccaagatcagcatgtaattcatcacagctaatattttcagtagtaaatcttaaagtacctgcagttggattagaattattcttattagtttgggagagttggttgacatattcaattaaggaatcatcgcttaacgtagatagaaaagaccttgcattcaagccgtcggtctttgctgttaaatgtgaatcattgacactttgctggctaaggcaattgtttttatcaggtgtttccctatttatagagtattccaaatcgctgtctaataaatctacaagaccaccatgttcacccatcgctggatatgcctag

SEQ ID NO: 81390 - DNA, 1191 bp, Saccharomyces pastorianus
atgatctttaccactgacgcaagttttgcaaacacctccaatgataaaatcatgtatatagactatgctaacctgacaaaagttatcgttccggggagatttatatacgtggacgacgggattctctcttttaaagtgctccaaatcattgacgaatctaatttaagggtgcaagcggtaaactcgggttatatcgcatcccataagggtgttaatctgcctaataccgacgttgatttgccccccttgtccgccaaagacatgaaggacttgcaattcggagtccgcaatggcattcacatcgtatttgcctctttcataagaacttcagaagatgtgttgtctatcagaaaagcgttgggttctgaagggcaagatatcaagattatatccaagatagaaaaccagcaagggttggataattttgacgaaatcctggaagtcacggatggtgttatgatagcgagaggcgatttaggaattgaaatcctggcacctgaagtattagccattcaaaaaaagctgattgcaaaatgtaatttggcgggcaaacctgtcatttgcgcgactcagatgctggattcaatgacacacaatccgagaccgacaagggccgaagtatcggatgtggttaacgctgtgttggatggtgctgattgtgttatgctttctggagaaacggcgaagggtgattatccggtgaatgcagttaatattatggcggcgaccgctctgattgctgaaagtactatcgcccatttggctctttatgacgatctcagtgacgccactcccaaacctacttccactacggaaactgtagcagctgcagctaccgcagcaatcttggagcaagatggtaaggccatcgttgtattatctactacagggaacacggcaaggctactgtcgaagtatagaccaagctgccctatcatattagtaacaagacacgcaagaacggcaagaattgcacatttgtatagaggtgttttcccatttctgtatgaaccgaaacgcctagacgactggggtgaggatgttcataggcgcctaaagtttggtgttgaaatggcgaggtctttcggaatggtggacaacggtgatactgttgtttccattcaaggattcaaaggaggaatcggccattccaataccttacgcatttctactgttggtcaagaattctag

SEQ ID NO: 81391 - DNA, 195 bp, Saccharomyces pastorianus
atgccagagtccagattgcagagactagctaatttgaaaataggaactccgcagcagctcagacgcacctccataataggtaccattgggcccaagacaaatagctgcgaggttattactgctcggagaaaagctggtttgaacatcattcgattgacttttcccatggctcctacgaattccatcaatcagtaa

SEQ ID NO: 81392 - DNA, 1818 bp, Saccharomyces pastorianus
atggtaaatatactgcccttccacaagaacaatagacacagcgcgggagtcgtcacctgcgcggacgatgttagcggcgacggtagcggcggcgacaccaagaaggaggagaatgttgtccaggtaacggaatcaccatcgtccgggtcgcgcaataatcatcgcagcgacaatgaaaaagatgacgccatccgtatggagaaaatatctaagaaccagtccgcgtcgtccaacggcaccatccgcgaggatttgattatggacgtggacttggagaaatcgccctccgtcgatggcgatagcgagccgcacaaactaaaacaaggtttgcagtcgcgccatgtgcaactgatcgcgctgggcggcgccatcggtaccggtttgctagtggggacttcatccacgcttcatacgtgcggtcccgcggggctgttcatatcgtacattattatttccgcggtgatctacccgatcatgtgcgcgctgggcgaaatggtgtgctttttgcccggtgatggttctgacagtgccgggtcgacggccaatctggtcactaggtacgttgacccttcgttgggcttcgccactgggtggaattacttctactgctacgtcattttagtggccgccgagtgtacggcggcatccggtgtggtcgaatactggaccaccgcggttcccaagggtgtttggatcacgatctttctatgcgtggttgttatactaaacttttccgcggtcaaagtgtacggcgaatccgagttttggttcgcgtctatcaagatattatgcattgttggactgatcattctgtcctttattttgttttggggtggtggccccaaccatgaccgtcttgggttcagatactggcaacatccgggcgcttttgcgcatcacctcacgggcggatcgctgggtaacttcacagatatctacactgggattatcaagggcgccttcgccttcattcttggtccggaactggtgtgcatgacttccgcggaatgcgcggaccagcgtagaaatatcgctaaggcttcgcgccgctttgtatggagactgatcttcttctacgttctggggacgctggccatctccgttattgttccatataatgacccaacattggtaaatgcgctggcgcagggcaaaccgggagccggctcgtcaccctttgtgatcggaattcaaaacgccgggattaaggttcttccccacattatcaatgggtgcatcttgaccagcgcgtggtctgccgccaatgcgtttatgtttgcgagcacgagatcactgttgaccatggcgcaaacgggacaggcacccaaatgtttgggcagaatcaacaaatggggtgttccatacgtggctgtgggtgtttccttcttgtgttcttgtttggcatatctgaacgtgtcttcatccacggcagacgtgtttaattggttttccaatatcagcaccatttccgggtttctgggctggatgtgcggctgcatcgcgtacctgagattccgcaaggctattttctacaatggcctctacgacagattgcctttcaagacgtggggacagccttacaccgtgtggttctctctcattgttataggcatcatcaccattaccaacgggtatgccattttcatccctaagtactggagagtagcagatttcatagctgcctacatcaccctacccatcttcctggttttgtggttcggccataagctgtatactcggacgtggagacaatggtggctccactgtgtcacgagatcgatgttactacagggctatgttcgagatcgacaagcttga

SEQ ID NO: 81393 - DNA, 1590 bp, Saccharomyces pastorianus
atgaaactcaacatagattataacctagttccattaatcaagtcgaaattatcttcacccgctttattgcaagaggtattaaacaaggctggcagctcagttacacaaaattgtcaaattttgtacttgtacttgaaactattcgaaaatgacgtaaattgcccgaaaataagcgagatttgtatcgacatttaccagaaaaagataaaattccaattaactactcaagtgaaaagacaatttaacgataattcgcccgaactgtttcaaatttttgtcattttgaaatactggcaattaataggacaaaatgatttcaatcaggaattgttttggaaatttgtagacatagtatccccacaaaagaagttaaatctgtacaacgaattcatccctataatacagcaaataatatctcaatgcgttagcctaaactacacaaggatcgttcaattaattaaatcagataacgaactgacttgccgatcaatatgtcatatgcccgatcaagaaaagatgtgttcccttttcttctcccagttccccctattgtcacctcaatccagatcgcttttgataggcgaacttgatcatcattgggatgttagaataagcttactcccgtcgaattcgtatcgaaaatttcgcaacatcattatcaactgtctcgatgattatacaataactcaacagggtgatgtaggacgtctggtaagaatacaggctttaaaacttatgcaatcccatcccgatttcttatctggcgattgcgactccatcaatccaaaattaacgagattgctggcggaacctgtaccagagatcagaaaactatgttatcaattacttgcttcggccacatcacaaatcactgtgttatctgactcttcgatactcaatttccgtcacaagcaaggtttaagtgaagaattctggaaaggatatgcagtgagcgctggagcaatacattttacagattctcagcttacttcatcaatagattcatttatcgtatactacagatctttgtctccttcacaacagctggaattatgtcacgatttaatcagaataattccaagcgctaaacaaatcgctgaatcaagaatacgtgatcgtaacaaggatccgttgacaggtggtatgagatttgacaccatcaaattcaccattcattgtgtaaaattttggactagaatcatggaatctgggttggttgttctacatccaaattttaattttcagggtgttttcgccaagttctataacctacatttattagattgtacgacattgagagtaagcgtgatcaaattcttcccgttcttggcaatatcttgttaccacacaatgagagaaaatgctgaccagaagaatctatccaacataatactgaaaaggttgttggttcttgtgaaacgtgaatacgccgcaacaaaatcaaaatttatgactgatcaaaatgtcgctttacaaggtatgttccagatatttttggaattaggtgtcaccaggcaactccaagctctacaagtggcctgccagaaacatgaattggcgaatatattagagtctgatatcactttatag

SEQ ID NO: 81394 - DNA, 567 bp, Saccharomyces pastorianus
atgaacaatattcgggccttgctggactcgatacaatctggagttcagaccgtttctccagaaaagcaccaacagacgattgccgcgatcaacaaatttcaagatgatcctgcacttctagacaccatactaccgagatgcgtgcctcttttgaccaagtcgttcttttgtatgtcacagcgtgatcagaaacttgttgcggagcttttctacaatcttgacaagatctcccactcaaaagtccttaaatcattagatacaagtatttttagattaaacgaaattttaaactatttacaagatcgagcctcgccctcttctttcagcgatgtcttgtgcgtctatctaaacctttcttggctaagcgtcattctgctttcaccttacgcattcaaagataaattcaacaaaacgcttcaagtatcttccaggttcgagactaccccatttgcatacctccaattaacaagatcaaagccgttttatatttcaaaaacttcacagatgcctttgaccagctaccggaacgggaacaggcaaatgtgccgtttctcaaccaatttttaa

SEQ ID NO: 81395 - DNA, 1821 bp, Saccharomyces pastorianus
atgaaagatgttgaaagatataattctgacgactttgacaccgaattcagggagcctgatatgcctacattcgttccatctagttccttaaaatcctggttaatggacgacaaagtgagagatcagtttgtattacaagatgacgtgaagactagtgtgttctggaactctatgttcaatgaagaagattctttggtggaatctagagagaactggtctaccaattatgttagattctccccaaagggtacctatttgttttcttaccatcaacagggtgtaactgcatggggtggtccaaacttcgatcgtttgagaagattctatcatccagatgtaagaaactcttccgtctctccgaatgaaaagtacctggtcactttctccacggaaccaatcattgtagaagaagataacgaattctctccatttaccaagaaaaatgagggtcatcaattatgcatctgggacattgcttctggtctgttgatggcaactttcccagtgataaagagcccatatctgaaatggcctttagttagatggtcttataatgataaatattgtgctcgtatggttggagacagtttaatagttcacgatgctactaaaaacttcatgccattagaagctaaggctttgaagccttctggtattagagatttctcatttgctccagaaggtgttaaattacaaccattcagaaacggtgacgagccttctgttttattggcttattggactcctgagactaataattccgcttgtactgctaccattgctgaagttcctcgcggtagagtgctaaaaaccgttaacttagttcaagtctccaacgtaactctgcactggcaaaaccaagctgagttcctgtgcttcaatgtcgaacgtcacacaaagtctggtaagactcaattcagtaatctacaaatttgtaggttgactgaaagagatataccagttgaaaaggttgaattgaaagatagtgtctttgaattcggttgggaaccccacggaaatagatttgttacaatttctgttcatgaagtagctgatatgaattatgctatcccagcaaatacaatcagattttacgctccagaaactaaagaaaagactgccaaggacgtaattaaaagatggagcttggtcaaagaaattccaaaaacttttgccaacactgtttcttggtctccagcgggtagatttgtggttgtaggtgctttagtgggtccaaacatgcgtagatcagacctacaattttacgatatggactatccaggtgaaaagaatattaatgacaataatgatgtttcagcttctttgaaagatgttgctcatcctacctactctgcggctactaatatcacttgggatccatctggtagatacgttaccgcatggtcaagttctttgaaacacaaggtggagcatggttacaaaattttcaatattgctggtaacttagttaaagaagacatcattgctggcttcaagaactttgcctggagaccaaggccagcttccattttgtctaacgccgaaaggaaaaaggttaggaaaaacttgagggaatggtctgcccaattcgaagagcaagatgcaatggaagctgacaccgccatgagagatttgattctacaccaacgtgaattattgaagcaatggaccgaatatagagaaaaaattggccaagaaatggaaaaatctatgaatttcaaaatctttgacgttcaaccagaagatgccagcgatgactttaccaccatcgaagagatagttgaagaagttttggaagaaacaaaggaaaaggtcgaataa

SEQ ID NO: 81396 - DNA, 453 bp, Saccharomyces pastorianus
atgaaaaattttcttccacgcacattgaaaaatatttacgaattatatttcaataacatctcagtacatagtatagtatctcgcaacacacagctcaaaaggtcaaagataattcaaatgactaccgagactttcgaagacattaagctagaggacatccctgttgacgacattgatttttccgacctggaagaacaatacaaggtcactgaagaattcaatttcgatcagtacatcgtcgttaatggtgccccagtcatcccatccgccaaagttcctgttttgaaaaaggctttgacttctttgttttccaaagctggtaaagttgttaacatggaatttccaattgatgaagccactggtaagacgaaaggttttctcttcgtggaatgtggctcaatgaacgatgctaaaaaaattatcaagagttccacggtaaaagactggatttaa

SEQ ID NO: 81397 - DNA, 84 bp, Saccharomyces pastorianus
atgtccagtgatgatgaaaatgctccagtggctacgaatgcaaacgctaccactgaccaagagggtgatattcacctagaatag

SEQ ID NO: 81398 - DNA, 1575 bp, Saccharomyces pastorianus
atggcaactctggagtcaagcctgaagggtagactattggtctcacccctttcaatgattgatcttttcattgacgttcgggatcccaattgtgtagaaatctataaaaaaagggttaagaaggatctaacaggttccgaatcggatgagcaactgctcgaaatccatgagatttttttccatagggctcaattagcattattcttgtctgatttgaataatataaccatttcatacagtggttcggttccaatggatacactagaaactttacgcgttaaagccaatgaacttttaaaaaacaaatttcagctaagaagtgtggatattaacatctacgacgaagagaagacatttcaaaaactaacgttcaattcaattttgaattctataagtttatcgggccaaatcttgggtaaattaatgatgttaagggcctcaatagcgctgatgttatattttgaaacacttgcaatggagagaagcgaatgcttatccttcttctataagtatttttttcaatgttgtgccgacaccatttccctaatcagattttttttcctgtatttcaatggcagttacgagaaagttctttcttctttagtttgtttcatcactacaaaagttattcaattggctgttcctaccacgatgtttacccttttggtcatcatcatgcgggtagagctggccaaaaatatgcttctggtcaaatgtaacgaatgcaatgccagaggtgacattagtgacctcccagaaataaaggagaaaataaagtcattggacactatcaaggagaacttcgagaggcttttgttggaagtatatttaattgcgtcccaaaacctgagatttaaatatttctacattttcaagatgttgaccttgtttgacgtattcattcaaaggctgaggaaaggtcaattattttctggtttgtttgtcaaagtagacaaagacttgactaccaaaaaaattgccacaatgttggagttgacacttggaattaacttggacaagtctgaccatttaattgatagactaaaggacaaaaatctcactgttaactttacccttgatcaattccaccaaatcatcaaagaatttgacagaataaaaaacatcggtgttgctgacccacaaaattctctgaatccatcaaaaccaaacatgaaagataatacacccacaattgaacttttactcaactccagcgtggaaaatgagagcgtaccaccgtacagcagctcaaatgaccctacaaatgttggtaatggctccacttatagcttagcacacaatattagtaaccaaaataatgaggaaaacatgcctccgtcaattggttcgagtgaaagtaaccgtgccgctcctaatctaaactttatgccgataaacaataactacaataacagtggttcgaacattaataacaatgacaatgttaagttaccgagtaattttaaaaactactatgaccctcccatgtcttctttggacatatccatggatgttcccgatatttttggtagccttgatttcttcgattatgacctacttttccagaacgactag

SEQ ID NO: 81399 - DNA, 1257 bp, Saccharomyces pastorianus
atgtactttacagacgaatcatcaccggcaatgaatagagtaggtaaaaaaaggaatagactttcttttgtttgccaagcttgcagaaaagcaaagacgaagtgtgaccaggaaaaacctagatgtggcagatgtactaaacaaaacctcttttgtatatatgatgtcgccagacaggcggcccctaggaatccgaataaggatgccaccatagcgagactgaaaaaggagattcgttactggagaaataaaaccgtggatttgattcaagaaaagaaagacttctacactgcattgaaaaggccgactgaagaattagctgctagaaggacatgtaaaagcttgcaggaaaatagctttccaataagtctttataagactcatcccagattgattatgaccaaagtgatgaaaagagaaatcaaccctttatctgagaagtacttaatatttcaagatacctttctgaagacattaattgcctccgtgcttctaagttcttccagaaactccatgattcctgctttaaatgcagatattagtaggtcgaggacacagccatgcgtaaagaataacgttgtaaaaatgagagaggttctattgaaaaactcaaaatacgaatcacaaagaaaatccattaacgagtttacggacaggctactacagagaaagaaccctgaagaacagattgcggtaaataaagtaatttctttattatacagtaacagggaatcgtcatatttagaggatacatgccccaccgaaaacgactattctgatttgttgaaaggctacatcaatgaaatcgagaaaacgctccctcccaaggcaatcattgaacagtacctctctcatttctttgagcatattttccacctaatcccttttgccagcaaggaaatgttggaggaatcaattcacacaacagtacagtataatgaattaggagaggtacgactatcgatgggcacaacccttatacgaaataaaatggagaatctgtgtatcttactgttaattttgaggatcgcgtatatctctttgacatttatagaagataagattgaagattacagtccgtatattaccaaagagatgctagagcaatatccgattcaaagcgaagtaattttcctagcgcagcagatacttgcatcggaaaattggtgtgcttgtgcaaatgaaaataccatttcatgcttactctatatctggtgtgcatttgttttttccccaactgagggtgatttctgttag

SEQ ID NO: 81400 - DNA, 951 bp, Saccharomyces pastorianus
atgataatattggcgtttattatcttcaaaacgtttttgaaagtacttcagaagtttaagattaaaacgattagatatttacacttccacacacattggagtgtacttttacaagggacactatatcgagcggtgttcataatttattccgagatatctcttttagcactttgggagttcactcaaacagactcagcagctaccttagtggaggcaatcgttgttttcattttgattacagtcttgttatcatccgcaagcgtaagaatatggaggaagatgatcaagtctaagaaaatatttggccagccaagctatttactcttcagtagctcgaaattcttaaacaagttcggctttctttactctcaatttaagtctacaaaagtctggtggttaatggcgacctctgcacacatgcttattaggtctatactagtgggttctctacaagcgcacggaaaatctcaatctattggtatctttttgaatgaagctatctatctcatccttttgtgctggatgcaaccttacatggataaaacaaccaacttcttcaatattagtatccattcactgaatttagtgaacgcattttttttcttatttttcagtaacttatttcagcagcccatagctgtgtcttcttttatgggactaattttctttttactaaatgcagcgttttctttgtatctcttcattttcatattgatatgctttacgatggcaatatactacaaacaccctgatacaagatacaaacctattgatgatcaaagacgatcctttttgaagggtgaaatggatgatgatgcggtttacgaatcggtcccggaactgcacgaaatgaagaaagccgttcttgaatgcaacagtattcaaaagccgcagatcaataagattgacctttgtaaacaaaattcgaactgtgaatatctgtatatgtga

SEQ ID NO: 81401 - DNA, 498 bp, Saccharomyces pastorianus
atgagacagatgtacagatatggcgctaacgttggatttattgacttcaccccctggataagcgaatttgacatgaatgataacaaagaaaatttttggccacttattgagcactaccatgaagtaatttcggaagctttaagaaataaaaagcatctccatggcttagggttcaatatacaaggcttcgttcaaaaatatgtgaacattgacaaggtaatgtgcgatcgtgccatcgggaaaagacgcggaggtacattgttaagcaatgtaggtctgtttaatcagttagaggagcccgatgccaaatattctatatgcgatttggcatttggccaatttcaaggatcctggcaccaagcattttccttgggtgtttgttcgactaatgtaaaggggatgaatattgttgttgcttcaacaaagaatgttgttggtagtcaagaatctctcgaagagctttgctccatttacaaagctctccttttaggcccttag

SEQ ID NO: 81402 - DNA, 1011 bp, Saccharomyces pastorianus
atgaatgaaatcgatgagaaaaatcaggcccccgtgcaacaagaatgcctgaaagagatgattcagaatgggcatgctcggcgtatgggatctgttgaagatctgtatgttgctctcaacagacaaaacttatatcgaaacttctgcacatatggagaattgagtgattactgtactagggatcagctcacattagctttgagggaaatctgcctgaaaaatccaactcttttacatattgttctaccaacaagatggccaaatcatgaaaattattatcgcagttccgaatactattcacggccacatccagtgcatgattatatctcagtattacaagaattgaaactgagtggtgtggttctcaatgaacaacctgagtacagtgcagtaatgaagcaaatattagaagaattcaaaaatagtaagggttcctatactgcaaaaatttttaaacttactaccactttgactattccttactttggaccaacaggaccgagttggcggctaatttgtcttccagaagagcacacagaaaagtggagaaaatttatctttgtatctaatcattgcatgtctgatggtcggtcttcgatccacttttttcatgatttaagagacgaattaaataatattaaaactccaccaaaaaaattagattacattttcaagtacgaggaggattaccaattattgaggaaacttccagaaccgatcgaaaaggtgatagactttagaccaccgtacttgtttattccgaagtcacttctttcgggtttcatctacaatcatttgagattttcttcaaaaggtgtctgtatgagaatggatgatgtggaaaaacccgatgatgttgtcaccgagatcatcaatatttcaccaacagaatttcagcgattaaagctaatattagatcaaatatccaaggtaagtgtactatcactccgtttttacatgtttgttggtttgtatctcttcataaatggggtaaatttttcaaaccattga

SEQ ID NO: 81403 - DNA, 339 bp, Saccharomyces pastorianus
atggaagaaatcgcacaagttattaaggacttgggcgacaaaataaatcctaacttctcgttcttaggaatcaactgcgtcagcttcaaccaatcacccgacattcttgagtctctacatcaagcactaccaaatatggccttgcttgcttatccaaacagtggtgaagtttatgatactgaaaagaagatatggttgccaaatagcaataagctgaacagttgggatacggttgttaaacagtacattagcagcggtgcccgtatcattggtggttgttgcagaacaagtccaaaagacatccaagagatttctgcagccgtcaagaaatacacgtaa

SEQ ID NO: 81404 - DNA, 240 bp, Saccharomyces pastorianus
atggagggcgcatgcggcggttcttgtgcctgctccacctgtcacgtcatcgttgatccagactactacgatgccctgccggaacctgaagatgatgaaaacgatatgctcgatcttgcttacgggctaacagagacaagcaggcttgggtgccagattaagatgtcaaaagatatcgatgggattagagtcgctctgccccagatgacaagaaacgttaataacaacgattttagttaa

SEQ ID NO: 81405 - DNA, 135 bp, Saccharomyces pastorianus
atgctcgatcttgcttacgggctaacagagacaagcaggctggggtgccagattaagatgtctaaagatatcgatgggattagagtcgctctgccccagatgacaagaaacgttaataacaacgattttagttaa

SEQ ID NO: 81406 - DNA, 246 bp, Saccharomyces pastorianus
atgactccagccccaaagatctcctacaagaagggtgctgcctccaacagaaccaagttcgtcagatctttggttagagaaatcgccggtttgtccccatatgaaagaagattgatcgatttgatcagaaactccggtgaaaagagagccagaaaggtcgccaagaagagattgggttctttcaccagagccaaggctaaggtcgaagaaatgaacaacatcattgctgcctctcgtcgtcattaa

SEQ ID NO: 81407 - DNA, 1584 bp, Saccharomyces pastorianus
atggccatatcattgggcttgaatagggacctcccctcgtccttcaatgatagcagcattctggaacaaagacgccgaatttggtggtctgtctactcttgggagatccaattgtccctgctttatggtcgatccattcagctttctcagaatacaatctccttcccttcttctgtcgacgatgtgcagcgtaccacaacaggtcccaccatataccatggcatcattgaaacagcaaggctcttacaagttttcacaaaaatctatgaactagacaaaacagttaccacagaaaaaagtcccatatgtgcaaaaaaatgcttgatgatttgtaatgagattgaggaggtttcgagacaggcaccaaagtttttacaaatggatatctccaccaccgctctaactaatttgttgaaggaacacccttggctatccttcacaagattcgaactgaagtggagacagttgtctcttatcatttatgtattaagagattttttcactaattttacccagaaaaagtcacaactagaacaggatcaaaatgatcatcaaagttatgaagttaaacgatgctccatcatgttaagcgatgcagcacaaagaactgttatgtctgtaagtagctatatggacaatcataatgtcaccccatattttgcctggaattgttcttattacttgttcaatgcagtcctagtacccataaagactctactctcaaactcaaaatcgaatgctgagaataacgagaccgcacaattattacaacaaattaacactgttctgatgctattaaaaaaactggccacttttaaaatccagacttgtgaaaaatacattcaagtactggaagaggtatgtgcgccgtttctgttatcacagtgtgcaatcccattaccgcatatcagttataacaatagtaatggtagcgccattaaaaatattgtcggttctgcaactatcgcccaataccctactcttccggaggaaaatgtcaacaatatcagtgttaaatatgtttctcctggctcagtagggccttcacctgtgccattgaaatcaggagcaagtttcagtgatctagtcaagctgttatctaaccgtccaccctctcgtaactctccagtgacaataccaagaagcacaccttcgcatcgctcagtcacgccttttctagggcaacagcaacagctgcaatcattagtgccactgaccccgtctgctttgtttggtggcgccaattttaatcaaagtgggaatattgctgatagctcattgtccttcactttcactaacaatagcaacggtccgaacctcataacaactccaacaaattctcaagcgctttcacaaccaattgcctcctctaacgttcatggtaacttcatgaataatgaaatcacggctagtaaaattgatgatggtaataattcaaaaccactgtcacctggttggacggaccaaactgcgtataacgcgtttggaatcactacagggatgtttaataccactacaatggatgatgtatataactatctattcgatgatgaagataccccaccaaacccaaaaaaagagtaa

SEQ ID NO: 81408 - DNA, 366 bp, Saccharomyces pastorianus
atggaaagaatcatgaaggctcaagccttgagagactcttccatgtcctcctacatgtcttccaagaagactttcgaaatttctccaaaatctccaattattaaggaattgaaaaagagagttgatgagggtggtgcacaagataagaccgtcaaagatttgactaacttattattcgagaccgctttgttgacttctggtttcagtttggaagaaccaacttcttttgcatcaagaataaatagattgatttctttaggtttgaacattgatgaggatgaagaaacagaaaccgctccagaagcttctaccgaagctccagttgaagaggttccagctgacaccgagatggaagaagttgattaa

SEQ ID NO: 81409 - DNA, 1011 bp, Saccharomyces pastorianus
atgttacaacaaaataagattatgaaggttattagaaagaatattgtcaagaaattgattgaagccttcaacgaaatcgctgaagactccgagcaatttgacaaattttactctgccttcgctaagaacattaagctgggtgtacatgaggacactcaaaacagagctgctttagctaagttgctacgttacaattctactaaatctgtcgatgaattgacttccttgactgattacgttactagaatgccagaacaccaaaagaacatctattacatcaccggtgaatctctaaaggcagtcgaaaagtctccattcttggacgccttgaaggctaagaactttgaagttttgttcttgaccgacccaattgatgaatacgctttcactcaattgaaggaattcgagggtaaaactttggttgacattactaaagatttcgaattggaagaaacagacgaagaaaaagctgaaagagagaaggagatcaaagaatacgaaccattgaccaaggccttgaaggatatcttgggtgaccaagtggagaaggttgttgtttcttacaaattgctagatgctccagctgccatcagaactggtcaattcggctggtctgctaacatggaaagaatcatgaaggctcaagccttgagagactcttccatgtcctcctacatgtcttccaagaagactttcgaaatttctccaaaatctccaattattaaggaattgaaaaagagagttgatgagggtggtgcacaagataagaccgtcaaggatttgactaacttattattcgagaccgctttgttgacttctggtttcagtttggaagaaccaacttcttttgcatcaagaattaacagattgatctctttgggtttgaacattgatgaggatgaagaaacagagactgctccagaagcatccaccgcagctccggttgaagaggtcccagttgacaccgaaatggaagaggtagatacggtagaacatcatgggcttgaatag

SEQ ID NO: 81410 - DNA, 720 bp, Saccharomyces pastorianus
atggctagtgaaacttttgaatttcaagctgaaatcactcagttgatgagtttgatcatcaacactgtctattctaacaaggaaattttcttgagagaactgatctctaacgcctccgatgctttagacaaaattagataccaagctttgtctgatccaaagcaattggaaactgaaccagatttgttcattagaatcaccccaaaaccagaagaaaaagttttggaaatcagagattctggtattggtatgaccaaggctgaattgattaacaatttgggtaccattgctaagtctggtactaaagctttcatggaagctctatctgctggtgccgatgtatccatgattggtcaattcggtgttggtttttactctttattcttagtcgccgacagagttcaagttatttccaagaacaatgaggacgaacaatatatttgggaatctaatgccggtggttctttcaccgttactttggacgaagttaacgaaagaattggtagaggtaccgtcttgagattattcttgaaagatgaccaattggagtacttggaagaaaagagaattaaagaagtcatcaagagacattctgaattcgttgcttaccctatccaacttctagtcaccaaggaagttgaaaaggaagttccaattccagaagaagaaaagaaagacgaggaaaagaaggatgaggaaaagaaggatgaagatgactag

SEQ ID NO: 81411 - DNA, 150 bp, Saccharomyces pastorianus
atgatgtcgaacctgaagatgatgaagacacacaaactgagggcagaattcggtccaatcacaaagggtacagaaattgaacaagtcgccaaggaagccaccgaggctttaagagaagaaaccgagaaactgaatataaataaagactaa

SEQ ID NO: 81412 - DNA, 528 bp, Saccharomyces pastorianus
atgggcctacacagtgaaccgttagatcaagaggaccaagacaccataatactcgatgcaagagctggcgatttggattctctgaaagatatatttaccactttagtcagtcccaagttactttcgacttgtaaggaaagtgaatctgattctacggctttacatatggctgctgccaacggtcatatagagaccgttcggtatatactggagacggtttctcgcgcaaatagtgccgaagacttgaaagcttttgttaatgaggtgaacaaaacaggcaacacggctttacattgggcgtcgttgaatggcaaattagacgtggtcaagctactgtgtgatgagtatgaggcagacccctttattagaaacaaattcggccacgatgctatctttgaggccgagaacagcgggaaggaagaagtggaaacgtactttttgaagaagtatgatgtcgaacctgaagatgatgaagacacacaaactgagggcagaattcggtccaatcacaaagggtacagaaattga

SEQ ID NO: 81413 - DNA, 435 bp, Saccharomyces pastorianus
atggctgcagcaaacggccatgttgagacagtccagtacatacttgagacggtttctcgcgagaacagtgctgaagagttgaaagccttcatcaatgaggtaaacgaaacaggcaacaccgcacttcattgggcctcgttgaacggcaaactggacgtggtcagattactatgtgacgaatatgaggccgaccccttcatcagaaataagtttggccacgatgccatctttgaagccgagaacagcgggaaggaagacgtagagacgtacttcttgaagaaatacgatgttgagcccgaggatgatgaagatacacagtgtgagggacaagctggcgttcaaatcacaaagggtacagaaattgaacaagccaccaaggaggccactgatgctttaagagaggaaactgaaaagttaaatataaataaggattaa

SEQ ID NO: 81414 - DNA, 2070 bp, Saccharomyces pastorianus
atggatctcggagatatcatttctcaggtggacccaatcacattattcgttttggtctctgttgtggaagcatttattgcatctggtatcaccgacccatacgaaatgtacaaatacgtacatgtttctgaggttggtaactgttctggttctggtatgggtggtgtttctgccttacgtggtatgtttaaggatcgtttcaaggatgagcctgtccaaaatgatattttacaagaatcatttatcaacaccatgtccgcttgggttaatatgttgttgatttcctcatctggtccaatcaagacacctgttggtgcctgtgccacatccgtggaatctgttgacattggtgtagaaaccatcttgtctggtaaggctagaatctgtattgtcggtggttacgatgatttccaagaagaaggctcctttgagttcggtaacatgaaggccacttccaacactttggaagaatttgaacatggtcgtaccccagcggaaatgtccagacctgccaccactacccgtaacggttttatggaagctcaaggtgctggtattcaaatcatcatgcaagctgatttagctttgaagatgggtgtgccaatttacggtattgttgccatggctgctaccgccaccgataagattggtagatctgtgccagctccaggtaagggtattttaaccactgctcgtgaacaccactccagtgttaagtatgcttcaccaaacttgaacatgaagtacagaaagcgccaattggttactcgtgaagctcagattaaagattgggtagaaaacgaattggaagctttgaagttggaggccgaagaaattccaagcgaagaccaaaacgagttcttacttgaacgtaccagagaaatccacaacgaagctgaaagtcaattgagagctgcacaacaacaatggggtaacgacttctacaagagggacccacgtattgctccattgagaggagcactggctacttacggtttaactattgatgacttgggtgtcgcttcattccacggtacatccacaaaggctaatgacaagaacgaatctgccacaattaatgaaatgatgaagcatttgggtagatctgaaggtaatcccgtcattggtgttttccaaaagttcttgactggtcatccaaagggtgctgctggtgcatggatgatgaatggtgctttgcaaattctaaacagtggtattattccaggtaaccgtaacgctgataacgtggataagatcttggagcaatttgaatacgtcttgtacccatccaagactttaaagaccgacggtgtcagagccgtgtccatcacttctttcggttttggtcaaaagggtggtcaagctattgtggttcatccagactacttatacggtgctatcactgaagacagatacaacgagtatgtcgccaaggttagtgccagagagaaaagtgcctacaaattcttccataatggtatgatctacaacaagttgttcgtaagtaaagagcatgctccatacactgatgaattggaagaggatgtttacttggacccattagcccgtgtatctaaggataagaaatcaggctccttgactttcaactctaaaaacatccaaagcaaggacagttacatcaatgctaacaccattgaaactgccaagatgattgaaaacatgaccaaggagaaagtctctaacggtggcgtcggtgtagatgttgaattaatcactagcatcaacgttgaaaatgatacttttttcgagcgcaatttcaccccgcaagaaatagagtactgcagcgcgcagcctagtgtgcaaagctctttcgctgggacatggtccgccaaagaggctgttttcaagtccttaggcgtcaagtccttaggcggtggtgctgcattgaaagacatcgaaatcgtacgcgttaacaaaaacgctccagccgttgaactgcacggtaacgccaaaaaggctgccgaagaagctggtgttaccgatgtgaaggtatctatttctcacgatgacctccaagctgtcgcggtcgccgtttctactaagaaatag

SEQ ID NO: 81415 - DNA, 1500 bp, Saccharomyces pastorianus
atgaagccggaagttgagcaagaattagctcatattttgctaactgaattgttagcttatcaatttgcctctcctgtgagatggattgaaactcaagatgtttttttgaaggattttaacactgaaagggttgttgaaatcggtccttctccaactttggctgggatgactcaaagaaccttgaagaataaatacgaatcttacgatgctgctctgtctttacatagagaaatcttatgctattcgaaggatgccaaagagatttattatactccagatccatccgaattagctgcaaaggaagagcccgctaaagaagaagctcctgctccaactccagctgctagtgctcctgctcctgcagcagcagccccagctcccgtcgcggcagcagccccagctgcagcagctgctgagattgccgatgaacctgtcaaggcttccctattgttacacgttttggttgctcacaagttgaagaagtcgttagattccattccaatgtccaagacaatcaaagacttggtcggtggtaaatctacagtccaaaatgaaattttgggtgatttaggtaaagaatttggtactactcctgaaaaaccagaagaaactccattagaagaattggcagaaactttccaagataccttctctggagcattgggtaagcaatcttcctcgttattatcaagattaatctcatctaagatgcctggtgggtttactattactgtcgctagaaaatacttacaaactcgctggggactaccatctggtagacaagatggtgtccttttggtagctttatctaacgagcctgctgctcgtctaggttctgaagctgatgccaaggctttcttggactccatggctcaaaaatacgcttccattgttggtgttgacttatcatcagctgctagcgctagtggtgctgccggtgcaggtgctgctgccggtgcagctatgatcgatgctggcgctctggaagaaataaccaaagaccacaaggttttggcgcgtcaacaactgcaagtattggctcgttatctaaaaatggacttggataacggtgaaagaaagttcttgaaagaaaaggacactgttgctgaacttcaagctcagttggattacttgaatgccgaattaggtgaattctttgttaacggtgttgctacttctttctctagaaaaaaggccagaaccttcgattcttcctggaactgggctaaacaatctttattatcattatactttgagataattcatggtgtcttgaaaaacgttgatagagaggttgttagcgaagctatcaatatcatgaacagatccaacgatgctttgattcaattcatggaataccatatctctaacactgatgatactaaaggtgtaaactatcaattggtcaaaactcttggtgatcatttgattgaaaactgtaaacaagttttggatgttgatccagtttacaaagatgttgctaagcctaccggtccataa

SEQ ID NO: 81416 - DNA, 1224 bp, Saccharomyces pastorianus
atggcccttggtggtccaataaccaaagaatctcaacctactattgaagaggatttgactcgtgtttacaaggcgatcagtgctcaagctgataaacaagatatttccaactccaccagggttgaatttgaaaaactatatagtgatttgatgaagttcttggaaagctccaaagaaatcgatccttctcaaacaacccaattggccggtatggatgttgaggatgctttggacaaagattccaccaaagaagttgcttctttgccaaacaaatctaccatttctaagacggtatcttcaactattccaagagaaactattccgttcttacatttgagaaagaagactcctgccggagattggaaatatgaccgccaattgtcttctcttttcttagatggtttagaaaaggctgccttcaatggtgtcaccttcaaggacaaatacgtcttgatcactggtgctggtaagggttctattggtgctgaagtcttgcaaggtttgttacaaggtggtgctaaggttgttgttaccacctctcgtttctctaagcaagttacagactactaccaatcaatttacgccaaatatggtgctaagggttctactttgattgttgttccgttcaaccaaggttctaagcaagacgttgaagctttgattgaatttatctacgacactgaaaagaacggtggtttaggttgggatctggatgctattattccattcgcggccattccagaacaaggtattgaattagaacatattgattctaagtctgaatttgctcatagaatcatgttgaccaatatcttaagaatgatgggttgtgtcaagaagcaaaaatctgcaagaggtattgaaacaagaccagctcaagtcattctaccaatgtctccaaaccatggtactttcggtggtgatggtatgtattcagaatccaagttgtctttggaaactttgttcaacagatggcactctgaatcctgggccaatcaattaaccgtttgcggtgctcttattggttggactagaggtactggtttaatgagcgctaataacatcattgctgaaggcattgaaaagatgggtgttcgtactttctctcaaaaggaaatggctttcaacttattgggtctattgactccagaagtcgtagagttgtgccaaaaatcacctgttatggctgacttgaatggtggttgcaatttgttcctgaattga

SEQ ID NO: 81417 - DNA, 156 bp, Saccharomyces pastorianus
atggaagcttttggtgaattttcgttggaaggttgcgttgaaatggcttggattatgggcttcatttcataccataacggtaatttgaagggtcgtccatacactggttgggttgattccaaaacaaaagaaccagttgatgacaaggacgtatag

SEQ ID NO: 81418 - DNA, 1737 bp, Saccharomyces pastorianus
atggtcaattggatggttttcctgacaaggatacatgacgcacctgtttcgtcgaacataaattgcaaggtgaagaaggtgattgagacgtggttgccgtcatgtgctttagatgaagaactgcatctaccttctcgtgaggaaattgcagccgctttaggatctgtcggttttgatgaagagagaagagcacaaaccgttggatctttatctggtggttggaaaatgaagttggaattggcaagagctatgttacaaaaagctgatattttattgctggatgaacctaccaatcatttagatgtttcgaacgttaaatggttagaagaatacttactggaacatactgatattacttcattgattgtttcgcatgactctggtttcttagatacagtctgtactgacatcatccattatgaaaacaagaaattggcttactacaaaggtaacttggcagcatttgttgagcagaaacctgaagctaaatcttactataccttaacagattctaatgctcaaatgcgtttcccacccccaggtattttaacaggtgttaagtctaacactagagccgtcgctaaaatgactgatgtaactttctcttatccaggtgcccaaaagccttccttaagccatgtctcctgttcattgtctctgtcttctcgtgtggcttgtttaggtcctaacggtgctggtaaatccactttgatcaagctattaactggtgaattggttccaaatgaaggtaaagtggaaaaacatccaaatttacgtattggttatattgctcagcatgcattgcaacacgtcaatgaacataaggaaaagacggcaaaccaatatttgcaatggcgttatcaattcggtgacgaccgtgaagtcttattgaaggaatccagaaaaatatccgaagatgaaaaggaaatgatgacaaaggaaatcgacattgatgacggtagaggtaagagagccattgaagctattgtaggtagacaaaagttgaaaaaatctttccaatatgaggtcaaatggaaatactggaaaccaaaatacaactcctgggttccaaaagatgttttggtcgagcatggctttgaaaaattggttcaaaaattcgacgatcacgaagcctccagagaagggttgggttaccgtgaattaattccttcagttatcaccaaacattttgaagacgttggtcttgattctgaaattgctaaccatactccattaggttctttatctggtggtcaattagttaaagtcgttattgccggtgctatgtggaacaaccctcatttacttgttttggatgaacctaccaactatttggacagagactctcttggtgctttggccgttgctattcgtgactggagtggtggtgtcgttatgatttcgcataataacgaatttgttggtgctttatgtcctgaacaatggattgtggagaacggtaaaatggttcaaaagggctctgcacaagttgaccaatccaaattcgaagatggtggtaatgctgatgccgttggtctaaaggcctccaacttggccaagccatctgtagatgacgatgattctccagctaacatcaaggtcaagcaaagaaagaagagattgacaagaaatgaaaagaagctgcaagccgaacgtcgtcgtctacgttacattgagtggttgtcatcgccaaaaggtacaccaaaaccagttgatactgacgatgaagaagattga

SEQ ID NO: 81419 - DNA, 888 bp, Saccharomyces pastorianus
atgcctccaaagaagtttaaggatctaaactctttccttgacgaccaaccaaaggacccaaatctagtcgcttctcccttcggtggttattttaaaaaccctgctgctgatgccggtagtaataacgcttccaaaaaaagtagctaccaacaacagcgtaattggaaacaggggggcaactaccaacaaggtggttaccaatcgtataacagtaattacaacaattacaacaactacaacaactacaacaattataacaactacaataactataataaatacaatggccagggctatcaaaaatctacttacaaacaatcggctgtgacgcccaaccaaagtggaactccaactccatctgcttctactacatctttgacctctttgaatgaaaagctgtcgaacttagagttaacacccatctctcaattcttgtcaaagatacctgaatgtcaaagtatcactgattgcaaaaatcaaatcaaactaatcattgaagaatttggcaaagaaggtaacagtacgggtgagaaaattgaagagtggacaatcgtcgatgttctatctaaattcatcaaacctaagaatccatcattagttagagaatctgccatgctaataatttccaacattgctcaatttttcagtggaaagccaccacaggaagcatacttgctaccattcttcaatgttgcacttgactgtatttcagataaagagaatacagtcaaacgtgccgcgcaacatgccattgattctttgttgaattgctttccaatggaggctttaacctgttttgtactgcctacgattttggattacttatcatctggtgccaaatggcaagctaaaatggccgctctaagcgttgtagatagaataagataa

SEQ ID NO: 81420 - DNA, 390 bp, Saccharomyces pastorianus
atgaatgacgaaactgttatcaagtatatgagcaagattttgaccgtggattctaatgtgaacgactggaaaagacttgaagattttttgaccgccgtttttggtggttcagattcacaaagagaatttgtcaaacaagactttatccataacttgagagctttattctaccaagaaaaggaaagggcagatgaggacgaaggtattgagattgtcaacactgatttctccttagcttatggttcaagaatgcttttgaacaaaacaaatcttcgtctcctaaagggtcatcgttacggtttgtgtggtagaaatggtgctggtaagtctactttaatgagagcaattgctaatggtcaattggatggttttcctgacaaggatacatga

SEQ ID NO: 81421 - DNA, 141 bp, Saccharomyces pastorianus
atggaaccaagcatactggaagacgctgctagttccacccaaatgcatgctatgccagcccgagatttgagcttgagcagtgttgcaaacgcccaagatgttactaaaaaagcaaacatcctggatcctgattatttgtaa

SEQ ID NO: 81422 - DNA, 1701 bp, Saccharomyces pastorianus
atgattccgggaattgcctaccaagtgcccgatattgatgcgtacgtaagattgaacatttataacaacgtaagtgaaaatttggcttgtatccaggttttcttttccaatgggaaaactgtatcacaaattggggttaaatgggtgacagctgttatcgccggtattggtttattaacttccgctgtcttgtccaccttcgggaactccacagcagcatcccacatttctgcaaacaccatgtcactgttcttatatttccaatctgtcgctgtggtcgcaatgcaacatgtagacagtgttccacccattgctgctgcctggtctgaaaaccttgcctggtcgatgggcttgatccgtattacatttatgcagaaaatcttccgttggtatgtagaggcgactggaggctccgcatctctatatttgaccgcgacaacaatgtcagtgctcactcaacgaggtctagattaccttaaaaatacttcagtttacaagagggcggaaaatgtcttgtacggtaactcaaacactttaatctttcgagggattaaaagaatgggataccgtatgaagattgaaaatacggccatcgtttgtactgggttcacattctttgtgctgtgcggttatttcttggccgggtttatcatggcctgcaaatacagtatcgagttatgtataagatgtggttggatgcggagtgataggttttaccaatttaggaaaaactggaggtcagttctgaaaggatcgttgttaagatacatctatattgggttcacgcaactgacaattttaagtttttgggagttcactgaacgggattccgccggtgttattgttattgcatgcctattcattgtattgtcatgcgggttgatggcgtgggctgcgtacagaaccatttttttcgcaagtaaatctgtggaaatgtacaataacccagctgctttattgtatggtgatgagtacgtcttaaacaagtacgggtttttctacaccatgttcaacgcaaaacattattggtggaatgctcttttaacgacgtatattcttgtaaaagctttatttgtcggattcgcacaggcatcaggtaaaacgcaagcattggctattttcattattgacttggcgtattttgttgccatcatccgttataaaccatatttggaccgtccaacgaatattgtcaacatttttatttgcactgtcaccttggtcaactctttccttttcatgtttttctcaaacttgtttaaccaaaagtatgctgtctctgccatcatgggctgggtgtttttcattatgaatgctgcgttttctttgcttctactgttgatgattctggcctttaccacaatcattctgttttctaagaatcctgactccaggttcaagccagcaaaggatgacagagcatctttccaaaagcatgctattcctcatgaaggtgccttgaataagtcagtggccaacgaattaatggccctaggtaatgtggcaaaggatcataccgaaaattgggaatacgaactgaagagtcaagaaggtaaaagtgaagataatcttttcggagttgaatacgatgacgagaaaacaggaactaattcagagaatgctgaaagtagcagtaaggaaaccacccgtccaaccttttctgaaaggttttacgttcattatcaatcaaaaggaataaga

SEQ ID NO: 81423 - DNA, 450 bp, Saccharomyces pastorianus
atgttaaagaacgatagattggcaaccttacaaccaacatggcatccaacttctgaagaactggctattggtaacattaagtttacaactttcgatttgggtggtcatattcaagctcgtcgtttatggaaggattatttcccagaagttaatggtatcgtctttttagtcgatgctgctgaccctgaaagatttgatgaagcacgtgtcgaattagatgctttattcaacattgccgaattgaaggacgttccttttgtaattcttggtaacaagatcgatgctccaaacgccgtttctgaagcggagctacgttctgctttaggattattgaataccactggctctcaaagaattgaaggtcaaagaccagttgaagttttcatgtgttccgttgttatgagaaatggttatttagaggcgttccaatggttatctcaatatatttaa

SEQ ID NO: 81424 - DNA, 120 bp, Saccharomyces pastorianus
atggaggaagaaaaatcacaaagggataaggagaaaaagaaagaatacttcgcccagaatggtaaaagaacaactatggacggtgacgatgaatctcgtccacgtaagatgaggaggtaa

SEQ ID NO: 81425 - DNA, 861 bp, Saccharomyces pastorianus
  modified_base (760)..(760): a, c, g, t, unknown, or other
  modified_base (767)..(767): a, c, g, t, unknown, or other
atgctaaagtatacaccagaacacacatattgtaatgcggctttctacggtcccttatgttctccaaacacacctttttgtggtgttcaaattgttgctaatagtgataccgggaacggttttagaattgcagcaacaggtatcgttgaagagatagacgttaatattgaaattgttaaaaagttaaaattagttgggtttccatataaaattttcaaaaatactgcctttataaaggacatgttttcaagtgctatggaagttgcaaggtttgagggtgcgcagatcaaaactgtctcgggtatccgtggtgaaatcaaaagggcactttcaaagcctgagggtcactatagggcagcctttgaggataaaatcctaatgagtgatattgtaattctaagatcatggtatcctgtccgcgtcaagaaattctataatcctgttacctcactattgttgaaggaaaaaaccgagtggaaaggtttaagattgacaggccaaataagagcggctatgaacctggaaacaccgtcgaatccggacagtgcatatcataaaatagaacgtgtagaaagacacttcaatggtctaaaggtcccaaaagctgttcaaaaggaattgccattcaaatctcagatccatcaaatgaaaccacaaaagaagaaaacatatatggctaaaagagccgtggtgctaggtggtgatgaaaagaaggcaagatcattcattccaaaaagtattgacgcatttcgcaaagccnaaagcanagccaagcaggcaaggcaaccagcacaggctcagtccacacgtcaatcgacaagcattgcaacacaaattcagcctcaagcatcggcaggcaag

SEQ ID NO: 81426 - DNA, 243 bp, Saccharomyces pastorianus
atggttcatttagagtctgttgtgagatacatttattctcaactatatgttctaagcaggttatcagacagagagtttgccacaggtaaattcaagtttgttcctcctggggtgaaggtcgaaaaactgacaccaaagcaagaggaagagttgaaggccaagaccattgcaaaatatgaagctctagacaaggatcctaaaaccttaccaagcgagagaagtaggctgtcatatacaaactaa

SEQ ID NO: 81427 - DNA, 522 bp, Saccharomyces pastorianus
atgattccagatctatcaagaagagacgatatacatacattactgttgggccgaaacaatatcgttgaagtagacggtcgcctattgcctatgaatgtacagaaccttacattatcgaataacagcataagaaggtttgaagatcttcaaaggttgtgtagagcgcccaggacgttgaagaatctaactttaatagggaatcaagtatgtcatttagccaattatagagaacatgtacttcgattagtaccgcatttagagactttagactttcaaaacgtaacagctgaggaaagaaagagcgcaatgagctttccaaggcaggcggacggcgatacgttgggcccagtaaatactgcaataagagataatggatccagagataaaacgatggagatcatgaatttggtggtgagtaagatgacagtagagagaagaaatgaattgaaaaagcagttagcagaagctacttctttagaagagattgccaggctggaaaaactactctctggtggtgtttaa

SEQ ID NO: 81428 - DNA, 1398 bp, Saccharomyces pastorianus
atggttggttactgtggtactggctaccatggtatgcaatataatccaccaaatccaaccatcgagtctgccctattcaaagcatttgttgaagcaggtgctatttccaaggacaactccaacgatttgaaaaagaatggattcatgagagctgcaagaactgataagggtgtccatgctggaggtaatttaatatcattgaaaatgattattgaagatcctgatatcaagcagaagatcaacgaaaagttaccggaagggataagggtatgggatatcgagcgtgtgaacaaggcgtttgattgtagaaaaatgtgcagttcacgttggtacgaatacttattaccaacttattcactcattggccccaaacctggttctatactttatagagacatcgaagaaagtaaaacagaattacctggtgtattagatgaagacttggaatccaaagaattttgggaagagtttaaaaaagatgcgaatgaaaaattttcaacagaagaaatcgaagctatattagcatatgttccgcccgcaagagatgaatttgatataaatgaagaactataccagaaggtaaaaaagtacaagcaattagaaaatgctcaccgtagaagatatcgtatatccgcggcaaaactggccaaattccgtgcttctacaagtcaataccttggcgctcataacttccataattttacattaggcaaggacttcaaagaaccaagtgccattcgatttatgaaagatataaaagtatctgatccatttgttattggcgatgcccaaacagaatggatttccatcaagattcacggccagtctttcatgctacatcaaattcgtaagatggtatcaatggcaaccttaattacccgttgtggttgccccgtcgaacgcattagtcaggcttacggacagcagaagattaatattccgaaggcacctgcattaggattattgttagaagctccagtatttgaaggttataataaaagactagaacagtttggttacaaggcgatcgatttttccaaatatcaagacgaagtggataagttcaaaatgaagcatatctacgataagatctacaaggaagaggtggacgaaaatgtttttaatgcgttctttagttatattgatagtttcaacaaggttactggagcacagggagaagaaactgccgataaatcgggacctgctgtgcaaaagagtatcttcgaattcttgacagctaagggtatcccaggtcttactgatgcgcccgagagcaataagaagattaagcaaagaaaaagaatggaagaggaggaagctgctagtaaaaaggctgaaatatccagcaccactcagagcaacgaacctgaagtacaaccggaagcggcagctaattag

SEQ ID NO: 81429 - DNA, 1770 bp, Saccharomyces pastorianus
atgctgcaggacaagtatcaaaaggctttacattatttaaaaaaattcaaacatatagatgacaagtacggtcgcaaatttgcgctagaaaaattgtacattttctataaattgaatatgccagatgaattcaacacattgtacacagcaattatcacagatgatctcgatacggtactaaaaaaggatatcgagtcacttagaggtatcctacatgtgagagctcaatattgttataaaaatgggctgtaccaagaagcttttaaaatatatcaacatttagcaagtcacaatgagaaggatcaggatagtcaaattgaactctcttgtaacgaaagggttccgctatccgttgcgacagagttaatgaacagatcacccttagttactcctatggatgaatcttcctacgatttattattcaatgaatcattcatcatggcatccgtaggtaaatatgacaaggctatcgaactattagaaaaagcgcttcaaggagccacgaatgaaggctatcaaaacgatattaatactattaaattgcaattatcatttgttttgcaaatggtggggaaaactgcacaaagtaaagaaatcttaaagggcttattgcaggaactgaaagccgattctccattctctttaatttgtcaaaataacctaaatgcgtttgttgatttctctaaatacaatacaaacttcaatttactgttaagggaattaaacgtagaaaaactaaacacttttaatttacaaaccttcacccatgaacaatggtcaaacattcaacgcaatgtacttttcctgcgtttgttcaacaatgtcaaaattcactctcaagagtcccttttatcaagaacgttcgataaatactctaagttagttgacaatgttactttggaaagctacaagacgcaggccaagaaactttaccaccacactacaaaaaccattttaagtggaacagatggaagtacgattggaatattactactgactatccaattgctaataatagagaaggaatgggaaaatgctatcagaataggagaattatttttaaatgaaagctggaaatcgtcctttgaaaaattcaacgattcacaagccatcgtgtgttacattttatttgaattatacaagattaagggaagaaacaactccaaaagtgttctgcttaaaaaattaggctccgtgagagtccaattgagcggaaaaatccaagaaaacataccattttggaaacacgtcgggtttgaattattgtccatgggtaatgctaaagaatcgaaggctttactcagagagatttcaaactttagtaaaggcgatgcagatgtccttgttgacagagttgtttcgtcagattctttggatatagcacaaggtatagatctagtgagagatattgatattgataaattaattcaacttggtgtgaaacccttagaatcgtcagcaaagagaagtaaaaacaccgcagttagcaaagttcaaaagagaaaagttttagagctaaagaagaaaagaaagattaaacgcctcgaaaaatttttacaaggtcgcgacacctccaaattacctgatcctgaaaggtggctgccattaagagacaggtctacttataggccaaagaaaaaacaacaaggtgcaaaacaaactcaaggtggtgctatgaacaaaaaatcagaacaggcccttgacatatcaaagaaagggaagcccactgttaataaaaagcctaagaacaagaagaagggccgtaaatag

SEQ ID NO: 81430 - DNA, 153 bp, Saccharomyces pastorianus
atgaaagaaagcaaaaaaatggctaaagataatttaactaatttgctctctcaattgaacattcaattgtctcaagacgagcattcgcaggtcgaacagacttgcgtgaaactattggattctggatgtgagaatccagcggatgtatttaga

SEQ ID NO: 81431 - DNA, 900 bp, Saccharomyces pastorianus
atggaaagctccaaaattccatcacctataaggaaagcgacttcttccaaaatgatacacgaaaataagaagctacctaaatttaaatccctatcactcgatgactttgaactggggaagaaattaggaaagggtaaattcggtaaagtttattgcgttcggcacaggagtacaggatatatttgcgcactgaaagtaatggagaaggaagaaataataaagtataatttacagaaacaattcagaagggaggtagaaatacaaacatcgctaaatcatccgaatctaactaaatcatacggctattttcatgatgaaaaaagagtgtacctgctaatggaatacttagtcaatggggaaatgtataaactattgaggttacacggacccttcaacgatattttagcatcagattatatttatcaaattgccaatgccctagattatatgcataaaaagaatattattcatagagatattaaacctgaaaatatactaatagggttcaataatgtcattaagttaacggacttcggatggagtataataaatccgccagaaaatagaaggaaaactgtctgtgggacaattgactacctttctccagaaatggtggagtcaagggaatatgatcacactatagatgcatgggctcttggcgtcctggcgtttgaactactgaccggtgcccctccgttcgaagaagaaatgaaagatactacatataaaaggatagcagcactggatatcaaaatgcccagtaacatttctcaggatgcgcaagatttaatacttaaactactaaaatacgaccccaaagatagaatgcgccttggagacgtaaaaatgcatccttggatactaagaaacaagcccttttgggaaaataagcggttatag

SEQ ID NO: 81432 - DNA, 1341 bp, Saccharomyces pastorianus
atgaaaagttcgaaggtatatttaaagagtggtttgaactggtcagttcttcagatatgtttgacttggaacagagtggcagatgatgtgcagaccttccataatctcgatgagttgacatatgaggctttgtatgagaagattttgaagataacagaacttcaaagaccaactatctggtattcttttcctgcatttttatggtcgcaccttatattcatttcaagagcattccctgaatatgtgctaaacagaaactgtcctgacaactctattgtactgcttcccatcgtcgatcttctaaatcatgactaccgttccaaagtcaaatggtatcctgaaaatgggtggttctgttatgaaaaaatcggtaccgcctcccaatcacgagaactatcaaataattatggcggtaagggaaatgaggagttactctctggatatggatttgttttagaagacaacatatttgactcagtggctttgaaagttaaattgccattagatgtggtatctacaattcttgaaacagaacctagtttgaagctgcccttactttcggattacaccacttatgcttttgaaaacaaagactgtgtccagcaagaaaagaaggctactcgtagtgctacagactacatcaatggggtgacttacttcattaacatacaaaatgaacaatgtttagaaccattactggatctttttacctacctttctaaggccgaagaggaggatctacacgatttgagagcccgtttgcagggtatacaaatgctacgaaatgcattgcagagcaaactcaacagcattactggaccacctgcaactgatgactcttatgcaattgatccttacagagtctattgtgctgacgtttatactaaaggtcaaaaacaaattttaaaagaggctttaacgaggttgaaaaaactagaaaaaacaatgctgtcagagaacaagcaccaattgctaaccatgagcaaaattcttaagaatgaccctgcttttgcagaaactgaattaccttcgctgttcagcaacgaagatggtgaagaggtcatctttgaatctacttatgatttattgatactttggattctactgaaaacgaaaaagaattcttaccccaccaaatatgaatgggttggacagcagtatactaatttcaagcaaactgcatatatttcagatgatgccaaggctttccatactgcatacttcgagaagcaagacgatgtggatttggccgaagtagatcatgcgattcagtttgtagtagacaattcctttaccagaacttcatctacaaccgaagagactattttagtacgtaagtag

SEQ ID NO: 81433 - DNA, 498 bp, Saccharomyces pastorianus
atgtcatcagatgcgttaaaagcactacttcagtggggtgcgtcatttggtgtaatagtgccagaggaactcaagtttttatataccgatcttaagggcattatttgcgtatgtgaaaaagatatagacaatcccagcatcaagattcctcccgagattgtcatttcaaggaatctgcccatgaagttttttgggctaagtgaatccactaagaatatcaacggatggctgaagttgttcttcgcaaaaataaaatttgatagggataatgatactatcgtggacaatgttcgtgtgaatgataaatttaaaccttacttggatgcattgccttcccgcctaaattcgcccttggtctggaacccaagcgagttgaagcgtttatcatctacaaacttagggaattcgattcatgaaaagttcgaaggtatatttaaagagtggtttgaactggtcagttcttcagatatgtttgacttggaacagagtggcagatga

SEQ ID NO: 81434 - DNA, 204 bp, Saccharomyces pastorianus
atgtgttttcaccaccaaatgctttcctcgagtgtcgaacctttcttctctttgtatttcaatcacgttccatatatgtggtcgtgtttcaactttttttcttcgtctccttttcctcgttgcaccaaaaattctccagaaaaaaagaaattcaaacgtgggctgcctattagtagtaaatacacagacgggaagaagcgttga

SEQ ID NO: 81435 - DNA, 927 bp, Saccharomyces pastorianus
atgagaacgcttggtactggatcttttggtagggttcatttggtgcgctctgttcacaatggtcggtattatgctataaaagttttaaagaaacaacaagttgtcaagatgaaacaggttgaacataccaatgacgaacgacgtatgctaaagcttgtggagcatccgtttctgattagaatgtggggtacgtttcaagatgctaggaatatctttatggtgatggattatatcgaaggtggtgaacttttctcgttactgagaaagtcacaaagatttcctaatcctgtagcaaaattttacgctgcggaagtcatactggcattagagtacttgcatgctcataatatcatctacagggatttaaagccagaaaatatcttgctggatagaaatggccacattaaaataaccgattttgggttcgccaaagaggtacaaactgtcacatggacgctttgtgggactcctgattacattgctcctgaagttattaccacaaagccatataataagtcggtggattggtggtctctaggtgttctaatctacgaaatgttagctggttatacacccttttacgatactactccaatgaagacgtatgaaaagattttacaaggtaaagtagtatatccaccatattttcatcccgacgtcgtggatctactaagcaaactgatcactgcagatttgacaagaagaatcggtaatttacaaagcggttccagggacatcaaagctcacccatggtttagtgaagttgtatgggaaagattgttagcaaaggatattgaaactccatacgagcctcctatcacatcaggtatcggtgacacgtctttattcgatcaatatcccgaggagcagctagattatggtattcaaggcgatgatccatatgctgaatactttcaagatttctaa

SEQ ID NO: 81436 - DNA, 393 bp, Saccharomyces pastorianus
atgtggctactgaaaatatccaataacaaacagaaacatatgcaagaaatgggcataaaggaagatgaactgaagagccaacctagcattttcaaagagtcaaggaaagaaaagcaatttatacagagtattcaaaatcaagtgcagagaggaaatccgaagattgacttgaacttgaaattgatacagcgagaatttgcaaacgaaaactcccaacttttggactttataagagaattgggagatgtaggattacttgaatatgagctatctcaacaagaaaaagatgtactttttgggagctctgaagataataataaaaatcattacaaaccaaattacaaaaacaggaaacctaatctgagtagagccaactttactagaaataagtaa

SEQ ID NO: 81437 - DNA, 387 bp, Saccharomyces pastorianus
atggaccagcaacaactattatctgccattcaagaccttccacctaacgttgtatcgaatttgctttcaatggcccaacaacagcaacaacaacctcatgctcagcagcaattggttggtttaatacaatcaatgcaaggccaggctcctcaacaacagcaacaacagttgggtggatattcctctatgaactcatcctctccccctcctatgagtaccaattacaatggtcaaaatatatctgcaaaaccctctgccccaccaatgtcacaccaacctccgccacctcaacaacaacaacaacagcagcagcagcaacagcaacagcaacctgctggcaataatgttcaaagtctattagatagtttagcaaaactacaaaaatag

SEQ ID NO: 81438 - DNA, 666 bp, Saccharomyces pastorianus
atgcaaatcaatatcaaatatgcctttggattcattcagtttgacaaccctcaaagcgttagagatgcaattgaatgcgagtctcaagaaatgaactttggcaaaaagttgatcctggaagtttctagctcgaatgctcgtcctcaatttgatcatggtgatcacggtacaaacagtagttctacttttatttcttctgcaaaacgaccatttcaaactgaatctggtgacatgtacaatgacgacaatggtgctggctacaagaaatccagaagacacaccgtttcttgcaacattttcgttaaaagaaccgcagatcgtacgtatgccattgaggttttcaacaggtttagggacgggactggtttggaaactgatatgattttcttgaaaccaagaatggaactgggaaagcttatcaatgatgccgcatataatggggtgtggggcgttgttttagttaataaaacacacaatgtagatgttcaaactttctacaaaggctcacaaggtgaaacgaaatttgatgaatatattagcatatccgctgatgacgcagttgccatttttaataacatcaataacaacagaaataattctcgtcctactgattaccgtgctatgagccatcagccatacatatatggcgttccggcctcgtatggt

SEQ ID NO: 81439 - DNA, 612 bp, Saccharomyces pastorianus
atgatcgcgctgttcaacttgaacattatgtatttggaacttttgatcccatggaggctctttcggctgtgggccatggtcgatggtattgatgcacctgaaaatatgctacgatgtgtggataataattatagtacagtggggttctggagagcctggcatacaagttttaacaagtgggtaatccgttacatctatgttccatttggcgggtccaataacaaaatattaacgagctttgccgtattctcatttgtagcaatatggcatgacatccaattacgagtgttgttttgggggtggttaacagtccttttattattaggcgaaacctacattactaactgttttagtagatatagattcagaagctggtacaggtttgtttgcggtatcggtgctgcaataaatatttgcatgatgatgattattaatctctatggattttgcttgggtgcagagggaacgaagcttctattgaagggcatatttaacaattcacatagtccggagtttttgactgcggtaatggtaagcctatttattgctgttcaggtaatgtttgagattagagaagaagaaaaaagacatggcatcaacttgaaatgttga

SEQ ID NO: 81440 - DNA, 1155 bp, Saccharomyces pastorianus
  modified_base (996)..(996): a, c, g, t, unknown, or other
atgtcgatgttaagaatctggagttgcatcgtacatttcttttccgtgcaggcacttgattcacgaataaagccagacattgaattcaaaaggcgacaaaggatatttatcagttcatctaaagaagaaaatggttcatcttcaagtgccgttactgttacccgtaaccctgtgctcagctctaatagcccatctcctccgctatggaatacatgggaatttagactatattatttggcgttcaccgtagtagttcctttcatgataaaggcggcactggctacgagctccgagtctaatccaaactactataaatccagcggactgctagcccatggttggattctgggccgcaaagtggataacagcgatgctcagtataggttttttagatccaatttttttttgttggccatcttaatattactacaaattatattaaaaaaggtttttgttaaatttagtaaaattccgaaaacaaaattcgattttgcgtgtggattagtttttgtctgtttcatgtacgggatcaattctgttaagctctttacgcatgcttttattttcttcactttggcacattcgctaaagagaaagcgtttgatagccgcttttgcgatttggtcctatggtatctttacactattcatcaatcaaaaaatgaaaaatctcccctttaataatattgctatcatcctaagtcccatggatcaatggtataagggtatcgttcctcgatgggatttttttttcaattttacattattgcgtttgttaagttactccatggattttttggaaagatggcatgaacaattgagccgccaaccttcgatagattacgatgatagacgacctgaattcaggaaaagtttatctggttctactctacaaaccatttatgagtcaggtaagaatgttctggaggaaaaggaacgactggtagcagaacatcacatccaggattacaactttatcaattttatcgcttatatnacctacgcgccattgtttttagtgggcccaattatcacttttaatgactacctttatcaatcagaaaataagcttccttcgctaacgaaaaaaaacataggcttctatgccctcaaagtattttcgagtttgcttttgatggaaattatcctacattaa

SEQ ID NO: 81441 - DNA, 261 bp, Saccharomyces pastorianus
atgtacaagagagaagccgacgctgaagcttggcattggttgcaactaaaacctggccaaccaatgtacaagagagaagccgacgctgaagcttggcattggctgcaactaaagcctggccaaccaatgtacaaaagagaagccgacgctgaagcttggcattggttgcagttaaagcctggccaaccaatgtacaaaagagaagccgacgctgaagcttggcattggttgcagtttaaacccggccaaccaatgtactaa

SEQ ID NO: 81442 - DNA, 129 bp, Saccharomyces pastorianus
atgagatttccttcaatttttactgcagttttattcgcagcatcctccgcattagctgctccagtcaacactacaacagaagatgataacggcacaaattccggcctgaagctgtcatcggttacttag

SEQ ID NO: 81443 - DNA, 1491 bp, Saccharomyces pastorianus
atggaatttgtagaagataaggacaactctgcggtcttctcagtaacaaatagggatggctattatgtattgattgagttgacgaaaaacaatttggaagagggtccctaccgactaagttataaggtcttgcattctaataagatgatgaaaggtttcttggagggcgctttctttaattcaaaaggtgaatacattacttatgggttcaagtccagcttgttttatctctacaatgaaaccaactgttatgaactagctagtgaagtttgtggtggttcccatcgtctgtggaatctcgcaaaaattactgacggccacgtattaatgtatatcaaggcatcccgatttcatctaaggaaaatttacaactccattgtccctgaaactttagaaaatggtgtacacggaagggaaatcagagatatttcaatctgtcccgtttcaaatatcaacacgaatgacaatttcaaggatgggcatatattctgtactgcatctgaagatactacaattaagctgggatattttaacaatagaacagggaaggtgcagaatttttggacacaaagaaagcatgtgtctggattacaacgttgtcagtttataaatcacaaactaatgatatcatcttcagctagagaggagttattcttatgggaattgaacgataagtataataaacgaccatatatgaccatacgacaagctttacctgtatccacaactaatcctgatctaaggatcatggattttgatgtcaagtttatatcacagtcaggtgacttcttattagttactgtttattcagattcaacaataaagatttggcactatagggaaaatcagaataagtttgacctgatcatgcaaggtcgttataagacgtgctgtttattcaacgtcgtatttattgcgctgaaagaagagcttcttgttgtcatttcaccaactgatggacatttagtggtttataatataaccgagtacgtaccattttccgttgatccgatttctggcgatttggttgaccacaaactggaccctactatctcaaatcttcccgcacctgtagtgcagttgccggtacatcaatctggtatcaagtccttagactatgttgctaatgctacaagaacttccgccacaattttgacagggggtgatgataatggtttagggttgagcaacctgaaattatatgactcgaataaagtaacgttaaaaacaagtgactttatcgctgcagcagcttcttcgacaataacatccggtatgttgattaatggtggcaaagaagtcattaccacatcggttgatcaagtaatacgcgcttgggaaattaccgcaggcaagctttcactggtagataaaaagcgtaccactgtggcggatacaggatcattagatatcatttccaatgatgaagatgctgattctgagaaaacgttactgatcggaggtgttggtttatcaatttggaaaaaatga

SEQ ID NO: 81444 - DNA, 123 bp, Saccharomyces pastorianus
atgggttccagcacgactttgcaccaccaacgcgtcattaactctctgcagccgactacgagggcagtgaatcgcaggatggaaaatgtgggctacatgcatacacagccacaacaaaggtga

SEQ ID NO: 81445 - DNA, 1191 bp, Saccharomyces pastorianus
atgtctcttaggagacaaagttctaaacaacacaaattattaaacgaagaagaagatctaatcaagcctgatgatatttcttccgctggtaccaaggatattgaagggcatagcttactggaaaattatgcacctaatatgattctctcccagtcgactggagttgaacgtagatttgaaaattcatcatccatccaaaattcgcttgggaatgaaattcatgactcgggtgagcatatggcttcaggtgatacttttaatgaactggatgatggcaaattgcgcaagagcaagaaaaatggtggaagatctcaacttggccaaaatataccgaactctcagtctactttccccaccactgctaacatcggtagtaaagataataatgtaccacagcacaacttttcgacctccatatcgagtttaaccaataatttgaggagagctgctcctgaaagcttccatggttcaagaatgaataatatttttcacaagaaaggtaatcagaatctacttttgagatccaacgatctcaacaaaaattctgcagccccgacctctccattgtccaacgaacatatcacatctagtacgaactccggtagcgatgcaaacagacaatccaactcaggtgccaaatttaatagcttcgcccagttccttaaatcagatgggattgatgcagaatcaagaacacaaagaaaattatggttgcagagggagaattctattatggacttaagttcacaaaatgacggtagtgactctatctttatggcaggaaacattgatgcgaaaagggagtttgagagaatatcccatgaatactctaatgtaaaaagattttacaacccattagatgaagcgttgttgagagtacaacctataataacgggaaatgcaaataatatcaggaaaaaaagccataacgatgctcagtcaatcgcacattctagcagtgatacagatcataaggatgaggacgattgctctttactaactatgacaaaaaatttgaagatctttatccacatcttgcaagtgcaaagattcaggcagtgttgtccggtatatggaaaagcgaaagttacttatttaacaaggatgttaatccaatcaacaagaataggacaacgagtacaaaccacagcgttggccacactgcttcacagaatgcacgtaacttgctga

SEQ ID NO: 81446 - DNA, 774 bp, Saccharomyces pastorianus
atgaatgctacgttacaagaaaaggccaaagatgcgaataatctcgaacatagtttgactaaagacgacattaaacagtatatcaaggattacatccatgccgctaagaattctatcgcggctggcgccgatggtgtagaaattcatagcgccaatgggtacttgttgaatcagttcttggatccacattctaataagaggaccgacgaatacggcggaacgatcgaaaacagggcccgctttacactggaggttgtcgatgctcttatcgaaactatcggtcctgaacgggtgggtttgaggttgtcgccatacggcacttttaacagtatgtctggaggtgctgaaccaggtattatcgctcaatatgcttatgttttgggtgaattagagaagagggcaaaggctggtaagcgtttggcctttgtgcaccttgttgaaccacgtgtcacggacccatcgttggtggagggcgaaggagaatattccgagggtactaacgattttgcctactctatatggaagggtccaatcatcagagctggtaattacgctcttcatccagaagtggttagagaacaagtaaaggatcccagaaccttgataggctatggtagattcttcatctccaacccagatttagtctaccgtttagaagagggcctgccattgaacaagtatgacagaagtaccttctacaccatgtccgcggaaggttataccgactacccaacatatgaagaggcagtagatttaggttggaacaagaactga

SEQ ID NO: 81447 - DNA, 123 bp, Saccharomyces pastorianus
atgccatttgtaaaaggttttgagccgatctccctaagagacacaaacctttttgaaccaattaagattggtaacactcagctggcacatcgtgcggttatgcccccatttgagccagaatga

SEQ ID NO: 81448 - DNA, 1140 bp, Saccharomyces pastorianus
atgacaaataacccgataaccaccgataagttgtatcgcactgaaatgttaagattatttccgaaattggttgtactagataacgtgattgtgagagacgaacaaaaattgcaaaccgtttactcattaccgatgaagattcaacagttttttttcgaaaacgatgcattagggcaatcatctacagactttgcaaccaactttttgaatctatgggataataatagagaacaactgttaaatttgtattcgccccaatcccagttttctgtttccgtggattctactattcctccatctacggtaacagattcggaccaaactccagcatttggttattacatgtcgtcctcacgtaatatatccaaagtgtccagtgaaaaatctatccagcagagattgtcaatcgggcaagagtccattaatagtatattcaagactttgccgaaaacaaagcaccatttacaagaaccacccaatgaatactcaatggaaacaattagttatcctcaaataaatgggttcgttattacgttgcacggattttttgaagagactggcaagcctgaactggaatccaataaaaaaacggggaaaaataactatcaaaagaatagaagatacaatcatggttacaactccacatcaaataataagttatccaaaaaatcctttgatagaacctgggtaattgttccaatgaataatagtgtcataatcgcatctgatctgttaactgtaagagcgtattccacaggcgcttggaaaactgcatctattgcaatagcacagcctccacagcaacaggcctcggtcctaccacaggtcgcaagcatgaacccaaatataacgacaccaccgcagccacaaccttcagtggtaccaggagggatgagcattcccggcgcaccccaaggagccatggtcatggctcccactttgcaactacctccagatgtccagtcgcggctaaatcccgtacaactcgagctgctgaataaactacatttggaaacgaaattgaatgcagaatacacgtttatgttggccgagcaaagtaactggaactatgaaattgccataaaaggttttcagagtagcatgaatggcatccctagagaagcatttgtgcagttctaa

SEQ ID NO: 81449 - DNA, 321 bp, Saccharomyces pastorianus
atgagcggatttcacaatgttggaaatatcaatatgatggctcaacagcagatgcaacaaaatagaataaagattagcgtgaggaactggcagaatgcaaccatgaacgatttgattaattttataagccgcaacgctcgagtagctgtttatgacgctcatgtggaaggacctttagttattggatatgtcaactcaaaggcagaagcagaatcgttaacgaaatggaacggtgtccggtttgcaggcagtaatttaaagttcgaacttttagataacaatggggcctctgcgggacttcagacaccatttcgttcttga

SEQ ID NO: 81450 - DNA, 4644 bp, Saccharomyces pastorianus
atgagtgcagtgcgtctggaaatagtgtacttgaagaaaaaagccatctctgtaatagaagcacaaaacaagagaaagtatttgagtcaatacaaaactacaagttgtggcgaaataaaatgtttggaaatgtcgagggagtcgaacgacacaatacagagcgatacgattagatcatcctctaaatcagactattttagaatccagctaaataatcaagactactatatgtcaaaacccacctttttggacccatcgcacggcgaaagcctgcccttaaaccagttttcacaggtcccaaacatcagggtgtttggtgctttacccacagggcatcaagtattgtgccacgtccatggcattctaccatacatgttcatcaagtatgatggtcaaataactgacacgagtacattgagacaccaaagatgtgcccaagttcataaaacgctggaagtaaaaattagggcatcctttaaaaggaaaaaagatgataaacacgatttagccggcgacaaacttggaaatctcaattttgtcgctgatgtctctgttgtaaagggtataccattttatggttaccacgttggctggaatctgttttacaaaatttctttgcttaatccttcttgtctaagtaggatttcggaattgattagagatggcaagattttcggaaagaaattcgaaatttatgaatcacatattccttacttgctacaatggaccgcagattttaacttatttggatgttcatggataaacttggataggtgttattttcgctctcctgttttaaatagtatactggacatagataagctgacaattaatgatgatcttcagttgttactagatcgattttgtgacttcaagtgtaacgtactcggtagaagggattttccacgggttggaaatggattgattgagatagatatactaccgcaattcatcaaaaatagagaaaagttacagcatagagatatacatcacgactttttggaaaaactgggagatatttctgacatacctgtcaaaccatatgtatcctctgctagggacatgataaatgaacttaccatgcaacgagaggatttgtccttgaagaaatataaagaaccaccagaaacaaagcgccatgtgagtggtcatcaatggcaatcttctggagagttcgaagcgttttataagaaagcacaacataaaacaagtacttttgatggtcaaataccaaattttgagaactttatagataagaatcaaaaattctcagccataaatacgccctatgaagcattaccgcaattgtggccaaggcttccacagattgaaataaacaataatagtatgcaagataaaaagaacgacgaccaagttaatgcatcgttcaccgaatacgagatatgtggtgttgataatgagaacgaaggtgtaaaaggaagcaatataaagtctcggtcttattcatggttaccggaaagcattgcgtctccgaaagattctactatactattagatcatcaaacaaaatatcacaatacgataaatttttcaatggattgtgctatgacgcaaaatatggcaagtaaacgaaaacttagatcatctgtttctgctaataaaacatcgttgctgtctcggaaaagaaagaaggttatggctgcgggattatgctatggaaaaagagcctttgtttatggtgagcctcctttcggttatcaagatattctgaataaattggaagacgagggattcccaaaaatagactataaggaccctttcttttcgaatccagttgatctagaaaataaaccttacgcgtacgcaggtaagaggtttgaaataagctcgacacatgtatcaacgagaatacccgtccaatttgggggagagaccgtatcagtttataacaagccaactttcgacatgttttcctcctggaaatatgcgttaaaaccacctacgtatgatgctgttcaaaaatggtacaataaagtaccctcgatgggaaacaaaaaaactgagtctcagataagcatgcacacccctcatagtaagtttttatacaaatttgctagtgacgtttccggaaaacaaaaaagaaaaaaaagtagcgttcacgattctcttactcatctgacacttgagattcatgcaaacacgagaagtgataaaattccagaccctgcaatagatgaagtttccatgattatatggtgtcttgaagaagaaactttccctttagatttggatatcgcttacgaagggattatgatagtccacaaagcttctgaggatagtacatttcctactaaaattcaacattgtattaacgaaattcccgtgatgttctatgaaagtgaatttgaaatgtttgaggctctaactgatttggtattacttcttgatcctgatattctttccggtttcgaaatacataatttttcatggggttatataattgaaaggtgtcaaaaaatacatcaatttgacattgtcagggaacttgccagagtcaaatgccaaattaagacgaagttgtcagatacttggggatatgcccattcctcaggaattatgattaccggaagacatatgattaatatatggagagcgttgaggtccgacgtaaatttaacgcaatacactattgaaagtgctgcgttcaatatcctccataaacgattacctcacttttcatttgagtcgctaactaatatgtggaacgctaaaaagagcacaaccgaattaaagactgtgttaaattattggttatcaagagctcagataaatatacaactattaagaaagcaggattacattgctcgaaacatcgaacaggcaagattgataggaatagatttccattctgtatattacagaggatcacaatttaaagtagaatcttttttaatccgaatatgcaagtccgaaagttttatccttctttctccaggcaaaaaggatgttcgtaagcaaaaagcacttgaatgtgtgcctttggttatggagccagaatctgctttctacaaaagtcctttaattgttttggatttccaatcattatatccatccattatgattggatacaactattgctattcgactatgataggaagagtccgagaaataaactcaacggaaaataaccttggagtatctaagttttcattaccaagaaatattttagctttattaaaaaatgatgtaactatcgctccaaatggtgttgtttatgccaagacctctgttagaaaatcaacgttatccaaaatgttaacagatatccttgatgtcagagtgatgataaagaaaacaatgaacgaaataggtgatgacaacactaccctaaaaaggcttttgaataacaaacagttagcactaaaattattggcaaatgtcacctacggttatacatcagcttcattttctggacgaatgccatgctctgatttagctgatagcattgtacaaacaggcagagaaacattggagaaagcaatagatattattgagaaagatgaaacttggaacgccaaagttgtctatggagacacagatagtttatttgtatatctacctggaaaaactgctattgaggctttttctataggacatgctatggcagaaagagttactcaaaacaatccaaaaccaatctttttgaagtttgaaaaagtataccatccctccatattaattagcaaaaaaaggtacgtaggattttcctatgaaagtccttcgcagacccttcctatttttgatgctaagggtattgaaactgttagaagggatggtatcccagcccagcagaagattattgaaaaatgtattcgattactttttcaaaccaaagacctgtcaaaaataaaaaagtatcttcaaaatgaattttttaagattcaaataggaaaggtatctgcccaagatttttgttttgcaaaagaagttaaattaggagcgtataaaagcgaaaagacagcccctgcaggtgccgtggttgtaaaaagaagaataaatgaagaccatagagcagaaccccaatacaaggagcgtataccttaccttgttgttaaaggaaagcaaggacaactgcttcgggaaagatgcgtatcaccagaagagttcttagaaggtgagaatttagagttagattcggagtattatataaacaaaattctgatacctcctcttgatagattgttcaatttgattggtataaatgttggtaactgggctcaggaaatagtaaaatccaaaagggcgagcacaactactacaaaagtggaaaacataacaagagtaggaacttctgcaacatgttgtaattgtggtgaagaattgactaaaatatgttcacttcagttatgtgatgactgtttagagaaaagaagcaccacaaccttatcatttctcataaagaaattaaagagacaaaaagaatacgaaacactaaagaccgtgtgcaggacgtgcagttatcgttacacttccgatgcaggcatcgaaaatgaccatatagctagtaaatgcaattcatatgactgtccagtattttactctcgtgtcaaagcagaaagatacttgagagataatcaatctgttcaaagggaagaaacattaatatctctaaatgattggtaa

SEQ ID NO: 81451 - DNA, 723 bp, Saccharomyces pastorianus
atgctgaaaagatataattatacctctgaacaggaggaaaaattaaactctatcttaatttcggaaaatgtcatacagtcttcatgggatgagattgaaaataaatggataccgcgcatcaacaacatgaaatctgcgaagagaataaatcaattaccacccacttgcgaagatgaatattgctgcattaggtttgtgtgcgagagtttgtttaatcttaaatatatggatcctcagtgcataacataccgagctttcaatatgttacaatcgaatgagcttagcaaaatatctaaatttcctgtcttactgcactttcaaaaattagtatttcaaacactctatattctattaccttcacatttgcatagaatgctctccataccgctattgagacatatattaggtactgaatatgggaatgcttttggtttatggcaagagggcgaagcctcagacagcagagaatattttggatactgggtatttccagaagcctcctatttcaaccactcttgtaaccccaatataacgaaatatcgtaaaggtaattcaatgctattcactgtgaatagagatataaaaaaggatgagcagatctgtatcgattattccggggtactggacttaccaacagtaaaacgccgggcctttttggccgacagttggttttttgattgtacttgtgaaagatgtaaatcagaattgcaatctgtccattag

SEQ ID NO: 81452 - DNA, 1341 bp, Saccharomyces pastorianus
atgcccgttcgattgaaggatcttcaagtgatatatatcaatggcagacgttatgcggacagcgcctttcaaggatacgtcgattctttgttccaagcacaagatttcggagagaaaagcatgagtttactcaaaattaaaagcgtgggaaaaccgtatcgatcacatcccgtcttcatccttgatgttcggtgcccccaaactatcgatgatctgttacaggatccagcaaagaaaattgttaaaccttcccatatacgtaccattgaaccattgatcgttaagaccattcgctcctttctgacatttcaaggatacttaacgcctgataaatcagattcatctttcgaaatagtcaattgttcacagaagacgacaacattgcctaatagtcgaagccaaatcagtaaacgtaaccaagtattaaattcaaaaatgaagattgcacgcattaattcatacataggaaaacccgttgtcaatggacgtagaataaacaatagtacaataaactacgaaaaaatcaagaatataagactcgacggtcagaaatcaagcttacggaataaactctcttccaggccctacgatagtggttttacagaagattatgacagtataggaaaaaccataacagatttttcaatatcaagatctgtcctggcaaaatatgaagtgattaatcaagtagataaaaaatttattctcatacgttgtttagaccaatctattcataattgcccactattagttctagttgatcaacatgcttgcgatgagaggataagactagaagagctattttatagcctgttgacagaagttgtaaccggaacttttgttgcacgagacctcaaggattgttgcattgaagttgatcgtactgaggctgacttatttaagcattatcaaagtgaatttaaaaagtggggaattggctatgaaacaattgagggaacaatggaaacctcacttttggaaattaaaacactgcctgagatgttgacttccaaatataacggagataaagactacttaaaaatggtcttgctgcaacatgcacatgacctgaaggatttcaaaaaacttccaatggatttatcccatttcgaaaactacacttcggttgataaattatattggtggaagtactcaagctgcgttccaacggtctttcatgaaattcttaacagcaaggcatgcagatctgctgttatgtttggggatgaattaacccggcaagagtgcataattttaattagcaagctctcgcgatgccataacccattcgaatgcgcccacgggagaccttctatggtacccattgcagaattgaagtaa

SEQ ID NO: 81453 - DNA, 609 bp, Saccharomyces pastorianus
atgagccagcatattaggaaattagattcgaatgtttctgaaagacttaaatctcaggcatgcacggtatcgctagcatcagcggttagagaaatagttcaaaattctgtagatgcacacgctaccactatcgacgtcatgatcgacctccctaatttgagctttgcagtttacgatgatggtattggtttgactcgaagtgacctaaatatattggccacacaaaattatacttccaaaatacgaaagatgaatgatttagtaacgatgaaaacctacggttacagaggagacgccctatatagcatttctaatgtctctaatctgtttgtttgttccaagaaaaaggattacaactctgcatggatgagaaaatttccatccaaaagcgtcatgttgagtgagaataccatactcccaatagatcctttttggaaaatttgtgcttggagccgaacaaagtctggtactgttgttattgttgaagatatgctgtataatttacctgtccggcgcagaatactaaaggaagaaccccctttcaaggctttcaaacacaataaaggcagatatgctacagatactggtaatgcacccgatgatttcact

SEQ ID NO: 81454 - DNA, 183 bp, Saccharomyces pastorianus
atgattcaaaccacatccgccgatgaacagtactgtagtgcgtctaccaagtatgttacagttacagctgctgcagttacccaagtggttactactacggcggagcctgttgttaattacgttactataactgccgatgctagtaatgttacaggttctgctaacaacggtacccacatttaa

SEQ ID NO: 81455 - DNA, 396 bp, Saccharomyces pastorianus
atgattttcaaaatattgtgtagtttactactggtaacctccaacttcgcttctgccttatatgtcaatgaaactacgagctatacaccatacacgaagacattaactccaacatactctgtttcacctcaagagacaacattaacgtacagcgatgaaacaaccaccttctacataacatctactttttactctacctactggttcactacctcccaatcagctgctattattagtacacctactgcaagtacacctactgcaagcacgcctagcctaactacgtccacaaatgaatacaccaccacctattctgacacagacaccacctacacgtctactctgacctctacttacatatactctattacgggaatccgccaacgagaaggctga

SEQ ID NO: 81456 - DNA, 1407 bp, Saccharomyces pastorianus
atggggataaaaagtttcgacgttataatatcgtacctcgaaatttacaatgaaaggatttacgacctgttagaaagcggattagaagaatccggtagtagaatcagtactccttcaaggttatatatgagcaagagcaacagcaatggattgggcgtagaattaaaaatcagagatgactctcagtatggggtcaaagttatcggtctcaccgaaagaagatgtgaaagtagtgaagaattattgaggtggattgcagttggtgacaaaagtaggaaaattggcgaaactgactacaatgcaagaagctcacgatctcatgccattgtactgattcgtttaacaagtactaacgtaaagaacggcacctcaagatcgagtacattgtcgttgtgtgacctagcaggttcggaaagggctacggggcaacaagagaggagaaaggaaggttcattcatcaacaaatccttacttgctttggggactgtgatatccaaactcagtgccgacaagatgaactcagtaggctcaaacattccctcgccatctgcaagtggcagtagcagcagtagtggaaatgctaccaataacggcactagcccaagcaaccacattccatatcgtgattctaaattgactagattattgcaaccggcactaagcggtgacagcatagtgacaacgatatgtacagtcgacaccagaaatgatgcggcagcggaaactatgaatacgctgaggtttgcatcaagagcgaaaaacgtcgcacttcatgtatccaaaaaatccatcatcagtaacgggaataacgatggagataaagatcgcaccattgagctactgagacgccaattggaagaacaacgtaggatgatctctgaattgaagaaccgttcaaacattggcgagcccttaaccaaatcttccaatgaaagtacttataaagacattaaagccaccggcaatgatggtgatccgaatttggctctaatgagagcggagaatcgagtattaaaatataaactagagaattgtgaaaaactactagataaagatgtggttgatttgcaagattctgagattatggaaattgtagaaatgcttccctttgaggtcggcacccttttggaaacaaagttccaaggtttggaatcacaaataaggcaatataggaaatacactcaaaaacttgaagacaagatcatggcgctagaaaaaagtggtcatactgcaatgtcgctaactgggtgtgacggcactgaagtgatcgaattacagaagatgctcgagaggaaggataaaatgattgaggccctgcagagtgccaaacgactgcgggatagggctttgaaaccactcattaatacacagcaatcaccgcaccctgtcgtggataacgataaatga

SEQ ID NO: 81457 - DNA, 534 bp, Saccharomyces pastorianus
atgattcaaaaaatgagcccaagcttaaggaggccatcaacgaggtctagttctggttcaagtaatatcccacaatcgccctctgtacgatcaacttcatcgttttctaatctgacaagaaactccatacggagcacctctaattcgggttctcagtcgatttctgcatcttccactagaagtaactccccactaagatccgtatcagccaaatccgatcccttccttcacccaggtaggataaggatcaggcggagcgacagtattaacaacaactcgagaaaaaacgatacatatactgggtcaatcactgtgaccatccggccgaaaccacggagcgttggaacttcccgtgaccatgtggggctaaaatcgcccaggtactctcaaccaagatccaactcacatcacggtagcaatacatttgttagagacccctggtttattactaatgacaaaacaatagtgcatgaagaaattggagagttcaagttcgatcatgttttgcttcccattgcgactctagagatcccg

SEQ ID NO: 81458 - DNA, 222 bp, Saccharomyces pastorianus
atgtcggctaagaagccgccagttagcgatacaaataataacggcaataattcggtactaaacgacttggtagagtcaccgattaatgcgaatacggggaacattttgaagagaatacattcggtaagtttatcgcaatcacaaattgatcctagtaagaaggttaaaagggcaaaattggaccaaacctcaaaaggccccgagaatttgcaattttcgtaa

SEQ ID NO: 81459 - DNA, 399 bp, Saccharomyces pastorianus
atgttcgctcatcggtacttatattttggttgtatcgcttttattaataaggccaagtcatccgcctccttgagatggcattctcctatgctagatgacatcagcggtgtaaagacttggtcaaaagttgctgaagggatgataaaaatgtataaagccgaagtccttagtaaattgcccatcatgcaacatttttactttagcgagtttttgccttgtccggatggtgtatctccaccaagaggccacatacatgatgggactgataaggatgatgagtgcaattttgaaggacatgttcatactacttggggagattgctgtggtataaagttaccgagcgctattgcggctactgagatgaataaaaaacatcataaaccaataccttttgattag

SEQ ID NO: 81460 - DNA, 459 bp, Saccharomyces pastorianus
atgttgccagaaaagagactattgactccagacgatatgaaactatgggaagaatccccaacaagagctcatttcactaaatttattatagatttggctgaatctgtcaaaggacatgagaattctcagtacaaagaaccaatgtcggagtcaataaacagtatgatgaacttgctttcgcaaataaaagatatcactcagaagcacccagtaataaaggatgcagatagctcgagatttggtaaggttgagtttagggacttttatgacgaagtttcacggaattccaggaagatcttacattccgaatttccctctctcacagatgagcagttggaacaattatcgatttatctagatgaatcatggggcaataccagaagaatcgatcatggtccaggtcatgaatccaactccatgtgtacacttcatggactctatactcttggacatattcaa

SEQ ID NO: 81461 - DNA, 867 bp, Saccharomyces pastorianus
atgaaagtttgggatcttgcaacaggaaaattaaaaactaccttagcagggcatgtaatgacagtgagagacgttgctgtgtcggatcgacatccttatttattttctgttagtgaagataagacggtcaaatgctgggacctagagaaaaaccagattattagagattactatggacatttatcgggggttcgtacggtgagcatacatccaacgctggatctcatagctaccgcaggccgagatagcgttatcaaactctgggatatgagaaccagaatacctgttattacactagttgggcataagggtccaatcaatcaagtacagtgtactccagtagaccctcaagtggtgagttcatcgactgatgctacggtaaggttatgggatgtagttgctgggaaaacaatgaaagttctaacacatcataagaggtctgtgagagctacagcgttgcatcctaaggagttttcggtggcttctgcgtgtactgatgacatcagatcatggggattagcagaggggtctttactcaccaattttgagtctgaaaagacaggcataatcaatactttaagcattaatcaagatgatgtattattcgctggcggtgacaatggtgtgctttccttttatgattataagtctggtcacaaataccaatcgttggccacgagagaaatggtaggctctctggaaggtgaacggagtgttctttgtagcactttcgataaaacaggtttaagattaatcactggagaagcagacaaaagcataaagatttggaaacaggatgagacggctacaaaagagtcagaaccggggctagcgtggaaccccaacttaagcgccaaaagattttag

SEQ ID NO: 81462 - DNA, 165 bp, Saccharomyces pastorianus
atggccactctgccgccccacctacaaagcgaaatggaaggtcagaaatcattgctaatgcgatatgatacttataggaaggaaagtcttcttttagtggtgaaggcaagaaagttactctgcagcatgttcctacagatttttcagaagcatcacaagcagtga

SEQ ID NO: 81463 - DNA, 1329 bp, Saccharomyces pastorianus
atggaaaaaatgctgctggttgataaagtcaattttggttacaatatgttggaagactatgttttaaaatatacatggtccggtttgggttatgtttttgcctcaatccctatcgttatgtctaccttagcgacaggcatcaattcagaggaaaaaaatatgaaggaatttatagtcaacaaaaggttgatgttgtcgcttgcagatgcaggctcgagattgatgcattcgataaaggacatctcacaattgaccggctacactaataggatatttactctgctttccgtcttacacagggttcactctctgaactttaattacggcgctgttccttcaatcctgtcaatacgtacagaagacgcttccagaaattccaacttattacccaccacggataattcgcaagatgctattcgtggtactattcaacgcaattttaacggtattcggttagaaaatatagacgtaatcattccatcagtaagggcgagcgaaggcataaagctgattaacaagcttacatttcaaattcctttgcatattgacccaataacttcaaagtccaattctatacaagacttatcgaaggcaaatgatataaagttaccattttcgcagggttctggctccagcctgttaatattagggccaaatggttgcggtaaaagttcaattcaacgcattatagctgaaatatggccagtgtataacaaaaatggattattgtcgattccttcagaaaataatatttttttcattcctcagaaaccatattttagtagaggtggaactttaagagaccaaattatataccccatgtcctcggatgaattctttgatagaggatttagagataaggagctagtacagatattagtcgaagtgaaactagattatcttttaaaaagaggcgttggcttaacttacctagatgccattgccgattggaaggacttattaagtggtggtgaaaagcaaagagtaaattttgctagaatcatgtttcataaaccactatacgtaatattagatgaggctacaaacgcaattagtgttgacatggaagactatctgttcaatcttttaaaacgatacagattcaatttcatttccatatcacaaagacccacattaatcaaatatcatgaaatgttactagagatcggtgaaaatcgagatggcaaatggcaattacaggcagttggtaccgatgaagcaatcacgtcgattgacaacgagattgaggaattggagagaaaacttgaaagagtaaaagattgggaagatgagaggaagaagctacgggaaaagcttgaaattatttga

SEQ ID NO: 81464 - DNA, 126 bp, Saccharomyces pastorianus
atgtggggtaaggttaccagaactcacggtaactctggtgtcgttagagccaccttcagaaacaatttgccagccaagaccttcggtgcttctgttagaatcttcttgtacccatccaacatctaa

SEQ ID NO: 81465 - DNA, 780 bp, Saccharomyces pastorianus
atgaatactgacccagaatatcaaaagcaaatattcagagagctacaatttaataagagttttaagtccgattatattgtgcagtactatggtatgtttaccgacgaacagagttcttcaatatacattgccatggaatatatgggaggaaaatcactggaggcaacgtataaaaatttgttgaaacgtggcggtagaataagtgagagggtgataggaaagatagcagaatctgtcttaagaggtttatcatacttacacgaaaggaaagtcatccacagggacattaaaccccaaaacattcttcttaatgaaaaaggggaaatcaaattatgcgatttcggtgtcagtggggaggctgttaactctttagcgatgacatttactggaacgtcattttatatggccccagaacgaatacaaggccaaccatacagcgtaacctgtgatgtatggtccttaggattaactcttctggaggttgctggagggagatttccatttgaatctgacaaaataacgcaaaacgtggctcctatagaattattgacgatgatcctgacgttttctccccagttgaaagatgagccagaactagacatatcctggagcaagacatttagatcttttatcgactattgtttaaaaaaagatgccagagagaggccttctcccaggcaaatgttaaagcatccctggattgtagggcaaatgaaaaaaaaagtcaacatggaacggtttgtaaagaaatgctgggaaaaggaaaaggatgggatataa

SEQ ID NO: 81466 - DNA, 753 bp, Saccharomyces pastorianus
atggcttcaatgttcagaccaccagaatccaataggagtcaccaaaagactccaaaattaacgcttccagtaaatttaattcaaaatgcgaaatccactaatgatgggcaacatctcaaccggtcaccgtattcgtcagtgaacgaaagcccatactccaacaatagcacttcagctacttccactacgtcatccatggcttcaaattccactttgttgtacaatagatcatctactacaactattaaaaatagaccggtaccacctccattgcctcccctagtactaacgcaaaaaaaagacggtatagaatatagagttgccggcgatagtcagctttctgaaagattttctaatttgcatgttgatataacttacaaggaactactatctagtgctccaatttccactaagttatccaacatagataccacttttatcaagaaagatctcgacacaccagaaggcgaggattcatacccctcgacacttctttctgcgtacgacttcagcagtagcgggagcaactccgcccctttaagtgcaaataacataatttcttgttccaacttaatacaaggaaaagacgtagaccagttagaggaagaagcatggaggtttgggcatctcaaggatgagattactacactaggaattctaggagaaggcgcgggtggttctgtagccaagtgccgattaaataaatggaaaaaaggtttttgcgttgaagacaatcaacactatgaatactga

SEQ ID NO: 81467 - DNA, 642 bp, Saccharomyces pastorianus
atggtcgaacaaacaggacacatagataaattcaagaaatttggacaactggatttcattgataacaatatagttgtaaaaacagatgacgaaaaggaaatattcgatcaaattgttgtacgagacatgacgttaaaaactcttgaagatgatctgcaagaggttcaagagatatcgctaccattattcaaaaaaaagctagaacttttggaagtatatttgggatggttagacaacgtatataccgaaatgcgcaagctggacgatgatgctgcaagccatgtggaatgtggtaaagaagattccaaggggacaaaaaggaagaagaagaaaaatagcagcaggagtagggctaggaaaaatatatgtggctattgttctacatacgagcgaataccctgctctgtggaagaatttgtcagagattttggaagtaatgaggaagccaccaaaatacatgaggtatgcacgaagtggaagtgtaacagacatttggattgggtgtctactaatcaggaacaatacctccagcagattgactctttagaatctatgcaagaaaggttgcaacatctgatacaggccaggaaaaagcaactaaatatacaatactacgaggaaattttaagaagaggtttgtaa

SEQ ID NO: 81468 - DNA, 639 bp, Saccharomyces pastorianus
atggccaccgattctggtaaaactattgacgttttcacaggcaaaccattggtgttcaagcatacatcatctagtacttctgtaggctgtaaaaagcaggaagaagaagaaggtgaactacataaatggggtttcttcgttcagcagcagaggtctttataccctgaaaatgaatcaacaaggcagacaccttttgcatcaggtgatacgcctatcaacacagaaacagctggtaagtcaacttcgtctccttcagtttcaacttctaacaatgaaactgctaccactagtttatttagcccagctaatcctaagattttaccaaaaattccatccggtgctgtcttaagatcggcaatcatgaaggctaaaggtattgattctatcgatgatttgattcagaatgttaactccaacaacatagaattggagaacatttgtggtgaatccattcagaatagcgcttcgacatttacaccaggcgtggattccgatgtatctgcgcccaataccgataaaggatccgtagaaacattgcctgccgtctcaactgacgacccaaattgtgaagtcaaagtcactgctacctatgacaaactattaaataatttgtcgatggagaggtcaatcagactttga

SEQ ID NO: 81469 - DNA, 2535 bp, Saccharomyces pastorianus
atgataactaacaccgagttcgatgtgcccgtagattggttgtataaaggtaagagtagacggaagacaaatacgaagccatcgaggccttctacgtcgccagcctcctcttcatctacgtcctcttcgaaaaacggagacaatagcacgagtggtaacaggtctagcaatgataagcctcgtgcgaggtcgtcatctgtatccaatgcagcactttgtaatactgagaaaccagatttgaagaggaacgatggtaatacctctgcatcagacactgataacataccgctacttactcctattaatagcggtaaccgaagcgattccgctgacattgatcatccggctaccgtagacgccatagaccttatagattatgatgacaacggctcaagtactcaatttgtaaggaaaaaacgttccacttctatatccaatgctgtggtctcgtccaaaccaagactggccaattctgccataaacgccaccgcatcttcttctgtcggcaagggaaagcacccgccaatttcttcaccatctaatgctactctcaagagaagcaactcgactagtggagaaaagactaaaaggtcaatttttggatctttgtttagcaaacggtctacctcgtcttcagcttccactgccaaaaaaccattacctgttgttaatactagcacgactgagagtgagtctggtggcactaaagcagttgcgactcctgattcacgggtgaaggagatatcatcaccaatgagaggagtggcaccaaccgctagcaagccaccgacacctgtactcccctcccctgcacttacagtaaaagacctatctacagtttcattgaaaagggtctcgtttgccgtcgataaattcgaatccgatcctccccaacaacttccttcaagaaccccaaaaaagggaaacatccttatccctgatgacatgataagcgaggttccttctatttccgtgggtatttccagtagcaaccaatcggccaagtcaaccaattccaacattaagggaccgttgtacactaagaagtctaaagaatatatactcgccctggaaaatcaaaagttggctttaagggaggctgctaagcatcagcaagaagctcattttgctgctaatagaatagcctttgaagtggccaattttaagactgcttcggatgcaggcggtaagcttactgaaaagtcatcagaaggcaccattacgaagcaaagagaagaggtgtcacctccaaatgttgaagctgatcgggagcttgagaataataaacttgcagaaaacctctcaaaagccggcattgataagcccattcacatgcatgagcactatttcaaggaacctgatcaagataagtaccaagacggtcattctattgaaaataacgaagttacgctggatgttatttacacaagatgctgccatttgagggaaattttacccatcccgtctaccttaagacaagtaaaggacaagacagctcccttgcaaatattgaagtttttaaaccctaagcctaccttgatcgatattctttccttttgtgatttcatcaccattgctcccattcacacgattgttttcgacaatgtagctttaaaccaggatatgttcagaataattatttctgctttggtaaactccacagttttggacaaattgagtttaagaaatgtacgaatcgaccaagatggatggaaattgctatgtaagttccttttgctaaacaaatcactgaacaagctcgacatttcccaaacgaaaatcaaatctgaccttgctgaatcactatatcgccataacatggattggaacttgtttactgacgtcttgtctcagagatctcacaaacctatagaagaattgttattcaatggtattcaatttagcaaaattccttactcgtgctttgcacgtttactgacatcctttgctacccaaaaaaactttccagaatcgggcatcaggcttggtttagcaggtgccactacttccaatatctctcaggattgtctgaaatttatcttcaattggatgtctcaatataacgtccagggtgtggatctagcgtttaatgatctgtccactatgattaagccaatggttggtaaactatctgctctatcatatgataacttaagatatttcattttgaacagtactaatatttcgacttcttatgatttagctttgctcttgaaatatctttctaagttgcctaacttgatttttttggatttgagtaatttgtcgcaatgctttcctgacattttaccctacatgtacaagtatttaccaagatttccgaacctgaagaggatacatttggatagcaataatttgacattaaaggaactagctgtcgtttgtaatattttgattaagtgcaaatcgctctcgcatgtgtcaatgactaatcaaaacgttgaaaacttctatctaatgaacggcacagattctcccgttcaacaaactaacacagacggcgacttggatagttcgagcacattggacgtttag

SEQ ID NO: 81470 - DNA, 342 bp, Saccharomyces pastorianus
atgtcagcggaatcgcttcggttaccgctattaataggagtaagtagcggtatgttatcagtgtctgatgcagaggtattaccatcgttcctcttcaaatctggtttctcagtattacaaagtgctgcattggatacagatgacgacctcgcacgaggcttatcattgctagacctgttaccactcgtgctattgtctccgtttttcgaagaggacgtagatgaagaggaggctggcgacgtagaaggcctcgatggcttcgtatttgtcttccgtctactcttacctttatacaaccaatctacgggcacatcgaactcggtgttagttatcataacctag

SEQ ID NO: 81471 - DNA, 1062 bp, Saccharomyces pastorianus
atgcaatatcagttgttaagcgaagacgggtatgaactatggggcatgcttcttcaaaatttttcatcccacgatcaagagtttgacgataagttcgttgaattggtgccatttctaaagtatggtattgagacacacacagagattctcccaactttacttgaaattatcaaaagttatgctctgattctgaatcctgtggattttttctctaacaacacatttcaagatatttttaaacaaatgtctaaatatcttttaaagttaagggaagattcatttcagttggttttagaaatctgggaaattttgatattatccaatgagtcggattacgaaaatctgttattgcaaaaattctatgaaaccggagtattatcagcattattcgatgccattttcctggaagaagctccttcatcttatttatgctcgcaaatcattcaaatcatcgctagaatatcctacgtgaatccagacgccttaatgacttttttagctacatatcatgacaatctaccaacttctaacgaaaatgcacgcatgccggaatcaataagaaaaattgtgtctaaggatcagacgtatgattccgttgtaaacaagcttttaaccggatggatagtatgttttagagatatctttgatcctaaattcaaaaaagttcacatattaggtatttcaagtttactaaggactggtttagttcctattttgactgagttttcatccatcgcatctttatggatcgaaatgctcgaagaaattaatgaaactaatcgtggggattgcgaaaaataccacttgaatgatattgttacagagcaatcaattgcattccatcctttaactgccgaacaattaagatatcatcaattatgcaaaaacaatgatccagtgcataacattagtttaaaagattttatttcccaatcaatggaatatctagaatcacatttaggagtagaaaggtaccaagaatttttgaagactattaaccctagtttactagagaacttacaaatgtttttatccatccagcctcaagaggctcgtccatga

SEQ ID NO: 81472 - DNA, 594 bp, Saccharomyces pastorianus
atgagttcgccattacatagattgtctcccacaggtcaatcagacgataggaaagtgacgagcccgctagatgataagctaaggaggcaattaagggaaggtaatacgcgactacctcctccaccattttccagctacgggatgccacccaccaaccgatctaatttggatagaataagaagaaggactagctcaccagtaagaactgataaatttgcatcacaaaatgtgatagatgaccaaagattagaaataaaatatttagaacgaatcgtatatgaccaaggcactgtcattgataatctaacatcaagaataacaagactggaatcattcatattgaattcgatctcagacagaggagataaaaattttgcctctctcgaacactcccgctctttttctgggtttccgaccaacaagacgtatggcttacaaatgggtggactgtatgagaatgatatgccctatcgaagaagtagcgacaacattaataaagaaggagcaagagaagatcgatcgtcacaaatccatattgaaaatgaaagtacggaggatatactaaaaatattgtcttcgtcttttcacaattga

SEQ ID NO: 81473 - DNA, 204 bp, Saccharomyces pastorianus
atgacattagtacaactttcagaagttgataaacaagagtgggagagtcaaatgaatgaacagctgaaagagttggaaaaaaaaaaaatagcggagctggaaaaattgaataaggtgctgcatgatagcgaagggaaagattttggaatggctgaactatgcactaggttaaaacttgactacagcttaatctttccacaatga

SEQ ID NO: 81474 - DNA, 414 bp, Saccharomyces pastorianus
atgcacaatcaggaagagtggctagacaaggacaaaactttggtgaacgaagaagaaaatacttgcatcaaccattcttatacaaaaaaggacactaataactatcgggtcggtaaaagcggtattaaggacttgaagaagcctacgaaccagaaggaaattgcgataaaaaatagggagttaacgaaacaacttactcttctcaggcaagaaaataatcacttacagcaggcttgtaaaattctcagcgaaaacaagatcattgagaacagaaaatccatagaaaaatggaggacaatttgtgagatggaactgtcttttattttaaattccactttaatcaaaatcaatagaatgggcggctataaagattttctagaacaagaaatggaggctaaaagagaagatggaata

SEQ ID NO: 81475 - DNA, 1359 bp, Saccharomyces pastorianus
atggaaaatatcaaacttgctagtttcaccaaacctactccagtacaaaaatattctattccaatagttaccaaaggtagggatttgatggcatgcgcacaaacgggctcaggtaagacaggtgggtttttgtttccgctcttcacggagctattcaggtctgggccctctcccgtacccgagaaagcacagagcttttattctagaaagggatatccatatgctttagtacttgcaccaactagagaattggctacccaaatttttgaagaagcaagaaaatttacgtatagatcttgggttagaccatgcgttgtttatggtggcgcgccaatcggtaaccagatgagggaggttgaccgcggctgtgacttattggtggctacaccagggcggctgaatgacttattagaacgtggaaaagtttctttggctaatatcaaatacctggtattggatgaggctgatagaatgctagatatgggattcgaaccccaaattcgccatatagttgaagaatgtgatatgccctctgtggaaaatagacagaccttgatgttttccgccacattcccagtagatatccagcatttggcacgcgatttcttagataattatatttttttatcagtaggaagagtcggttccacctcagaaaatatcacgcaaagaatattatatgtcgatgacatggacaaaaagtctgcgttgttagatttactgtctgcagagcataagggattgacattgatttttgttgaaacgaaaagaatggcggatcaactcacagattttttgatcatgcaaaatttcaaagctacagccatacatggtgaccgcacacaggctgaacgtgaacgtgccttatctgctttcaaagctaacgtagctgatatcctggtcgcaacagctgtagcagcgagaggtttggatataccgaatgtcacacatgtcattaattatgatttgccctccgacatcgatgactacgttcacagaattggtagaacaggccgtgctggtaacacaggcgtggctacttcattcttcaatagtaataatcagaatattgtgaagggtttgatggaaattttgaatgaagcgaatcaagaagttcccacgtttttaagtgacctgtcaagacagaattcaagaggtggaagaactaggggaggaggaggttttttcaatagtcgtaataacggttcaagagactaccgtaaacatggtggaagcggctcatttgggagtacgaggccaaggaatactggaacatcaaattggggttcgattggaggtggatttagaaatgataatgagaaaaacggttacggaaatagcaacgcttcatggtggtaa

SEQ ID NO: 81476 - DNA, 225 bp, Saccharomyces pastorianus
aaacgacggcagtgccagcttgcatgcctgcaggtcaattacaaatcatctggaaatagatgggtaaatggcaagcatataccggggcctaagaacgcgaaattagaagccgaactgtttggtgtacacgaggatcccgattaccattcatctggtataaagtttgataattacgatgatattcccgtagatgcatctggaaaagatgtcccgaacctatactag

SEQ ID NO: 81477 - DNA, 144 bp, Saccharomyces pastorianus
atgtataaaattccctccaatacgaaaccgcatcgcataagacagcctcaaaacgcaaatacaccaacttatgacgatagtgatatatcaatgatttctcatgtttcaagaaaacatacaacaagaagtggtggaagatggtga

SEQ ID NO: 81478 - DNA, 468 bp, Saccharomyces pastorianus
atgagcattgaatactacaaaaggaccggtcccgtccaaaagagtctacttgattacaacgctaagtaccattctgatctagacgatccaaatacttggaagaatgcggatttgatcattttggccttgcccagtacggcctctacaaacaatattatcaatcgtaaaagtttggcctggtgtaaagatggtgtcaggatagttaacgttgggagaggcacatgcatagatgaagatgtgctactagacgctcttgaatctggaaaagtggcaagctgtggtctcgatgtgtttaaaaatgaggaaacacgcgttaagcaagagttacttcgcagatgggatgttacagctttgccacatatcggcagcacagttgccgacatggtcataaagcagacactcatcacactcgagaatgtgcaggacatatttgtcgagggaggtgatggtaagtatgtgctcaactga

SEQ ID NO: 81479 - DNA, 339 bp, Saccharomyces pastorianus
atgtaccacgttgacaaatacggcatcaacgctgtcattgaaatggcaatgaaagccgtgcacccagaaacaaacggtgaaggtcccattatgtgctcctatgacgtcgatggtgtagacccattatacattcctgctacaggtactccagtgagaggtgggttgaccttgagagaaggtcttttcttagtggaaagattggccgaatccggtaatttaatcgctctagacgttgttgaatgtaaccctgatctggctattcatgatatccatgtttcaaacaccatctctgcaggttgcgccattgcaaggtgtgcattgggtgaaaccttattgtag

SEQ ID NO: 81480 - DNA, 588 bp, Saccharomyces pastorianus
atggaaacaggacctcattacaactactacaaaaatcgcgaattgtccatcgttctggctccattcagcggcggtcagggtaagcttggtgtcgagaagggccctaaatacatgcttaagcatggtctgcaaacaagcatagaggatttgggctggtctacggaattagagccctcaatggacgaggcccaatttgtgggaaagttgaaaatggagaaggactccacaactgggggttcctctgttatgacagacggtgtcaaggctaaaagagcagatttggttggtgaagccaccaagttggtgtacaactccgtgtcgaaagtggtccaggcgaacagattccccttgaccttgggtggtgatcattcaatagccattggtactgtatccgcggttttggacaaataccccgatgctggtcttttatggatagacgcccacgctgatataaacaccatagaaagcaccccctctggaaacttgcacggctgtcccgtgtcattcctaatgggtttgaacaaggatgtcccacactgtcccgagtcgctcaaatgggttccagggcaacttgagcccaaagaagat

SEQ ID NO: 81481 - DNA, 1272 bp, Saccharomyces pastorianus
atggcaaggggtgtttccatgttgaataagtcgtacagctcagtgggagttaatagaagtatattaaatgatagcgtgacggtccccatcatcgctaatcatacactggagatacttgggacgctgaaatttgaatatattattatcacaccatttgaacatccacaactgcccttagaaagaacagaaacgtactggaaatccttagtgtccactcgtgttataggacatagaggcctgggtaaaaataatcctaataaatcattacaaattggagagaacacagtcgagtctttcatcatggcagcctcattgggagcatcatatgtagagtttgatgttcagttgacgaaggataacgtaccagtggtatatcacgattttctcgtagctgaaacaggtgtcgatatccccatgcatgaattgacgctggaacagtttttagatttgaacaatgccgataaagagcacattcaacgtggagcaggtcactcatctcatcatgtaaatggagcagatacagcactacaaaaatatagagggcgttcggtagatgattcagacgttagtacattgaggagagcttgggattttcacgacaacgacccgaatgggaagtccaacaatgctcattggtctaacaatcgaatgaggctaaccaaaacatttaaaaagaacaattttaagggaaatgctagaggacattcaatagcttcatcatttgttaccttgaaagaactattcaagaaaatccctgccaacgttgggtttaacatagaatgtaagtttcccatgcttgatgaggcagaagaggaagagttagggcaaataatgatggaaatgaaccattgggttgacaccgtgttaaaagtagtttttgacaatgcgaatggtagggacatcattttttcgtcatttcatccggatatttgcatcatgctttcgttaaagcaaccggttattccgatcttgttcctgacggaaggtggaagtgaacagatggccgatttgagagcctcatcgttacaaaacggtataagatttgctaagaagtggaatttgttggggattgtatctgctgcagcacccattttaaaggccccacggttggtgcaagtggttaagtctaatgggctggtatgtgtcacttacggtgtggacaacaatgatcccgaaaatgccagtatacaaattgaagcaggtgtagatgccgtgatcgtcgatagtgtattggcaattagacgtgggttaaccaaaaagaatgaaaagtaa

SEQ ID NO: 81482 - DNA, 2322 bp, Saccharomyces pastorianus
atgaagttcggaaaaacctttgtcaatcatcgcattccagagtggtcaaatcaatatgttggctacaagtcgttgaagaaaatgattaaagaaattacaagacttcaagaagacatatatagggcacataacaagaatagctatgatgaaagcaggccaccaacaaaaatgagagattcatctaatagtgctcaaaattatttggactctccaaaaatccaaaagttattggcgtcgtttttctttgcagttgacagggatattgagaaggttgatacattttacaattcccagtatgcggaatataagaaaagatttgagagattgctttcttctaatcaattcaatgagataaaatcaacattagtggtcgatgccaacaaagaagatgcagtagcgcaaaccttactcacaagggatacgagagagatgaatatgcttttaaagggaacaagtcaagccagccgtctatcttaccataaagatgacttaattgaaattcagtctatcttagctgagttaagaaaacaatttagaaacttaaagtggtacgctgaactaaataagagagcttttggtaagattttaaagaaactggataaaaaagtcggcacgaatcagcaaatatcaactatgaaaactagaatcttgccgttacaatttgctaatgattctcttattaccaaagatttgagtttgctaaaaactatctgggaacaagtgacgttcaggataaattcttacgagagagtaatgaggagtacctcgccgaacgcaaatgctaatgataatacagaattctttaagattatttgcgtttttatagaagaagatgatagcaaaggattgattagagagctaacaaacctatattcggaattgtctttgattccaacaagaattatgataagtgttttaaacaaggcagcactgtctaaatcactggcatgtattgatgctatcttaaaggttattccgtctctaaatgactcggaagatattaacagaagaaattttttccatcatcacataattgcaatcgggaagttaatcagaaaacaggaaattttaagtaggaaaaagaagtcacaaccctcaaaatatactaataatgagggagaaattgtaacagatttaagaaccctgcatacgaccctatctgccccggcagaatcagatagcattacagaggaggaaaaaagttcggcctgtacactctcttatattttagaggagttaccaattcatttaagaccatgcctttttcagcatgataattacaagagaacgcccttgcattattcttgccagtatggcttatctgaagttacgaagttgattatcaagttaatgaaagaatggaatatctggaatgaaatccctattgatgacgtttccgcgttcggagatgccgaatcattgacacctttacatttatgtgtgttgggtgctcatcccaaaacaacagaagtcttattgcaatcattggatccgaacgtgaaattaaaaagttcaagtttgttacatttggccactgagtggaataactatccccttttacatgttctcctatcatcaaaaaggtttgatattaattatcaagacaacgaattacatgaaacaccgctatatcttgcttgtagattaaattttttcgaagctgctgtgtgtttattgtacaatggagccgaccttgaaataagagaaaaactttttggctggacagctatcttcgttgcagcagcagaagggtttacggacattgtaaagctcttgatagccaacaacgcgaactttgatattgaagatgaaggtgggtggacgccgatggagcacgcggtattgcgcggtcatttgcacattgctgatatggttcaaatcagagacgaactggtcacgcatccccattcacagttgaacagtggtagcgaagagaaagaaccactaaacgaaattagtgccggagaattaaatgagagaaatgaaaatggaaatggaggtaataaagggtccttgggaaaactggccggaccaataaagtcatatggacatagattcctggataataatgaatcactcatactaataacattgggaagtaatgacacaagaaacaaaagcccttcaatttcattaagcccggaagcactagcaaaagttattgggttggaaacagattgtgcattatcgttagtaatttcatgcaatgattcaattgataaatcttctgtaatcttagatttaccattagatgataatgtggacgcagtagacttcaaagtgccttccaaagttgattattctcatacattatatcttgat

SEQ ID NO: 81483 - DNA, 1833 bp, Saccharomyces pastorianus
atgtcatttttaaagttcgcttatagaaactcttggcgatactatagcaagtccacacggcattttcataaaatacctataagacagttcataatacctacgtcaattgctttttatttgacacaaaattcgtttccaaaacaaaattgtttgatatacaatgattctctaaaaccggatcccaaaggtgatacttttgaaatgggcctctacgtttcctcagaaaacgaattgcaggaaaagcttaaatctttcaggtctgctaagatcactgaatcacgaaataaattaataagatatctaagaatcttttggttcggttttaatgataatattgttgagcctgtatgcacgattttaaggtttttagaaatttcagctatttttttacctcttctcctattataccccatatcatggtttggtcataaactcaaaattacggacaccaatataactgaaactcgaggttcattgatttggtgtcaactactgcgtaaagcattggaattggctggcccgagtttcattaaactcggacaatgggcaggatcgagaaccgatatattctctcacgcactgtgtcatgagttgggtaaattgcatagtaacgttacagctcactctctaagctttactctggaaaaactttctcaagcattaaagattgacaagatcgaagatgcttttgatgaatttaatcgaacaccaattggagttgggtccatcgcacaagtttacgtgggtgaactatcccaaaagtacatcgataaatatgacaatatacaaattggtaaggatggaaatcgttggtgtgccatcaagatcttgcatccaaatgtaagatctcagatccggagagatttgaaaataatgaaattcttcgctgacgcaataaattggattccgactatggaatggctgtctttacccagcgaagtcgatcagttttccatattaatgaatattcagttggatctaagaattgaggcgttaaacctggaaagattcaatgagaactttaaaaattctattcaggtgaaatttcctaaaccatttctccccttgtcaaatagggatgttatgttcgaagagcatgtatatggtctttccatggaaaagtttttatctacgaagaagcaaattaacgacgttgaactttgtaaaaaagtcagtgatcccttcgttgacgcgtttctacaaatgctaattcttgatgattttgttcatgctgatttgcatccaggcaatgttataatcagatttgtgaagacgaacaaatacggcacaaacattatatcctccgaacttgaatcgtacagaataacgcacgacctgaggaagaagatagaggaggaccaagatcaggactttgttggaaaactgaagtctgtattaactaattacactccccaaatttgttttatcgatacaggaataattacagaattgaatgaaaaaaacagaattaatttcatagctctattcaacgcattggcccgatttgatggttatagagctggtgagttgatgattgagagatcaagaacttcagaaacagctattgataaggaagtatttgcgtttaaggtagaaaagctagtggataaagttaaacaaagaacatttacattgggaaccgtctcaattggcgatttactcgatcaaatgcttagtatggtaagatcgcaccatgttagaatggagtccgactttgtttccgtggtggtcgctattttacttctagagggtattggacgccagttagatccaaacttggacttatttgaaaggttcgtattctacgcatggattaacggttttaaagaataa

SEQ ID NO: 81484 - DNA, 633 bp, Saccharomyces pastorianus
atgcgacccctctgtttacacacaattgaagaggcttacactattgaagatatcgaagttgaagaacctattccattaccagaagatgctccagaagatgctgagcaagaattcaagaaggttactaaaactgtaaagaaggatgacttaaccatcgttgcacacacctttgccctagacgctaaaaagttgaatgaattaattgaaaaagaaaatgaaatgcttgctcaagataagctagttgctgagacagaagaccgtaagaacactcttgaagagtacatctacacattacgtggtaagttggaagaagagtatgctccatttgcttccgatgctgaaaagacgaaattacaaggtatgttgaacaaagccgaagaatggttatacgacgaaggtttcgactccatcaaagctaagtacattgccaaatacgaagaattggcttctctaggtaacattattagaggtagatacttggctaaggaagaagaaaagaagcaagctataagatctaagcaagaagcatcccaaatggctgctatggctgaaaagttggctgctcaaagaaaggctgaagctgaaaagaaggaagaaaagaaggatactgaaggtgatgttgacatggactaa

SEQ ID NO: 81485 - DNA, 1290 bp, Saccharomyces pastorianus
atgagtactccatttggtttagatttaggtaacaataactctgtcctggccgttgctagaaacagaggtatcgacattgtcgttaatgaagtctctaaccgttccaccccatctgttgttggttttggtccaaagaacagatacttgggtgaaactggtaagaacaagcagacttccaacatcaagaacactgtcgccaacttgaaaagaattattggtttggattaccaccatccagatttcgagcaagaatctaagcacttcacctctaagttggttgaattggatgacaagaagactggtgccgaagttagattcgctggtgagaaacatgttttttcagctactcaactagctgccatgttcatcgacaaagtcaaggacaccgtcaagcaggacacaaaggcaaatattaccgatgtttgtattgctgtcccaccttggtacaccgaagaacaacgttacaacattgctgatgctgctagaattgctggtttgaaccctgttagaattgtcaacgacgttactgctgccggtgtttcttacggtatcttcaagactgatttgcctgaaggcgaagaaaagccaagaattgttgcctttgttgatattggtcactcttcctacacctgttctatcatggccttcaagaagggtcaattgaaagtcttaggaactgcctgcgacaagcattttggtggtagagacttcgatttggctataacagaacatttcgccgatgagttcaaaactaaatacaagattgacatcagagaaaatccaaaggcttacaacagaattctaactgctgctgaaaagttgaagaaagttttgtctgctaatactaatgccccattctctgttgaatccgtcatgaacgacgttgatgtttcctctcaattatctcgtgaagaattagaagaattggtcaagccattgttggaacgtgttactgaaccagttaccaaagctttagctcaagccaaattatctgctgaagaagttgattttgttgaaattattggtggtactactcgtatcccaacattgaaacaatccatttctgaagccttcggcaagccattgtccaccactttgaaccaagatgaagccatcgccaagggtgccgcctttatttgcgccattcactctccaactctaagagttagaccattcaagtttgaggatatccatccttactctgtctcttactcttgggacaagcaagttgaggacgaagaccacatggaagttttcccagctggtttatccttcccatctactaaatga

SEQ ID NO: 81486 - DNA, 633 bp, Saccharomyces pastorianus
atgatttcattatcaagaacgccttccccatcttcttcggcattgaactcttcgaatactagcaatgcgtggaccacggtttcttctaagagcacaacccacatggcttccaccatgcctgtcgctggtaaccagtcaaagtcatatatcagtttggacacactgcgttcttctggggggttacctactgcaacaaaaactaaaatgagcgataagagtaaacaaattggctcatccactagtatcccgactttaaaggcccgtcaagttaaaccgtctcgcatccctgcctatcccggtaacgcttctgtctctaagcgtcaagaatttttgagatggtgccgatcccaattaaaactaaatacgggtgttcagcccgataatgttttagaaatgctacttagcttgcccccaggttcagaatccaaggaaattatcgcagataccatatattcctacagttcaacaatggacggtaggagatttgccactgatttcatcaaaaaacgtctagaatgcgaagaagaaattaatgaccccttgagctggagtgaagtattagctatgcctgaaggcagttccgaagactgggaatttcaagttgttggtaaaaagaaaggaaaaagattttga

SEQ ID NO: 81487 - DNA, 606 bp, Saccharomyces pastorianus
atgacttctgaagagcagaaaaggtttgcaaaggcagaactgatggcacaaaaattattggaagaacaacaaagacaagaagaagaaaaaaagagaagagaagaacagcgcaaattaaagaaggagaaaaaattgaagcaaaagcagaaaaaggaagaagagaagttaaaaaagaagaagaaggaagaaggaaaattagagaaagaaaagcaaaaagaattgctaaataacattttaactggagatacagaaacttcatcttccgaaaacaccgcaacttccataaccactaatttggcgccttgggctaacaagaaacccgagggtgctgtttataatcagatttcatctgctcttgaagatttgaagaaggagaactcgtccaagaaagaaaaaaaacctaatcgtactcagttagatcgtgagcaggcattaaaactacagaaagaaatattaagctcggcgcaaattccgaaaactcaaactggttctgcctggggtataaagccacagcaaccgatcaaagttgatattaaaggagaattgatgacagacaataccaaaattaacagtcagtctaaaattaacaaaggccaacaatggtga

SEQ ID NO: 81488 - DNA, 201 bp, Saccharomyces pastorianus
atgggaacaccgccacacgctggatttgctattggttttgatcgtatgtgcgctatgatctgtgaaactgagagtataagggacgtaatcgccttcccaaaaagtattaccggggctgatttggttgtcaagagtccaagtgtgatacctgaaagcattctggaaccttacaatatcaagtatagtaattcaaaaaaatga

SEQ ID NO: 81489 - DNA, 729 bp, Saccharomyces pastorianus
atgttggcccgttccagggtgtgcttgcagacaatcactagacggttggcagactttccagaagccaatgctattaagaaaaaatttctctttaggaaggacacctcgaccatcaaacagttaaaaggactgtccagcggccagaaaatagtactcaatggatggatagagcagaagccaaaaagagttgggaaaaatttgatcttcggacttttaagggactctaacggtgacattatccagttggttgataacaaatcgttgttgaaaggctttactttagaggatgtggttcaagccgtaggtatactctctttgaagaggaagctatcaaatgaggacgcagatgagtacgaattgcaattggaggatattactgtgttaaatgcatctaataaaaaaccagcgcaaatgcaggattttaaattgtcagccatatacccacctgagttccgctatttgcaattgagaaatcccaaatatcaagattttttaaagaagaggtcatctatctctaaggaaataagaaactccttcaacaatttggattttacggaggtcgagaccccaatgttatttaaagctaccccagaaggcgcaagagagtttctggttccaacaaggacaaagagatccgatggtaaaccatcgttttatgctctagatcagagccctcaacaatacaagcaactcttaatggctagtggcgtcaacaaatattattcaatg

SEQ ID NO: 81490 - DNA, 774 bp, Saccharomyces pastorianus
atgacctacgaacaagccatgacttcatatggtattgacaagccagatttgagagcgccagatttgaagattatcaatttaggcgagttcaatgcctttagtcatttgaacaaaaaattccccgtttttgaagtaattattctaagaaatgccttttcaaatatggaagagtacaaagaacgatggtcgtttctgacaaataacagtaattacaattatagagttccaatagtgcttccaattgaaaatgacgaacaagctaattcaaattggtttgagaattttcatgcaattgccacgtttgaaaacccacatttaataaccaaatttctgaaattgaaaaaaggtgacattgtatgcggttgtacgagagagccaaaccattccattttcgagaatcctactcccctgggaagattgagacagttggtgctacaaagtgagcatgggaaaaatatctatcatgctgtcaataaggacgttgcctcatggattgtggatttcccgttattttctcccgttataattgaagataagtctggtaagaaagaaaagcttgcatatccggagtacgaaaaggatagattatgttccacgcatcatccttttactatggtgaagcttaaagactacgaaaaactagaaaagacgccggaaaagtgcttgggtcagcattatgacctcgtagttaacggtgtggaacttggtggtggctcaacaagaattcacgatccaagattacagactatattttcgaagatatcctcaaaatag

SEQ ID NO: 81491 - DNA, 606 bp, Saccharomyces pastorianus
atgctaacgaactacttaggtgaagaaggagataactgtccattaaatgctgcagtcgctctctcaaacccatgggatttcgtacacacttgggacaagttggctcatgattggtggtccaaccatattttttctagaactttaacacaatttctaacaaggactgtcaaggttaatatgaatgagttgcaggtaccagagaattttgaggtttcgcacaaaccgacagttgagaaaccagtcttttatacgtataccagagaaaatttggaaaaggctgaaaaatttacagacatattagaattcgataatcttttcactgccccatcgatgggcctgccggacgggttaacatattatagaaaggccagttcgataaatagattgcctaatatcaaaatcccaactttaataatcaacgcaacggatgatccagttacaggtgaaaacgtaattccgtacaaacaagctagagaaaatccttgtgtgttgttatgcgagactgacttgggtggacatttggcttatctcgacaatgaaaataattcctggttaacaaagcaagctgccgagttcttgggtagctttgatgagttagttttataa

SEQ ID NO: 81492 - DNA, 609 bp, Saccharomyces pastorianus
atgtttcgctcgggttactatccaactgtcactcctagccattggggctataacggcaccgtcaaacatgtactgggagagaaaggaaccaagtctttggctttcagagattctaagcgccaaattcctcttcatgaattcgtaaccaaacacgtgcctacactcaaagatggtgcaaattttaggttaaacagcttgcttttcacaggttacttacagaccctttatttgtcagccggtgatttttccctaaaatgtcaggtattttatggaagagagattataaaattttctgatggaggggtctgcacttcagattgggttatgcctgaatgggagcaaacatattcattaaatgctgcaaaggctagttttaacgagaaacaattttcgaacgatgaaaaggccacccatccaaagggttggcctcgttttcacccaagaactagatatctatcctctgaggaacttgataaatgtcattctaagggttattcttaccctttagtggtagtacttcatggtcttgcagggggaagccatgagcctctcatcagggcattatctgaagatctatcaaaagtcggtgacggtaaatccaagtggtag

SEQ ID NO: 81493 - DNA, 372 bp, Saccharomyces pastorianus
atgtccgtagatgacaaactagattacgagaacgtccccagcgtaattttctcacatcctgaagccggttccattggtatttctgagaaggaagccattgaaaagtacggtaaggagaatataaaggtctacaattccaaatttaccgccatgtactatgctatgttgagtgaaaaatcacccacaagatataaaattgtttgtgcgggaccaaatgaaaaggttgtcggtctgcacattgttggtgattcctctgcagaaatcttgcaagggttcggtgttgctataaagatgggtgccactaaggctgatttcgataattgtgttgctattcatccgactagcgcagaagaattggttactatgagatga

SEQ ID NO: 81494 - DNA, 963 bp, Saccharomyces pastorianus
atgctttctgcaaccaaacaaacatttagaaaactacagataagaactatgtccacgaacaccaagcattacgattacctcgtcatcgggggtggctcagggggtgttgcttccgcaagaagagctgcatcttatggtgcgaagacattactagttgaagctaaggctcttggtggtacctgtgttaacgtaagttgtgttccgaagaaagtcatgtggtatgcttctgacctcgctactagagtatcccatgcaaatgaatatggattatatcagaatcttccattagataaagagcacttgacttttaattggccagaatttaagcagaaaagggatgcttatgtccataggttgaacggtatataccagaagaatttagaaaaagaaaaagtggatgttgtatttggatgggctagattcaataaggacggtaatgttgaagttcagaaaagggataatactactgaagtttactccgctaaccatattttagttgcgaccggtggaaaggctattttccccgaaaacattccaggtttcgaattaggtactgattctgatgggttctttagattggaagaacaacctaagaaagttgttgttgttggtgctggttatattggtattgagctagcaggtgtgttccatgggctggaatccgaaacgcacttggtagttagaggtgaaactgtcttgagaaaatttgatgaatgcatccagaacactattactgaccattacgtaaaggaaggcatcaacgttcataaactatccaaaattgttaaggtggagaaaaatgtagaaactaacaaactgaaaatacatatgaatgactcaaagtccatcgatgacgttgacgaattaattttggacatattggagcgtaaatctccattctatggtagtgggttttcagaaatatgtatggtagtaaagtctgaacgtctccatgatccataa

SEQ ID NO: 81495 - DNA, 126 bp, Saccharomyces pastorianus
atgtacgacttgagaagacgtaaagcagttgaaaacgaagaacgtgaactgcaagagaatcctacgtccttttacaatagaccctctgtttttgatgaaaatatgtactccaaatacagcagttag

SEQ ID NO: 81496 - DNA, 1278 bp, Saccharomyces pastorianus
atggatttcacttggtatgacgcagaatactcatcggcccagaaaggattgaaatacacgcaacatacgttagcatttgaaaagtcttgtactttgttcaacattgctgtaatctttacccaaattgcgagggagaaaatcaatgaggactacaaaaactcaatcgcaaatttgacaaaagctttttcctgttttgaatatctatcagaaaattttttgaactcaccttcagtcgatcttcagtcagaaaacactaggtttctggctaatatttgccatgcagaagctcaagaattgtttgtcttgaaattattaaatgatcaaatatcatccaagcaatatacattaatcagtaaactttctagagccacgtgtaacctctttcagaaatgtcacgattttatgaaagaaatagatgacgatgtggccatttatggtgaacccaaatggaaaacgacagttacttgcaaactgcatttctacaaatcgttaagcgcttattatcacggtttacaccttgaagaagaaaatagagttggcgaagcaattgcttttctcgatttttctatgcaacaattgatttcatcccttccattcaaaacgtggttagtggaatttatagactttgatgggtttaaagaaactttagaaaagaaacaaaaggagttgattaaagataacgattttatatatcatgaaagcgttccagccgttgtgcaggttgattccattaaggcgctcgatgcaataaaatctccaacatgggagaagatattagaaccatatatgcaagatgttgcaaataaatgtgactctttgtacagaggaattattcccctagatgtctatgaaaaggaaagtatttactcagaagaaaaagcgacgctgttgagaaagcaagttgaagaaactgagacagcaaatttggaatattcttccttcatcgaatttacaaatctacccaggctcttgagtgatttggaaaaacaatttagtgacggaaatattttctcgaatacggatacacagggacaattgatgagagaccaaattcagacatggtgtaaatttatccaaacaaatgaatttagggatatagaagaacagatgaacaaaattgttttcaaaaggaaacaaattttagaaatcctttctgccttacccaatgatcaaaaagagaatgttacaaaactaaaatcttctttagtagctgcttcaaactcagacgaaaaattgttcgcatgcgtaaaaccacatatgtcgagatcaatctattga

SEQ ID NO: 81497 - DNA, 408 bp, Saccharomyces pastorianus
atgaatgatctacaggcaatggacagagcacatagaattggtcagaaaaaggttgttaatgtttacagaattattacgaaaggtacgcttgaagaaaaaatcatgggtttgcagaaattcaaaatgaatatagcctctacagttgttaatcagcaaaacagtggattagcatccatggatacacatcagctgcttgatctcttcgaccccgataacgttacctcacaggacaatgaggaaaagaataatggcgattcccaagcagccaagggcatggaagatattgccaacgagactggtttaactggcaaagccaaagaggcccttggtgaattgaaagagctatgggacccatctcaatacgaggaggagtataatttagacaccttcatcaaaactttacgataa

SEQ ID NO: 81498 - DNA, 156 bp, Saccharomyces pastorianus
atggtcagattggactctgagaagcacattgactttgctccaacatctccattcggtggtgctagaccaggcagagttgctagaagaaatgctgcaaggaaggcggaagcttctggtgaagctgctgatgaagctgatgaggccgatgaagaataa

SEQ ID NO: 81499 - DNA, 444 bp, Saccharomyces pastorianus
atgttccaacgtgacttcagaaagcatggtgccgttcacatgtccacctacttgaagatctacaaggttggtgacattgtcgacatcaaagccaatggttctatccaaaagggtatgccacacaagttctaccaaggtaagaccggtgtcgtctacaacgttaccaagtcttctgttggtgttatcatcaacaagatggtcggtaacagatacttggaaaagagattgaacttgagagttgaacacatcaagcactccaaatgtagacaagaatttctggaaagagttaaggccaatgctgctaagcgtgctgaagccaaggctcaaggtgttgccgtccaattgaagagacaaccagctcaaccaagagaatcccgtattgtttctactgaaggtaacgttcctcaaactttggctccagttgcatacgaaactttcatctaa

SEQ ID NO: 81500 - DNA, 276 bp, Saccharomyces pastorianus
atgcaattaaggcaagcacatagtaaactacttcaagtcttgagggaccgcaatgctaaaatagaagaggaacaacgtcgtgaagtggcggtcgcaaccgctgctgccatgatgactagaacgccatcaccaacaggaaaatccgtcggagatgaagctacaagcaacaacatgcatagtagcagcgcaattagaaatccaaatggaccaaccgttgatcctgaagaaggaaagtacattcaagagctggtgaacactataagggaattacaatag

SEQ ID NO: 81501 - DNA, 180 bp, Saccharomyces pastorianus
atgaaagatctccagagaaaaagctcagtacgaaggcaaatcacgaatgaagacgatgaacggtatggggaggacagcatccatgagctacccaggacaataccacatgtaaatccctatataagaaatacaggattcaggccatcttattcatcccaaattacttcgacaatgagtcta

SEQ ID NO: 81502 - DNA, 120 bp, Saccharomyces pastorianus
gttagctataacggagttgccaaattccggagttatagcgtagatataccgctacagacacattacagactggaagtacggcctataatcgacagacaagactattgtggagagaaatag

SEQ ID NO: 81503 - DNA, 285 bp, Saccharomyces pastorianus
atggattatattgaaacggaatgtgatcgtggcataaaactcggcaggtttactaatcctcaacaaccgagggaggatatacggaagattttagtaggggacctagaaaagttcaggataaataacggtctgactctgaattctctatcattgtactttagaaatttaacgaaaaataacaaggaaatttgtatttttgaaaactttaaaaattggaacgttagatcaatgacagaagaagagaaattaaagtattgcaaaaggcaacataatacaccatcttaa

SEQ ID NO: 81504 - DNA, 2007 bp, Saccharomyces pastorianus
atgtcagaaacttttcaagggacaaataacaggataaaacgtaatgtcaggacacaaagtgtgccatcaacttcctataataatggcaaagaatcatatggaccaaatactaaccaattaaatgccctactttctcaattggaacagcaaacaagtgttgatagtaccagcacgagctcaaacttttattccattgcacaatatattttacaatcatacttcaaggtcaatgtagattctctaaactctctgaaattggtggatttgatagtggaccaaacttaccctgattctttgacgctgcgaaagctgaatgaaggagcaacgggacaaccatacgattatttcaatacagtttctcgtgatgctgatatctccaagtgtccaatttttgcgttggccatattttttgttatacgatggagccacccaaaccctccaatttcaattgaaaattttactacagtaccgttgctagattcaaactttatttctctaaattccaatcctttactatatattcaaaatcaaaacccaaacagcaattcaagtgttaaagtttcaaggtcacaaacgtttgaaccttccaaagagttgatcgatttggtatttccatggctgtcttatttgaagcgggatatgcttcttattgataggacgaattacaagctttattctctctgtgaactatttgaatttatgggcagggttgccattcaggatctccgatatctgagtcaacatcccttattactacccaatatcgtaacattcatttcaaaatttattcctgagttattccaaaacgaagagtttaaaggaatcggttcaattaaaaattcaaacaataatgccctgaacaatgttacaggaatagaaacccaatttttaaatccatctaccgaggaagtgagtcaaaaagttgattcttactttatggaattatcaaaaaaattaactacagaaaatatcaggttaagtcaagaaataacacaactaaaagcagatatgaactcagtaggcaatgtttgtaaccaaattttgcagttgcagagacaattgctttcaggaaatcaggcgatcggatcaaagtccgaaaatattgtgtcttccacaggtggggggatattaatactagataaaaatagcatcaattcgaacgtactgagtaatttggttcagtcgatagatcctaatcactccaagcccaacggacaagcccaaacacatcaaaggggtccgaaaggacaatcacatgcacaggttcaaagtactaatagccctgcgctagcgccaattaacatgttcccgagcttaagtaattctatacagccgatgcttggcaccttggctccgcaaccgcaagatatagtacagaagaggaagctaccgttaccaggttcaatagcctctgcagcaacaggcagtcctttttctccatcacccgttggtgagtctccctatagcaaacgctttaaactagacgataaaccaactccgtctcagacggctcttgattccttacttacaaaatccatttcaagccctagattacccctttcgacgttggctaacacagctgtcacggaatcttttcgctcacctcagcagtttcagcattctccagattttgtagttggtggtagctcaagttcaataacggaaaataactctaagaaggtaaatgaagattctccatcatcttcttcaaaactagctgaacgacctcgtcttccaaacaacgactccactactagcatgcctgaaagtcccaccgaggtagctggtgatgatgttgatagggagaaaccgccagagtcaagtaagtcggagcccaatgataacagcccagaatcgaaagatcctgagaaaaatggtaaaaacagtaatccgcttggtacggatgctgacaaaccagtaccaatttctaatattcataattctactgaggctgcaaattcaagtggtacagtgacaaagacagctccatcatttccgcagagttct

SEQ ID NO: 81505 - DNA, 861 bp, Saccharomyces pastorianus
atgaatttgcccaaagaccagctggccatagtttcgcaaattgttgagctcttgcataattccagccttttaatcgacgatatagaagataatgctcccttgagaaggggacagaccacttctcacttaatcttcggtgtaccctccactataaacaccgcaaattatatgtatttcagagccatgcaacttgtatcgcagctaaccacaaaagagcctttgtatcataatttgattacgattttcaacgaagaattgatcaatctacataggggacaaggcttggatatatactggagagactttctgcctgaaatcatacctactcaggagatgtatttgaatatggttatgaataaaacaggcggccttttcagattaacgttgagactcatggaagcgctgtctccttcctcacaccacggccattcgttggttcctttcataaatcttctgggtattatttatcagattagagatgattacttgaatttgaaagatttccaaatgtccagcgaaaaaggctttgctgaggacattacagaggggaagttatcttttcccatcgtccacgcccttaacttcactaaaacgaaaggtcaaactgagcaacacaatgaaattctaagaattctcctgttgaggacaagtgataaagatataaaactaaagctgattcaaatactggaattcgacaccaattcattggcctacaccaaaaattttattaatcaattagtgaatatgataaaaaatgataatgaaaataagtatttacctgatttggcttcgcattccgacaccgccaccaatttacatgacgaattgttatatataatagaccacttatccgaattgtga

SEQ ID NO: 81506 - DNA, 351 bp, Saccharomyces pastorianus
atgctagctgagaggaaacctccatttagccaccccagtcacagcggcactgcctaccacaatgacatcatccatgagatagcgaatttgcattctattaacctggtagatttgattaatttggaagtatataataacaattgccatacaaacaacacagcgttgcaaactacggcgaattcgctgacacttaatagcattatcaaaaagcttgacaagccaatactgaaagaaagaaataattctctggtatggccccataaaagcagatttaaagcaaaaaggaaccaaccttcgcctggccaatctttaattaacaatacagatataactctctacaacgatgtatag

SEQ ID NO: 81507 - DNA, 429 bp, Saccharomyces pastorianus
atgaactacatcgatatcggtaagaaagaaggcgccaagatcttaactggtggcgaaaaagttggtgacaagggttacttcatcagaccaaccgttttctacgatgttaatgaagacatgagaattgttaaggaagaaatttttggaccagttgtcactgtcgcaaagttcaagactttagaagaaggtgtcgaaatggctaacagctctgaattcggtctaggttctggtatcgaaacagaatctttgagcacaggtttgaaggtggccaagatgttgaaggccggtaccgtctggatcaacacatacaacgattttgactccagagttccattcggtggtgttaagcaatctggttacggtagagaaatgggtgaagaagtctaccatgcatacactgaagtaaaagctgtcagaattaagttgtaa

SEQ ID NO: 81508 - DNA, 708 bp, Saccharomyces pastorianus
atgactaagctacactttgacactgctgaaccagtcaagatcacacttccaaatggtttgacatacgagcaaccaaccggtctattcattaacaacaagtttatgaaagctcaagacggtaagacctatcccgtcgaagatccttccactgaaaacaccgtttgtgaggtctcttctgccaccactgaagatgttgaatatgctatcgaatgtgccgaccgtgctttccacgacactgaatgggctacccaagacccaagagaaagaggccgtctactaagtaagttggctgatgaattggaaagccaaattgacttggtttcttccattgaagctttggacaatggtaaaactttggccttagcccgtggggatgttaccattgcaatcaactgtctaagagatgctgctgcctatgccgacaaagtcaacggtagaacaatcaacaccggtgacggctacatgaacttcaccaccttagagccaatcggtgtctgtggtcaaattattccatggaactttccaataatgatgttggcttggaagatcgccccagcattggccatgggtaacgtctgtatcttgaaacccgctgctgtcacacctttaaatgccctatactttgcttctttatgtaagaaggttggtattccagctggtgtcgtcaacatcgttccaggtcctggtagaactgttggtgctgcttga

SEQ ID NO: 81509 - DNA, 813 bp, Saccharomyces pastorianus
atgccctcggcgggcatcatgaccgccatgaacccttacatgcccatgaatcgctacataatgtcaccatattataatccgtacggtatccctccacctcacatgctgaacaagcccataatgacaccctacgtgtcgtatccatatccaatgggaccgcggacctccattccttatgctatgcaaggtggcaacgctaggccctacgaagaaaatgaatatagtgctagcagttacagaaacaagagggttaacgactcatatgattcgcctttgagtggcaccgcttccactgggaaaaccagacgatccgaggaaggctcaagaaattctagcgtaggatcaagtgcgaatgccaatcctacgcaacagcgcgcggatctacgcccagcagatatgatacctgctgaagaataccactttgaacgggatgcattactctcggccaacgcgaaagctagaagcgcaagcacaagcacaagtacaagcacaagcacaaaccgggacaggagttcatggcatgaggcagaacccaatgaagacgaagaagagggtacggacttggccatcgaggacggagcggtccccactcccacttttactacgttccagcggacctcgcagccgcagcagcaattacctagtcttcttcaaggcgaaatccgactctcatcgcatatttttgccttcgagttccccctgagctctagcaatgtagacaagaaaatgtttatgagcatatgtaataaagtatggaatgaatcaaaggagctgacaaaaaaatcatcatcacaccacagaaccggaaaatag

SEQ ID NO: 81510 - DNA, 513 bp, Saccharomyces pastorianus
atggccgtatcagcccgtttgagaacgactgccgaggatacatccattgctaaatcaacacaagatccaattggtgatacagaaatcagtgtagcaaatgctaagggcagcagcgatagcaacattaagaattcgccagacggaaacagcgttggtcaggagtcggagctagagcatgtccctgaggaggatgactctggtgacaaggaagcagatcatgaggattctgagacagccactgcgaagaagaggaaagcccaaccattgaagaatccgaagaaatcattgaagaggggtagagtcccggcgcctttgaatttatcggatagcaacactaatacacacggtggtaatattaaggacggcaacttggcttcgtctaactctgcacattttcctcctgttgctaatcaaaacgtgaaaagcgcgcccgcacaagttactcagcattcaagttccagccccgtgtacaatacttgggaaaggccagttctagacaatctatacaagtga

SEQ ID NO: 81511 - DNA, 1983 bp, Saccharomyces pastorianus
atgggacttctgtacgagaacaaagataaaaaatataatttattgacaaaaaaccactggagttgcaatgatgactccatcattttactggatgttgatcatgtctatcaagtaagcacctcgaacggggcactattgaagttaatcacagattcgtcgtggcacaaggtaacgatctcatctagaggatttatttgcctttataatatgaaggacaataaactgcagattttcagagatccagcaagaatactaatggaacacaacttggattctacaccagatgatatatgttggtgtggcaatgataccgttgcttgttctttcgaggacgaaatcaaattatacggcccagatggtttgtatgtaacattttggtacccttttactgtaactaacctaagggcagaggttgatgggttgaaggttattaccactgaaaagatttactttctatccagggtacaacctcagacttctaatatatttagaattggctcaactgagcctggtgcaatgcttgttgactcatttagtttactggaggatcatgcacccaaagcaattgaaatattaaagaattttgtcctagagaagggtgtactggactgtattgctgctgcaatagacgaatttgaacctaaactacagaagatgttgttgaacgctgcatcttatggaaaagcttctttgcagtacaagtcatttgacgctagtatatttgtgaatgcgtgtaatacgataatattattaaactgcttcagaagttttggtatttttttgactgtggaggaatacaggtgtatttctttgaaaggtgtcattgataggctgttgacgtatcacagatattatgagtgcatacagatatgcaaattggccaatgaacgatttctgttaggatacgtgtttactgagtgggcaaaggataaaatcaagggtagtcctgacatggaagatgatgagttactagagaaaatcaaatctcgactaagtgttatagatatgacggatacattacaaatggtagcagttgcgaaagttgcatatcttgaaggaaggttccagttatcccgtaatttagctttattagagaaaaacgaagaagctagaattgagcaactgtataatcttgatgatgatagtatagcgctaaaggagtgtatcaaagtacaaaattacagtctgacaatttcattactgattgcactttccaaaaagctgacaaactctcaactgacgaagcttttgatcattgatatgttcaacaatcccttatatctctattatatgagaatggataaagcatacttgtacgatttttaccgccaaactgacagatttattgacttggctcacgtattactgcagcagggaaaagaacagcaatctttacacagctttttaccgcaaattaaggacctttatagccaagttcaaaacagtgaagtggtcaacaatacaatagaacaacttcaaagacaggaaaagttgtggatataccaagaatcattaggcaaaagatttgctatatcattcactaatatgactttagatcaaacgctttcgaagttaatagaaacagggcaagataaacaggtgaaagaaatagttaaaaagttcaaaataagcgaaaaaaagctgtatcacctgaaatgtaaaacgttagtcgaagctaagaagtttgacgaactactacagtttgctcagtcgcggaaatcaccaattggttacatgcctttctacacatacttaaaaagcagaggccatatggataaagctagtccttatgttaatatgatacctggcctttcgtatcaggaaaagaaaaagctttatgtggagtgcaggggttttcgtgatgcaattcaactagcaggaaaggaaaaagacattccaggcttaaaggagatatataatattataccacctaatgagccggaattaaaggcattagcaaatgaaactatgagcaggatatag

SEQ ID NO: 81512 - DNA, 390 bp, Saccharomyces pastorianus
  modified_base (332)..(332): a, c, g, t, unknown, or other
atgaaaaaccctagcttcgactgggaaagattgaaagacgtattttatagaagcagagccattggcgaattaaaatggccaactcagtacgaggagttcaaatgtgccttgtcattaactgttatcgcggttgaaattcaagactttatacaagtatacaattattttgggcagctgttaggcaagataaatttgcaaagaattcatgaggatataataaagtttgagttcgataaagacgagaagctgatattggtcacgaaaagctccatcaaaattgtgaaaggttggtcgccactgacgatagaaagtgtcccattacaggacccaancattgatactatctgggactatcacaatggaatcatgttgctagcaaaatctcgtgat

SEQ ID NO: 81513 - DNA, 483 bp, Saccharomyces pastorianus
atggtccaagaagtatggaagtatataccagaaggatggttacaaggacaagaacatatagacattaatccgatgcgtggaaaatggccgtttttggactcaaatacggaaatcgtcacctcctttgaaaactttgaactaaaaattctaaaacagttccaggaggaattcaagaggttaagtctagaagaaggtgtcaccaaaacaacacatagtcacgttaccattttcaccaagcatcacctcccattcagttctgacgagctttgcgacatattgcaatcatctgctgttgatatattgcaaatggacgataataataacagtctaccaactattgaattgggaagcggaataaacgttcaaatattggttgaacgaagcaaaaggcacaactgtcccagatgttggaaggccaactcagccgaagaggataaattgtgtgacagatgtaaagaagctgtggatcatctcatgtcttga

SEQ ID NO: 81514 - DNA, 537 bp, Saccharomyces pastorianus
atgaattcagaaattttggcacatgccatagaaaaaatcaaacaaaaaggaattaatgcatggtttgacgataaagataatgacatgaaagaatggttgccagaaaaatatcacgacgtagcgcatgaatactgtcgttctcaagatactatggatgtgtggtttgatagtgggtcgtcatggagagtgatcaaagacttttatgaaaaaagcttaaagttgtcaaaactcccatcccccctgtaccaagtttgtctagaaggatctgatcaacatagaggatggtttcaaagttcactgctaacaaaagtagcatcaagtaatgtccctgttgcaccatatgaagaagtgattactcatggttttaccctagatgagaatggtctgaaaatgtcaaaatctgtgggaaatacaatttctcccgaagcaataattcgaggcgatgaaaacttaggcttaccagctttgggtgttgatggcttgaggtatctgatagcacaatcgaatttcacaactgatatagttgctggcccgaca

SEQ ID NO: 81515 - DNA, 567 bp, Saccharomyces pastorianus
atgctttaccttcaaaatttagaaataattcctacagtgctcattaacaacatgcaggagggaatcgaatcgactcttctcaaagaagacaaatttttgagacttgatgaagagtctttaaatgaattcgagaaaatcgtgaggtataatttacaaagtgtaatattgataactaagttctgcttgagtaacatttttccaaaggttcaagctgaagctcaagaaaaagcaaaggggttctatattgtcaacatatcatcggtattgacgttaaaaccgtgcaaatcaggaacacattttattacatcgaaatgtggtataaactctttccacgatggaataacctcagagcttaaattgaaagatagtaatttgaatgtaaaaacgctgattgcatatttacccagttttgaaagtgaagcacgttggaagagactttccccgagtatctcgaaacatctcgtccactgtctacttgagggaagatatggtgatacaattctcgaaagcaaaagatcaattggtgatattcttttgataactggtttcaaaagctcttttacttaa

SEQ ID NO: 81516 - DNA, 909 bp, Saccharomyces pastorianus
atgaacagatttaagcagttagaaaagcttggcaatggtacgtatgccacagtgtacaagggactgaacaaaaccacaggggtatatgttgccctgaaagaggtaaaactggattcagaggaaggtacaccctctacggccatccgtgagatctccctaatgaaagaattgaaacatgagaacattgttagactttatgacgttattcacacagagaacaagttgactttggtttttgaattcatggacaacgatttaaagaaatacatggattcccgcaccgtgggcaacacaccaagagggctagaactaaacttggttaaatacttccagtggcaactactgcaagggctggccttttgccatgaaaacaagattctccaccgtgatttaaaacctcaaaacctattaatcaacaagagaggccagttgaaattgggtgatttcggtctggcccgtgctttcggtattccggtcaacacattttcaagcgaagtcgtaacgttgtggtaccgtgctcctgatgtgctaatgggttctaggacgtactccacatccattgatatatggtcatgtgggtgcattcttgcggaaatgataacgggtaagcctttgtttcctggcaccaacgacgaagaacaactgaaattgatcttcgacaccatgggcactcctaatgagtccttatggcccagtgtaacaaagttacccaaatacaacccaaatatccagcaacgaccaccaagagacctacgtcaagtattgcaaccacacaccaaagaaccgctagacgggaatctcatggatttcttacacggactcttgcaacttaatccggatatgaggctgagcgccaagcaggctctgcatcacccttggtttgcagagtactaccaccacgcttcataa

SEQ ID NO: 81517 - DNA, 1611 bp, Saccharomyces pastorianus
atgatgacgaatacagatgatacagatggcgctcacaacgttgacataacaaatccagcagagtggtttccggaggcaagaaagattagaagacatataatcatgcacattgggcccacgaattcaggcaaaacttatagagcgttacagaaattgaaatccgtggaccgtgggtactacgcagggccgttaagactgctagcaagggaagtgtacgatagatttcatgcagaaaagataagatgcaatttactgactggagaggaagttattcgtgatttggatgatagaggaaattcagcagggctgacatcaggcacagtagaaatggtgctaataaatcaaaaatttgacgttgttgttcttgatgaaattcagatgatgtctgatggggatcgtggctgggcttggacgaacgcgcttttaggtgtcgtttccaaggaggtccatctttgtggtgaaaagagtgttctacctttggttaagagcattgttaaaatgactggcgataaattaacgattaacgaatatgagaggttaggaaagttaagtgttgaagaaaaacctatcaaagatggcatcaaaggtttgcgcaaaggagattgcgtcgttgcgttttcaaagaagaaaatattggatctcaagctaaagatagagaaagacaccaatttgaaagttgctgtaatttatggctctttgccgcctgaaacacgtgttcaacaagccgccctattcaacaatggagagtatgacataatggtagcatcagacgctattggtatgggtttaaacctgtctattgacagagttgtattcacgacaaatatgaaatataatggtgaagaactaatggaaatgacttcttctcaaatcaaacaaataggtggtcgtgcgggaaggttcaaatctagatctgcctccgggggtgttcctcagggttttatcaccagtttcgaatcaaaagttttgaaaagtgtaagaaaagctattgaagcacctgtggagtatttaaaaactgcggttacatggcccacagatgaaatatgtgctcaactaatgacacaattcccaccaggaacgccgaccagtgtcctgctgcagactatttcagatgagctagagaaaagttctgacaacctgttcacgttatctgatttaaagagcaaactgaaagttattggcttattcgagcacatggaagatatcccatttttcgacaagctgaaactaagcaatgcgcccgtgaaggacatgcctatggtcacaaaggcgttcaccaaattttgcgaaacaatagcaaaaaggcatacaagaggtctactgtcataccgattaccttttaacctactggactacaattgcataccgaatgagagttattcattagaggtttatgagtcactgtacaacatcattactctatacttctggctcagcaacaggtacccaaactacttcattgacatggaatctgctaaagatttgaagtatttctgtgagatgattattttcgagaaacttgatcgattaaagaagaatccttacgcacataagccctttggttctacaagaggtcacctctcatcttcgagaagaagattgcgtacataa

SEQ ID NO: 81518 - DNA, 132 bp, Saccharomyces pastorianus
ttgggttgttctggtgctagagtggttgttacactgctatccatcttacagcaagaaggaggtaagatcggtgttgccgccatttgtaatggtggtggtggtgcttcctctattgtcattgaaaagatatga

SEQ ID NO: 81519 - DNA, 816 bp, Saccharomyces pastorianus
atgtctcagaacgtttacattgtatcgactgccagaaccccaattggttcattccagggttctctatcctccaagacagcagtggaattgggtgctgttgctttaaaaggcgccttggctaaggttccagaattggatgcatccaaggattttgacgaaattatttttggtaacgttctttctgccaatttgggccaagctccggccagacaagttgctttggctgccggtttgagtaatcatatcgttgcaagcacagttaacaaggtctgtgcatccgctatgaaggcaatcattttgggtgctcaatccatcaaatgtggtaatgctgatgttgtcgtggctggtggttgtgaatctatgactaacgcaccatactacatgccagcagcccgtgcgggtgccaaatttggccaaactgttcttgttgatggtgtcgaaagagatgggttgaacgatgcgtacgatggtctagccatgggtgtacacgcagaaaagtgtgcccgtgattgggatattaccagagaacaacaagacaattttgccatcgaatcctaccaaaaatctcaaaaatctcaaaaggaaggtaaatttgacaatgaaattgtacctgttaccattaagggatttagaggtaagcctgatactcaagtcacgaaggacgaggaacctgctagattacacgttgaaaaattgagatctgcaaggactgttttccaaaaagaaaacggtactgttactgccgctaacgcttctccaatcaacgatggtgctgcagccgtcatcttggtttccgaaaaagttttgaaggaaaag

SEQ ID NO: 81520 - DNA, 432 bp, Saccharomyces pastorianus
atgacgcatattataaggaatgaaaacctatttttgagcgatttatcacatttttctgcagaccaagaacaacaacaacaacagcaagtccaagaacaagaacaggaacaaaaacaaggacaaatacaaaagcaggaacaagaacaacagcagcaagaggaggaagatgctgaaccggagagtgatattccatcaacgtataatagtgacggaagtatggaaaagtatgaatacactaacaaccacaataatagtacctttttaacttcctcaatggacagtacaccttaccaatctgatatcgatgacgttagtgcttccaaagattgcaaattccaacaagatacattaagaaataggctattatgcttacaaatgaatttttctactttaacagacggtccaaacgagaaatggttaccaaattattga

SEQ ID NO: 81521 - DNA, 1086 bp, Saccharomyces pastorianus
atgctgtcagactgcttgctgaacaatttcagaataacggctcaaatagggtcgggtgcgtacgggctagtgttccatgtggtggatatactgacgagccgtgaatatgcagtgaaaacggtcttcaaatcttcctcgatggatgagttttataataagaacggtttgaacaacaactctcaagtggcgcgaaccactcttctgcaaacgcaactgtatcattttttcaaaagtttccaaaaaaaattgttcttaccttccgttgatctagactcgatattacagttgactgagaatgaactaaataggctaccacactacagggagattgccttccaactaagagtgcagtctcacggcaatatcgtgaagattcaccaagttttagaatcttctattgccacttttatagtgatggattattacgacagggaccttttcacctcgatagttgacgataagcattttgtaaatgatggtattttgattaagaaagtttttctgcagctttgctccgcattagatcactgtcatcgtctcggtatatatcattgtgatatcaaacctgaaaatgtcctactggatcgcaatgacaacgcttatctttgtgatttcgggctttccactaaatctaaatatctagctccaaatgtgtgcgttggcagttcatattatatggctccagaaagaatattgtattgtttgaataccaccaccaacggcatacacgtcgacgaatgctgttcgagcctccctacggatacaggagatatatggtctctaggcatcatcctaattaatttaacttgcataagaaacccatggttaaaagctcaccagaaggaggataacacatttcatcattttgctaacgataataatgtcctgaagaaaatccttcctatatcagatgagctgttcacagtgtcgacgaaaattctacaactaaatccatacacaagaatagacatgaaaactttgatgtccgaagtttcctctcttacttctttcaccagggaagggcccttgtctcaagttccaatccctatcgagcgaagtttacatgacgcatattataaggaatga

SEQ ID NO: 81522 - DNA, 99 bp, Saccharomyces pastorianus
atggtcggaacaaaagggcagtatacagggccggcagtaccttctgttcctaccacaaaccttaacgatatcggtgaccctactaaaactgtgcaatag

SEQ ID NO: 81523 - DNA, 1017 bp, Saccharomyces pastorianus
atgctttccaagttgattagagagaatgcaagtctgtcccatcactttgaaacgaatgaagatctttctcactacaaaaatttagctgaaaggaagttgaaactttcaaaattacgaaaatctaataccagaaatgcgggtgggcagcagggattccataatcttactcaggatgtcgtcattgtggatacacgtgagtttaatgcctcattaccaggcttactctaccgatatggcataagggttattccttgtatgttgacagtcggcgattatgtgataactcctgatatttgtctcgaaagaaaatcgatttctgacttaattgggtcattacagaataacagattagccaaccaatgtaaaaaaatgttaaaatactatgcatatccgacactattgattgagtttgatgaaggacagtcgttttctttagaaccttttagtgaacgtagaaattataagaataaagacatatcaactgttcatcctatatcaagcaagttatcccaggatgaaattcagctaaaactagccaaattagtattgcggtttcccactttaaagattatatggtcttcctcacccctgcaaactgtaaatataatcctagagttgaaattaggacgtgagcaacctgaccctagtaatgcagttatattgggaacgaataaaattagatcggattttaatagcactgcaaagggcctgaaggatggtgataacgagtctaaattcaagagactgttgaatgttcctggagtgtcaaaaattgattatttcaatctccgcaaaaagatcaagagcttcaataagcttcaaaagctctcatggaatgagattaatgaatttattaatgacgaggatttgacggatagaatatactacttcttgagaacagaaaaagaagaacaagaacaagagtcaacagatgaaaatcttgaatctcctggtaagaccactgatgataacgctttacatgatcatcataatgatgttcctgaagcacctgtgtaa

SEQ ID NO: 81524 - DNA, 1305 bp, Saccharomyces pastorianus
atgtctcagatacagtttggcttgatggaatgtttgaaaaaatgtattgctgagttaagcagaaaaaatcctgaactagctctggactggtggaatatggaaaatgtcctggatataaactttatcaggtcaattgactcggtgatggtgccgaactggcaccggatttcttatgaatcaaaacaactggttaaggatataagattcctacgccaccttttaaagatactcgtaacttcagacgcagttgacttttttggagagattcaattaagtttggatgccaataaaccgtcagtatcccgaaaatacagcgaatcaccgtggctattggtcgatgaggcacaattagtcatatcgtatgcgaagaaaagaatattttacaaaaatgaatatactttagaagaaaatccaaaatgggaacaacttattcatatattacatgatatttcacatgagagaatgaccaatcaccttcaggggcctactttagttgcctgttccgacaatcttacatgtttagaactagcaaaggtcttgaatgcctcaaacagaaaaagaggagtacgtcaagtgcttctgaataaattgaaatggtacagaaaacagagggaggaaacgaaaaaattggtcaaagaagtgcaaagtcaggacacttttccagagaatgcaacattaaatgtaagctcgacattttccaaagaacaagtgaccacgaaaagaagaaggacaagaggtgcttcacaagttgcggccgttgaaaagctaaggaatgcaggtaccaatgtagatatggaggtggtttttgaggatcataagttatctgaagaaattaagaagggaagcggtgatgatttggatgacggtcaggaagaaaatgccgcaaacgattcaaagatttttgaaatacaagaacaggaaaatgaaatccttatcgatgatggggatactgaatttgacaacggagaattagagtatgtgggcgaccttccgcagcacatcacaactcatttcaataaagatttatgggcagaacattgcaacgagtatgaatatgttgatcgtcaggacgaaattttaatctctacgtttaaaagtctcaatgacaattgctcattgcaggagatgatgccctcttacattataatgtttgaaccagatatatcgtttatcaggcagattgaagtttataaggccatagtgaaggatttgcaaccaaaagtatacttcatgtactacggtgaaagtattgacgagcaaagtcattctgactgctatcaagagagaaaaagatgcttacacaaa

SEQ ID NO: 81525 - DNA, 210 bp, Saccharomyces pastorianus
atggaagaaagtaagcatacaataggagaagactttgatttgattcatttagattgtccgcagcaaccaaatggctacgactgtggaatatatgtttgtatgaatactctctatggaagtgcagatgcaccattggattttgattataaagatgcgattaggatgagaagatttattgcccatttgattttaaccgacgctttaaaatag

SEQ ID NO: 81526 - DNA, 987 bp, Saccharomyces pastorianus
atggtgggtgccgggatatccacttcttgcgggataccagacttccgatctccgggaactggcctgtaccataacttggccaggttgaagttgccgtaccctgaagcagtgttcgatgtcgattttttccaatcggatcctttgccattttacactttggctaaagagttgtatcccggaaatttcagaccttccaagtttcactatcttttgaaattgtttcaagacaaagacgttttgaagagagtatatacccagaatatagacactttagaaagacaggccggtgttaaggatgatctgatcatcgaggcccatggcagttttgctcactgtcattgtatcggatgtggtaaagtttatcccccacaggttttcaaatccaagctggcagagcatcctataaaggattttgtcaagtgtgatgtgtgcggtgaactggtaaagccggcaatagttttttttggcgaagatctaccggattccttttcggaaacttggttaaacgattcagagtggcttcgtgaaaaaatcacgacgtctggaaaacatcctcagcagcctcttgtcatcgtcgttggcacctcactagccgtttatccctttgcgtctctgcccgaggaaattcctcgaaaggtaaaaagagttctgtgcaatttggaaacggtgggcgattttaaagctaacaagaggcctacagatttaatagttcatcagtactcggatgagtttgccgagcaactcgttgaagaattaggttggcaagaagatttcgaaaagatacttacggcccaaggtggaatgggggataactctaaagagcaattacttgaaattgtacatgatttagagaatttgagtttggatcaatctgaacatgagagtgcagacaagaaggataagaagctacagcgtctcaatgaccatgacagcgatgaagatggagcaagcaactcctcttcttcacaaaaagccgctaaagaataa

SEQ ID NO: 81527 - DNA, 84 bp, Saccharomyces pastorianus
atgagaggaagagtaaatcaaggtaacaagattggcaaacataataagaaaggtccaaagttcaaatctagaaaaaaattatag

SEQ ID NO: 81528 - DNA, 3306 bp, Saccharomyces pastorianus
  modified_base (2065)..(2125): a, c, g, t, unknown, or other
atggatcaagacaaagttgcttttcttttagagctggaggacaagctggctaaaattcgttcccaagtaaactctaaattggagaatcaaaagcatattgctataatattaactgccgttgaggaaaatattgcaggtcaagctacaaatgatgtttcaaaaaacattgtaaattatatcatttcctttatgtcactattggatcaagcagtagacccatctactcatgaaataaaagatattcaattggcttcctcatctacatatcttctagatctgatatttcattattcgcctaaggtattattaagatcgaagttttctgaaatcctaacgaaaattgccccatgtatcactgcagaaaaggctaatgctcctctaattagagctgctattggttgtttagaatctcttcttattgctcaagatgcacaagcctggaacaatacttatgatctaaacgtcactccaaaaagaggtttgcagggtatacttgaactttcattagatgtaagaccaaaagttagaaagagagcgctagatgcagttcatgcggtcttattgaaccctcctgttgcaccaactgcagagcatgtagcggcagtttttgtagcagatttctgtgacaagcagttagcaggtattttgaatgatctctcgaatttatcaaataaacaattgaaagcacagaaaacaaaggaagacattaacgctagtgtcatgcgctctctaaggttgattacttcagtcgtctctactggacagtggccatcttcacagattgagcctctttgtgatgtactattgggagtcaccaaaagctcagagcaatatctcgtttctgcatcatttgaatgttttgaaagcatgttcaaaacaatggcagaaactaccatttcttctggattggctgaaaataaatacctaagagtcttggataccatttttgcattaaaaccctcaaatgtcgatacgttattaaccaagtcctggattgctgtggtcattaagggtatgtccacttacgcaacacatcaaccactgaaagcgctacgtaaaattcctggtgtatttcacattatgtccacatatttagctagtgaaactccagaagtgtaccaagctgcctctcaatgtcttatctcaatcctttctgagtctgttaaagatgatttgttattgtatacaccaagtgtggatgagaaagttttcaaaaacgtagatgaaatcatctctcaaattgcgaaaacatttatcgacttattatccattagatattcccattgttccagagaaattcttaagattttggtggcagcattcaacaaattcagatatagatctaatcctcactttttaaaatcactgaaaatagtcgatacatggagagtaaatgaagaacagtttatggatttgagaaatgaaatcgaattagtaatcggagcctccatttctgctatgggccctgaagtgatactcgcagaagcacccctgaatttagacaatccatcttccgaaagacctggcagggcttggttgttaccgcttattagagattatacgaaaaatgcgaaccttgcaacttttcaaaacgaattggcaccatacattaaaagttttcaatctaagttcgataaagtcccggaagaatctattcaattgagagtttttcaaactattgttgaccaaatctggtctacacttccacggttttgtgaactcccaatggacttgagggaatccttcactgacgaatttgcctcagaactatcttctttattatacagcgaggttgagttaagaactacaatttgtcatgctttaaaggtattggcagaaagcaatgtttcatatgccgaagactcctcttctcacaacgttttattgttgcaacgtttccccatttctgaagctcaaaagaatatagaatacctttcaaccaaatcaacgaatcttctagcagttttgttcaatgtttatactcaaaccactccaaatgcaaggagttatattttggaaacgattgatcaatatttaaagattacttcaaaggaagatttggagnnnnnnnnnnnnnnnnnnnnnnnnnnnnnnnnnnnnnnnnnnnnnnnnnnnnnnnnnnnnnatgtgaacaaagaaaagaaaaagcctcaattgacagcgacactattggacttaatcatatgtatgataacatacttacctgtctcgtcttattctgctttattctcaatatttagcctcaccgtaaattctgctgacgcgctaattcaaaaaagagcttatagaattattacaaagctttctgagttgaaatcgggatcaacagctgtcgcccaattcatttcggatattgagaatgtcatggtagatagcgcctcctctgttcaaacatctgctaaagctgcaagactaacagcaattaaaaccatagtagaattattacctttagatcatcttgatttcattgttagaaccgtcgctgaggttattttgagtacaaaggatgtgaatgaaaaatctagagagaccgcttttgatactttaatttgtatgggaagaaaaatgaatgagccaaatggtattatcaaattatcccaaataccaggttatgatcctaccactccagatcaatcgtcgtcaatatcagagttttttaagatcatttctgccggtcttattggtgaatctcaacatatggttagtagttcaattacgggttatgcttgtttagtttttgaattcaaaaatgaactcgattccggtatactaatggatatatatgacaccattgaattgtacttaacttctaactctagggaaattgtaaaaagcgccattgggtttaccaaggtttgtgttttggggcttccagaagaactgatgaggccaaaggtgccagagttacttctaaagttattaagatggtctcacgaacacactggtcatttcaaagccaaagtcaagcatattattgaaagattaataaggagatttggatatgactacattgaagccaacttccctgaagaagataggagattattaacaaatataagaaagatgcgcaataggaataagcgtaaagatgaagaagttactactggagttagtgatgtagctgccacaaagggttcaagatttatgtctgcattcgatgaagctgtttatgggtctgatgaagaaaatgataatggatcagatcaggaggaaaatgttgctggtggcaaaatgaagaatggggccaagcaatttattgtagaatccggtgacaacccactagatttgttagattctcaacactag

SEQ ID NO: 81529 - DNA, 489 bp, Saccharomyces pastorianus
atgattgaaagagcttccaaaaaagaatctcaaaatgtaccggctttaccacatattgcaggctataaatcttccattctaagccgccatcaccacactaccataacaaacgaagataggatgccttcggcgatgaccccaagagatgaggatgccttaacagagacccaagaaaatccatttgtaactagcaaactgccgataatgagaaaagaaaataggttagaaaatataaccctttcctttgaggatgaggagcttgaatcacttggcgaagtggaaggccctaaccaaaagtctcaagaaaataacaatgaggaaagttttaaagagaacaataaaagtttaacagagtctcctcatggtgatgaccgtgacatatcaatgtttcaattcgactcaaatgttgatactaaatgggcagagcaggaagatatggacagcacatttcaacgtcgaacctcactagattatgggggttacttttaa

SEQ ID NO: 81530 - DNA, 906 bp, Saccharomyces pastorianus
atgcttctagaaccaagtaaaccttttgagtcaatactaaatcaagcaaaatgtgtagtccttgcaggtgggacaatggaacccatgtcagagtttttgtcgaatttgctacctgaagttccttctgaagacattacgaccttgtcgtgcaatcatgttataccgaaagagaatttgcaaacttatatcacaaaccagcctgagcttgagttcacattcgaaaaaagaatgtctccctcccttgtaaataatcatctttttcaattttttgttgacctgagcaaagcagttcctaaaaagggtggtattgtagctttttttccaagctatcagtatttggcgcatgtaattcagtgctggaaacagaatgacaggtttgctacattaaataacgtgaggaaaatattctatgaagcaaaagacggcgatgatattctatctggatattctgattcggtagcagagggaagggggtctcttttgctggctattgttgggggaaaattatcagagggaataaattttcaagatgatttatgtagggctgtggtgatggtgggcctgccgttcccaaatatttttagtggagaactaatagttaaaaggaagcatttggccgctaaaataatgaagtcaggcggaacggaagaggaagcttcacgagcaacaaaggagtttatggagaatatttgtatgaaagctgtcaaccaaagtgttggacgtgctatacggcatgcaaatgattacgcaaacatttacttgctcgatgtgcgatataataggcccaatttccggaaaaaattgtcacgttgggtgcgagattctatcaattccgaacatacaacacatcaggtcatttcttcaacacggaagtttttttcaatgcgcagcctgaattcacgctaa

SEQ ID NO: 81531 - DNA, 1551 bp, Saccharomyces pastorianus
atggacaaaaaggaatattcggagactttctatcatccttataagccctatgatattcaggtacagttaatggaaactgtatacagagtgctatccgaagggaagaaaatagctatcctggaaagccccactgggacaggcaagacgctgtccttaatctgtgccacgatgacttggttgagaatgaataaagcagatattttcacccgcatggaaactaacatcaaaacgaatgaagatgatagtgaaaacctaagcgatgacgagccagactgggttattgacacttatcgaaagtctgttttacaagaaaaggtggatttgctaaatgattatgagaagcatttaaacgaaattaacacgaccagttgtaagcagttgaaaactatgtgtgatttagataaagaacatggaagatataaatcagttgatccattaagaaagaaacgcaaaggcgctaggcaccttgatgtatcacttgaagaacaagattttattccgcgcccctacgaatcagattctgaaaacaatgatacctccaaaagcgcaagaggaggaagaatatctgataaagattacaaattgagtgaactaaattcacaaataataacacttttagacaaaattgatgggaaggtttcgagagatccaaacaatggcgatcgctttgacgttacaaatcaaaatccagtgaaaatatattatgcatcgagaacttattcacaattaggtcaatttacttctcagttaagattaccctcgttcccatcatcctttagggataaggtcccagatgaaaaggtgaagtacttaccacttgcttcgaaaaagcagctttgtattaatccaaaagtgatgaagtggaaaacattggaagctatcaatgacgcatgtgcggaccttagacatagtaaagagggatgtatgttttatcaaaatacaaacgaatggcgtcattgtcctgatacgttagctctcagagatatgattttttcagaaattcaagatattgaagatttagttcccctgggaaaatctttgggaatttgtccctattacgcctcgagggaggcacttcctattgcggaggtagtgactttgccatatcaatacttactttctgagtccacccgttcaagtcttcaaataaaccttgaaaattctatagtaattattgatgaggctcataatttgatagaaacaataaattctatatattcctctcagatctcgttggaggacttaaagaattgccataaggggatagtaacttatttcaacaaatttaagtccaggctcaatcccggtaacagagtaaatctattaaagctcaattcacttttgatgactctgattcaatttatagttaaaaatttcaagaagataggacaagaaatagatcctaacgatatgttcacaggaagtaacatcgataccctaaacattcataaactattgagatatataaaagtctccaaaattgcttacaaaattgacacgtataacccagcactaaaagaggaagaatcgtccaaaaatgaaatcccataa

SEQ ID NO: 81532 - DNA, 1101 bp, Saccharomyces pastorianus
atggtcgtgaagaatttagatttgactaaaagacaaaaccaacagaaaatatgtggtaaatttacaacttgcgaaagagactcattagctaatgtactggagcaagaaagacacaggtcaacaattacggagccattggctaattggctggacgattatttcatgtttttaaatcctcaaaacgaccagtgttgtagattaaagaagggaacagatgaggtttgtcctccctcttttccaagtagacgttgtgaaacttgtttccagcagggttcttggaattacaacatgtcagggtttcctgagggcaaggacttcatggaatacctaagcatatggattaatgcgcctagtgacccctgccctctaggtggtcgtgcgccatattcgactgcgttagtttataatgaaacgagtgtgtctgcgtcagttttcagaacagctcatcatcctttgagatcccaaaaggactttatccaggcgtatagtgatggagttaggatatcaagttctttccccgaactagatatgtttgcatactcgccgttttacattttttttgttcaatatcaaactttggggccattgacgttgaagctaatagggagtgccattatcctaatttttttcatttcatctgttttcttgcagaatatgcgcagctcattcttactggctttggtcgttaccatgattatcgtagatattggtgctttgatggccctactaggtatctcactcaacgctgtcagtttagtcaatttaattatttgtgtcggtttgggtgtcgagttttgtgttcatattgttagatcatttacagtggtccccagtgaaaccaagaaagacgcaaactcaagagttctctattccttgaataccataggtgagtccgtcatcaaaggtataactctaaccaaattcattggagtttgtgtacttgcattcgcccaatcgaaaatatttgatgtattttactttagaatgtggtttacactaatcattgtagcagcattgcatgctctcctatttttacctgctttactttcattgtttggtggtgaaagctatagggacgattccatcgaagcagaagattag

SEQ ID NO: 81533 - DNA, 981 bp, Saccharomyces pastorianus
atgaatgtgctatggattatagcactagttggccagctgatgcggctcgttcagggaacagctacctgtgccatgtatgggaactgtgggaaaaagtcagtatttggaaacgaattaccttgccctgtgccacgtagttttgaacctcctgttctttcagatgaaactagcaaacttttggttgaagtttgtggtgaagagtggaaagaggtccgttatgcctgctgtactaaagatcaagtggtagcactgagagataacctacaaaaggctcaacctttaatttcctcatgcccagcatgcctcaagaattttaataacctgttctgtcacttcacttgcgctgctgaccaaggaaggtttgtcaatattaccaaggtagaaaagtcaaaagaagataaagatattgttgcggaattagacgttttcatgaattcgtcttgggcatctgaattttatgactcatgtaagaatattaaattttctgctaccaacggttatgcgatggacctaatcggaggtggtgctaaaaattacagtcaattcttgaagtttttgggggatgctaaacctatgcttggtggatccccctttcagattaattacaagtatgatttagcaaatgaagaaaaagaatggcaggaatttaatgatgaggtttatgcttgcgatgatgctcaatataaatgtgtgtgttctgattgtcaagagtcttgcccccatttaaaacctttaaaagatggcgtgtgtaaagttggccctctgccatgtttttccctttctgttctgatcttttacacaatctgtgcactttttgcatttatgtggtattatctctgtaaaagaaaaaaaaacggggcaatgattgtggacgatgatattgttccagaatcaggttccttagatgaatcagagacgaatgtattcgaaagtttcaataatgaaactaacttacataatggtaaactcgctaacctataa

SEQ ID NO: 81534 - DNA, 723 bp, Saccharomyces pastorianus
atgatgtttttatatgctacatgggccttgaggagaaaggatgggaaaactaggttgttacttggaatatctggtttactcatagttttggcttctattgtttgtgcagccggatttttaactctttttggtttgaagtcgacattgatcatagcagaagtaataccgtttctaattttagcaataggaatagataatattttcttgattacacatgagtatgatagaaattgcgagcaaaaaccggagtattcaattgatcaaaaaataataagcgctatcgggagaatgtctccttccattttaatgtcattgctatgtcaaaccggatgcttcttgatagctgcatttgttacaatgccagctgtccataattttgctatatattccacagtttctgttatattcaacggagtattacagctaacagcgtatgtgtccattttgtctctctacgaaaagagatccaattataaacaaattactggaaatgaagaaactaaggaatcatttttgaaaacgttttattttaagatgttaacgcaaaagaggctcataatcattatcttctcggcttggtttttcacatctctggttttcttaccagaaattcaatttgggctagatcaaacattggctgttccacaggattcctacctggttgactattttaaggatgtttatagcttcctaaacgtaggaccaccggttacatggtcgtga

SEQ ID NO: 81535 - DNA, 480 bp, Saccharomyces pastorianus
atggcaacaccaaaaattttggggcagtcctacagtatatcaaagactttaaaggttagtgaaggatttggattgcggacaacttattggagacaagcagactcaattttcaaatttggtagtcctaatacgctatcagaaaagtcaattgaaaaagcaagaaaattgttgggcaacctgattgcttccgagggtgagttctcttggaaaatttggaaagaaagtgattcttcacaaaaaaaaatactacgttttttgggttgtatccccactactttacgctgcaccaatacagcacaagatcatcagaagcccacaaacctaccctcaaacatttccctgaaaaaaagagaatatcgaaatcgggttaaagcaatagccacaaaggctgctttggaaaaaagaatggcgtatatcaaagacaatgatgtagctttcaaaaaagagctagtaaagaggagaatagttggggaggtttga

SEQ ID NO: 81536 - DNA, 1362 bp, Saccharomyces pastorianus
atgaatacattaaggtgtttgacacaagcactatccaaaagtgggagagaagctccaaaactatatcagaaagtaatatttccaggcctgttcagagagggtataccaattgcaaatgtcaagaaagttgatgaaaaaataatagatagcccaacatcaacgtcagttaatggagaggcaaaaaaaatagtacggcatggtgtgaagtatgaaagggagcaagttaaggaatacctttcaagcctgccgactttaacgctttctaggaaacaaattagggatgactatgatgaggaacgtgcaaaacgaatgtatatgttctctaaacaaacgaattcctcgaataaattccagaaacttcttacagcaaagtctcaagagtttactagagaactattgacgctactgatagattgcacatcgaatgagaagaattcagggccagaacgcttcactcgtaagtttcttaagtttagtaatgacgagatccctcctctccctgacttttcaaagaaccctcaattgtttgaaaattatattggaatactaagtcatacaaagttcaattttcgttcatcttccaaactaaatggtattgtgcgtaagatgctgcggcacctacttcatccaaccaataagacgactctgccgttgcgttctgctcaagtttataatgactcaatatactttttcagtgagcacttcgactttgcgtcttgtagagaaatatttgcacaaatgaaggctgaggggactaaaccaaatacagtcacttttaatcttttactgcgtaatgtagtgaaaaactcgcatattagaaaaacgaagcaccctgacgatgaggtccttttttatcttagaagtatgcgtaatcatggagtttttgcagatgtaataacttggacgacatgttataactttcttcgtgatgaagtttcgagacaattgtacattgttcaaatgggtgaacatttaggaaattttaacgtaaattttgtttatactgtgctaaggaacggagattatagagcagaggactgtttaaaagttttagcagcaaattcactaccgatttcccgtaagacgttctatttgtgcatagaacgactactaaacgaggaacaacttgaaaccgcatctaaattacttgactatggttttcagcacttgaaaagtaattttaagttagactcggaggcaatgaatcatttcatgcgggtatttgctaataagggaagaagtgatttggcattcctttgctataatacttgtcgtaagatttacaaaattaaacctgattctcagacgttcgaaatgttatttaaagcgttagttagatggcaacaccaagatttgggcagt

SEQ ID NO: 81537 - DNA, 702 bp, Saccharomyces pastorianus
atgagttgggtgaactacaggaccagttcatcgaataaatatgatcaatacagagtcacattaaaatcaattaggaacattgaagcctctgttcaaccttcgagagatcgtaaggaaaagatcacagatgaaattgcccatttgaaatataaagatcctcaatcaacaaaaatcccagttttagagcaagaactagttcgtgccgaagctgaatctttggttgcggaggctcaattatcgaatatcacacgtgaaaaattaaaggctgcttatagttatatgtttgattcattaagagagctttctgaaaaatttgccctgattgctggatacggaaaggccttattggagctgctagatgactctcctgtcactccaggtgaagctagaccagcgtacgatggctatgaagcttctcgccaaattattatggatgctgaatcggccttggaatcttggaccctagacatggctgcagtcaaaccaactctttcatttcatcagaccgttgatgacgtctatgaagacgaagatggtgaagaagaagaagaacctgaaatccaaaatggagatatccccggtcaagtagtcgaagaagaggaagttgaatggactactgaagttcctgtagatgatgaagcccatgaggccgatcatcatgttagtcaaaacggtcatacctccggttctgaaaacatctga

SEQ ID NO: 81538 - DNA, 363 bp, Saccharomyces pastorianus
atgcacagaacttactctttaagaaatcaaagagctccaacggctgctgagctacaagctcctccaccaccaccatcctcaacgaagtccaagttcttcggaaaggcctctattgcgtctagttttagaaaaaatgcggctggtaactttgggccagagttggctcgtaaattatctcaattggttaagactgaaaaaggtgtccttagagctatggaagttgttgccagcgaacgccgtgaagctgcaaagcaactgtctctatggggtgctgacaatgatgatgatgtttccgacgtaaccgacaaattaggcgtcttaatatatgagttgggtgaactacaggaccagttcatcgaataa

SEQ ID NO: 81539 - DNA, 984 bp, Saccharomyces pastorianus
atgcaccctatgacccaacttgcaattggtttagcatcaatgaacaaaggatccctctttgctacaaactaccaaaagggcctcataggaaagatggaattttggaaagatactcttgaagattcgctaaatttaattgcttcactcccgctgctgactgggagaatttattcgaacattacaaatgagggacacccattaggtcaatatagtgaggaggtggattggtgtacaaacatatgttccctgctcggcatgacaaatggaacgaactcttctaatacatgcaaccttacttcccagcaatccctggacttcataaacttgatgcggttatataccggtatacatgtagaccatgaaggtggtaatgtttctgctcacaccacccacttggttggaagtgcgttgagtgacccgtatctcagctattcatctggaataatgggattagcgggtcctttgcatgggttagcagcacaagaagtagtaaggtttctcatagagatgaactctaatatttccagcattgcacgagaacaagaaatcaaagattatctttggaaaattttgaattcaaaccgtgtgatccccggttatgggcacgcagttttgcgtaaaccggatcctcgatttacagcaatgcttgaatttgcgcaaaagaggcctattgaatttgagaacgacaagaacgttttgttgatgcaaaaattggcagaaatagcgcctaaggttttgttggaacacggaaagagtaagaatccatttcccaatgttgactctgcatcggggattttgttttatcattatggaatcagggaattattattctttaccgtcatttttgggtgttcaagggccatgggacccttgacacaacttgtttgggatcgcattctaggtttaccaattgaaaggcccaagagtttgaacttggagggtctggaagcacttaccaaagcaagcaatgttaacaagttgtaa

SEQ ID NO: 81540 - DNA, 489 bp, Saccharomyces pastorianus
atggtacaaaggcttctaccgggcgcacatatatgcagaaggtccttcaattcgtctgcaattataaagtcttctgcattgactctcaaggaagcattagaaaacgtgatacctaagaaaagagatgctgtgaagaaattgaaggcctgttatggcagcacgtttgtcggaccgattaccatttcatcagttctaggtgggatgagaggtaatcagtcaatgttttggcaaggaacatcattagatcccgaacatggcattaaatttcaaggtttaacggttgaagaatgtcaaaatagattacctaatacaggtattgatggcgataatttcctgccagaatcaatgttatggctgttgatgacaggtggtgtgccaactttccagcaagctgcttctttaaggacagaattgggtattcgtggaaggaaattgccaattatacagagaaagtttggtcagttacccaaagatatgacccttatgacc

SEQ ID NO: 81541 - DNA, 1113 bp, Saccharomyces pastorianus
atgaatttgagtaaccctttaactcgtcctagacgtaagctaataccagatctttttagtgcatctctaatagtggcaatgttgggtttttttgaatctacgaccgcgtcgaaatctcttggaacaacttacaatcttaccgtttcctctaatagagaactagtagctttaggattcatgaatattgtcatctcattattcggtgctcttcccgcattcggcggatatggaagatccaagatcaacgccctatcaggagcacaaagcgtaatgtcgggagtgtttatgggtgtcatcaccctaatcacaatgaatttacttcttcaattcgtacattatattcctaattgtgttttatccgtcataacaaccatcatcggaattagtttattagaggaagtgccaggcgacataaagttccatttgcgatgtggtggctttagtgaactatttgtttttgctgttaccttctgcactacaatattttactcaatcgaagcaggaatatgcatcggatgtgtctattcaattataaatattataaagcattcagcaaagtcaagaatccaaattctggctagggtagcgggaacgtcgaactttacgaatcttgacgactacatgatgaacatgaaaaggaactctctggatgttgagggcacagaagaaatcgagggatgcatgattgttagaatacctgagcctctcacatttacaaacagcgaagatttaaaacagagacttgacagaatagagaggtacggttcgtctaagatacatcctggaaggaaatcacttcgctcgaaggattccataaaatatgtcattttcgatttaggtgggatgacctcaatagattcttcagccgcccaagtgctggaggaaattatcactagttacaagaggcgcaatgtctttatttaccttgtcaatgtatctataaatgacaaagtaagaaggcgattattcaaagcaggtgtagctgctagtgtggaaagagcgcaagcaaataacaacgaaaataatactagcaacacatttagtgatgcaggagagacatatctccgtacttcgatagcattgatgcggctctttatgaaattgagaaaatga

SEQ ID NO: 81542 - DNA, 1065 bp, Saccharomyces pastorianus
atgacatcaaataattcgttattggggcgtggaaggatgtcatattcctctaccgctccaccaagattcaaaagatcagtcgaccagcgtgacactttctcggacaattttgattatgataaggattcatccaatcgaggcaggacctatattgcagcatctaattcaactactggggtacccccacccaacaactcaagatcaggatgcaccaataatacaaataatacaaataatacaagtaatacaagtaatacgaacaataatgatagcgttgatgagaatacagtgtttgaaactgtaccttattacctgccctgcttttcatggcttcctgagtacactttcaataaactgtggggcgacgtaatcgcaggtatctcagtagcgtcatttcagataccacttgcgctatcgtacacaacttcaattgcacatgtcccacctttatgcggactatattctttggctattagcccatttgtctatggtatcttaggttctgttcctcagatgatagttgggcccgaaagtgcaatttccttggtcgtgggacaagcagtcgaatctataacactacataaagaaaatgtttctctaattgatatttcaacagtaataacatttgttagtggcactatcctacttttttctggtatttccagatttggtttccttggaaatgttcttagcaaggcacttctacgaggtttcataagttcagtaggactggttatgataatcaactccttgatttctgaattaaagctagacaaatttttagtaagcttgcctcaacactaccatacccctttcgagaaaatacttttcctcattgattatgcaccagcacaataccatataccaacggcaatattcagcggatgttgcttgattgtcctctttttaacgcgtctactaaagaggaaattaatgaaatatcacaagagcgcaatattttttccagatatattattggtggtaattgtcactattcttatttccatgaaatttaatttaaaacacagatatggtatatctatcattggcgactttaagcatgga

SEQ ID NO: 81543 - DNA, 642 bp, Saccharomyces pastorianus
atggaaaatgataatttacttttaaaccttgaacaaattaatgaggatttggaagatgggcactatattgaagaaaactctcaaggtaacatcctagattttaatttgaatctacctccttcaagttttggaagaagtcataccagaaactcaaccaggtctagtggtttcaatgaagatatagttggtgccctcagaaggagagtcgggccatctgaacagaattttgccgaggaagacgattccagcaacagttgtttttctgatggctctcagcaaaattttcagcaggagaaaacaaattttcaagacgtcattctggattatcaaactaaaaaattctacgattacatcaaagaaagatcaattgttgtcggaagaacaacgcgctccaatccgcctttcaagagaaagatgctgttggttgacatcatcccaagccgcatgggcgaagctgaaacgggagctaactttgatgatgtagaaagaggtgtcagcagacagatagccgccagtgccttcctatccttactgaatttggctacgaaagggatggtcaagttgaacgaatatcctgttgcagatgcggtaactaaagatcttaaactgagaagagaggacgaaataattgtatatgcctga

SEQ ID NO: 81544 - DNA, 1209 bp, Saccharomyces pastorianus
atggcacctctttcgttgaactttaaagatgacaagaaatataagggcctcacaacagtgtggttgctttctgcgttgggaaattccattgtaaaggaaagtaacaattattattcaaacaaaagcaactccactggaaacatatcttcatccaccgttaagaaaaaagacatcgtaaatatttccataccaaaaacatgtgatgaaattcaaaatttcgaaaatgatttttctcttagatacatttctaatcttttatatggagtgacaatttgctataataaaaaaaccgagtatgtgttgaatgacctaaatcacctgcttgtgcagttacaaaaaaatgatgtatacgcttttaaggccaaaaataagtctacgaggattaatggattgaatagtaataacagtattataggaaacaaaaacaataattacacctgggaagaatgcgtttttttcgatgacgatcccttatatgatattactaaagttcccgcactggagtttcttaacactaccctccaagataatgtatcttttattgaggaagctaaatcaataaggagacaagactacatcaatgagttaagtaattctaacaggttcgagcttcatggggacatgactaactcagacgcgcaaagtaatctaggatctaacgttagaaattcttttccgctggatgaaattcccgttgatgtggactttaacctggacttagatgatatagtgagccatcaggggacacctttaggctctcactcaagttcacagaaggatggaaacgatttcaagtttaattatcaaggagatgaattggtgttgaattttgagaacgataatgaaaataacagtaatggaggagaagatacatcagttgaaaatgaagggccggtagccaatctcaaagactacgaattggggttggaagcgcaggcttctgaagaagaaaacgatcttcaacagaaagttaataccagaatgcaaagaggacatcgcgccgatgtaggtgggcaattttctaaggtacaatttgatgccaaaacgagttatccaaatgaagttctcaaattcaaccatggaaattacagccacttaatggaaaaaaacaggattagaaaactaaccggccaaaattttctcacctctaacataagtagtttggtaaggtcatgtggtgaggaagaattttatcaacaaattggttaa

SEQ ID NO: 81545 - DNA, 255 bp, Saccharomyces pastorianus
atgaagtttttcaggaaactgcctgatgtgatgggcacatatgaagtcataaaacaccttgataaaatagtccttttcaaagcctgcacctcttgcagtagaagaaaccaaaaaaatggaaagtgccttttctcgagaggatttacaaaatctgatatgaacgtattttccaagataaatagtaaacttaaagacaaaagtatcttcgagatgactgtcgatgattatgttgccgctggcttccaaaccctttag

SEQ ID NO: 81546 - DNA, 1851 bp, Saccharomyces pastorianus
atgaatggtaaaattattggctggttctctcatgaacaaggtaagatcattgcggatacattgagatattggaaagttgaaggcaagacgcctgggttaccgattgatctagaaattggatatgttcctccctcaactcgtggtcaatatccaggtctctacctatttggtggtcattccaggatgctgcgtcctgttcgttacctgcctttggataaagaagacattgttggaccttttgagcaagtgtacatgaacattgctgtcactcctcaagaaattcaaaataacgttcatacacacgtagaatttacgcccacaaatattctttctattttggctaatttgactccattttctgatttcaaccagtctccaagaaacatgtatcaatgtcagatgggtaaacaaacaatgggtactccgggtgtagctttgtgccatcgttccgacaataagctgtataggttgcagacaggtcaaacgcctatcgtgaaagctaatttatatgatgattatggcatggataactttccaaacgggtttaatgctgttgttgcggtcatctcgtatactggttatgatatggatgatgcaatgattataaacaaatcagcagatgaaagaggtttcggttatggtactatgtataagactgagaaagtggatttagcacttaacagaaaccgtggtgacccaattacacagcattttggtttcgggaatgacgaatggccaaaggagtggctcgagaaattagacgaggatggtttgccatacattggcacttatgttgaagagggtgatccaatctgcgcatactttgacgatactttaaataagaccaaaatcaagacatatcactcctctgaaccagcatatatcgaagaggtaaatttaatcggtgatgaatccaataagttccaagaactacaaactgttagcataaaatatcgtattagaagaacgcctcaaattggtgataaattttcttctagacacggtcaaaaaggtgtttgttcaagaaaatggccaaccattgatatgccttttagcgaaacaggtatccaaccagacatcatcattaaccctcatgctttcccttcgcgtatgaccattggtatgttcgtcgaatctttagcaggtaaagcgggggcattgcatggtattgcacaggactctacaccttggatctttaacgaggacgataccccagccgattactttggtgagcaactggcgaaggcaggttacaactaccacggtaatgagccaatgtattcaggtgctactggtgaagaattaagggcagatatttatgttggtgttgtttactaccaaagattacgtcatatggtcaatgacaagttccaagttcgttccactggtcctgtcaatagtttgactatgcagcctgtcaaaggtagaaagagacatggtggtattcgtgtcggtgaaatggaaagagacgctttgattgggcatggtacatcttttctattacaagatcgtctgctaaattcatcagactacacacaggcatccgtatgtcgcgagtgtggttctattttgaccacgcaacagagtgtgccaagaattggttcgatttccaccgtttgttgtcgtcgttgttccatgagattcgaagatgcaaagaagctattgactaaatcagaagatggagaaaaaatttttattgacgactctcaaatttgggaagatggacaaggtaacaaatttgttggtggtaatgaaacaactacggtggccataccatttgtattgaagtacttggactctgagctatccgcaatgggtataagattgcgttataatgtagagcccaaatag

SEQ ID NO: 81547 - DNA, 1476 bp, Saccharomyces pastorianus
atgtctaacgatggtgtttcttctgcagtagagagaaaagtttacccaagtgagtcaagacaaaggcttacttcttacagaggtaaattacttttaaagttgaagtggtccgtgaacaatggcgaggagaacttatttgaagtaagagattgtggtggtctaccagttatgctacagagtaacagatgtcacttgaacaagatgtcaccatatgaactggtacaacacaaggaagaatccgatgaaataggtggttatttcattgttaacggtatagaaaagcttattagaatgctgattgtgcaacgtagaaatcatcctatggctatcatcagaccttccttcgctaacaggggtgcatcctattctcattacggtattcaaattagatctgtcaggccggatcaaacttcccaaactaatgttttgcattacttaaatgacggtcaagttacatttagattttcttggagaaaaaatgaatatttagttcctgttgttatgattttaaaagccttgtgtcataccagcgatagggaaatttttgatggtattattggtaatgacgttaaggattcctttttgaccgatcgtttagaattactgttacgtggttttaagaaaagatatcctcaattacaaaatcgcacacaagtcttgcaatatttaggagacaaatttcgtgttgtctttcaagcttcccctgatcaatctgatttggaagtcggacaagaagtccttgatcgcatcgttctcgtgcatttgggtaaggatggcagccaggataaattcagaatgttattgttcatgatcagaaagttgtattccttggttgcaggcgaatgttctccagataacccagatgctacgcaacatcaagaagttcttttgggtggtttcttatatggtatgatcctaaaagaaaagattgatgagtacttacagaatattattgctcaagtcaggatggatattaaccgtggtatggccattaatttcaaagacaaaaggtacatgtcaagagttttaatgagggttaatgaaaacattggttccaaaatgcaatactttttatcaactggtaacctagtgtcccagtctgggttagatttacaacaagtttctggttatactgtggttgcagaaaaaattaacttctaccgttttatttctcattttagaatggttcatagaggctccttttttgcgcaattgaaaactaccacagtcagaaagttgctacctgagtcgtggggattcctgtgccctgttcatacgccagatggttctccttgtggtttattaaaccattttgcgcacaagtgtcgtatatcaactcagcaatctgacgtctcaagaattccttctatattatactcacttggtgttgctccggctttcacacctttgctgctgtccttccctgtgttgtgtccaattgatggtaacttatggtgggtctccatgaccagctag

SEQ ID NO: 81548 - DNA, 186 bp, Saccharomyces pastorianus
atgggcggaaatgaactgggatttagatacacgagtgtctgggatgcgctcgtgacaatcggcagaacagaaggcgttagcggttactacaaaggcttagctgcaaacctttttaaagttgttccttcaactgcagtgagttggctagtttacgaagttgtatgtgattctgtaagaaattggtga

SEQ ID NO: 81549 - DNA, 849 bp, Saccharomyces pastorianus
atgcctttgaaggagaaaacagacgatgagctccaatctttacttgcacaagttccgcacaaatatataaaattctacgaaaatgttagacctccgtttatcggaacctattctatggactttactttgccaccaaacgatcccttttctacgaaaggtactggattcaattatgattacgattctgacgttgaatgggttaatgaagaagaagaaggcgaagtcgataacttagaaagtggtgaagaggaggaggaggaggaagatgatgaagacgtacctagcgaaggagagtttgacgggtttctagacagcgaagaaaacagtgatttggatggcctaccctgcgccaagagaaaatttgtaggcccattgataccaacaatatgcctaaaatccaattttgaaaacttatcagaggaaaataaacgatacttacaacaactcaaggccgaagttatcatagaaaccgacgggccaatcgatccattcaaagaacccaaaacatcgtctctaccatccaaaagaagtaattccgacttacaggcacagaccgctagccaatctcaaagtcccgaaaagaaacaaaaagcaatgattacagaccccatggacttacttcgactttttgatggggttcaagacagcacgttttctttgggtactgtgactgaaatagcacagaaaaatttgccgcaatacaacaaacaaacaattaaaaacaccataaaggaatatgccataagaagttctggaaagggtgatttgccccgcaaatgggtaatcaaagacgcacaaaactgggagaatcttcgagccaatgcaaatatgccaaccccgtctttgtaa

SEQ ID NO: 81550 - DNA, 105 bp, Saccharomyces pastorianus
atgcatatggacgaatacttcaatgacaaggatccaaatagaagtgacgatgctctgtatgtaaatacgtctagccaatacgaaggagtggctttaggtatgtga

SEQ ID NO: 81551 - DNA, 870 bp, Saccharomyces pastorianus
atggttgatttggagcaggaatttgcgctcggtgggcggtgtctggcattccatggtcctcttatgtatgaagcaaagatcttgaaaatatgggatccatcttcgaaaatgtataccagcattcctaacgacaagccaggtggtagttcacaagcaactaaggaaataaagccacaaaagctgggagaagatgaaagcattccagaagagatcattaatgggaagtgttttttcatacattaccaaggctggaagtcgagttgggatgagtgggttggatatgataggatacgggcctacaatgaagagaatattgccatgaaaaaaagactggcgaacgaggcgaaagaagctaagaaatcgttactggaacagcagaaaaaaaagaagctctccactagcctgggagggcctagtaatggtggaaaaagaaagggagacagccgctcgaatgctagtataagtaagagcacttcacagagttccttaacatcttcagtgagcggcaggaaaagcggaagaagttccgctaattccctccatcctggcagctctttgcgctcgtcatccgaccaaaatgggaatgatgaccgcagaagatcttcttcgctatcgccaaatatgctacatcacattgccggttatccaacccccaagatttcccttcaaattcccataaaattgaagagcgtgttagtcgacgattgggaatacgtaacgaaggacaaaaaaatttgcagactacccgctgatgtgacggtagagatggtactgaataaatacgaacatgaagtgagtcaagaattggaatcgccagggtcccagtcacagttgagtgaatactgtgccggttctcaagttgtattttga

SEQ ID NO: 81552 - DNA, 216 bp, Saccharomyces pastorianus
atgcttttatataggttggaacggctgccatatgacagacttctgagaaaatcatcgaaggatcaaaagccactagtaccaattaggatttatggggctatccatctgttaaggttgataagtgttttaccagagctgacctcgtctactactatggatctacaaagctgtcagcttttaatcaacaaaccgaagacttcttggtttggttgttga

SEQ ID NO: 81553 - DNA, 1212 bp, Saccharomyces pastorianus
atgtccggttccgaatttgatgaagtttacgtcggtgttggtgctaaacgtatccgtgatttgtttgctcaagcgcgttctcgtgcaccagctattatttttattgatgaattagatgccatcggtggtaagcgtaatccaaaggaccaagcttacgccaaacaaacgttgaaccagttattggtcgaattagatggtttctcacaaacaagtggaattattattattggtgccacaaatttccctgaggctttagataaggcgttaactagaccaggtagatttgataaggttgtgaatgtggatttgccagatgttcgtggtcgtgctgatattttaaagcatcacatgaagaagattacattggcagacaatgtggatccaactattattgcgcgtggtacccccggtttatcaggcgctgagctggcaaatttagtcaaccaagcagcagtttacgcgtgtcaaaaaaatgctgtttccgttgatatgtcccacttcgagtgggctaaggataagatattgatgggtgctgagagaaagactatggtcttaacagatgcagccagaaaggccactgctttccacgaggctggacatgccattatggccaaatacaccaatggtgctaccccgctatacaaggccacgatattgcctagaggtagggcattgggtattacttttcaattgccagaaatggataaggtcgacatcaccaaaagggagtgtcaagccagactggacgtgtgcatggggggcaaaattgcagaagaattaatttatggtaaagataacaccacaagtggttgtgggtctgacttgcaaagcgccaccggcacagcaagggctatggttactcaatatggtatgagtgatgatgtaggacccgttaacttgtcagaaaattgggaatcttggtctaataagattcgtgatattgctgataatgaagtgattgaacttttgaaggactccgaggaaagagcaagaagactattaactaagaaaaatgttgagctacatagacttgcgcaaggtcttattgaatatgaaactctagatgcccacgaaatcgaacaagtttgtaaaggtgaaaaactggacaaactgaaaacttccaccaatacagtcgtagaaggaccagacagtgatgaacgtaaagatataggcgatgataaacccaaaattcctacaatgttaaatgcatga

SEQ ID NO: 81554 - DNA, 957 bp, Saccharomyces pastorianus
atgaacgtttcaaaaatacttgtgtcgcccacggtcacgacaaatgttttacgcatatttgctcccaggctacctcaaatcggtgcttctttgttagttcaaaaaaaatgggccttaagatcaaagaagttctaccgtttttattctgaaaagactagcggtgaaatgcctcctaagaaggaagctgatagctctggaaaggcatccaataaatccacgatttcttcaatcgacaattcgcaaccaccacctccatcgaacaataatgataaaaccaaacaagcgaacgtagctgtgtcacatgctatgctagcaactagagaacaagaggccaataaagacttgacgagtcctgatgcacaagcagccttttacaaacttctcttacaatcaaactacccgcaatacgtggtctctaggtttgagacccccggtattgcatcatcgcctgaatgcatggaactgtacatggaggccctgcagaggataggcagacactcagaggctgatgccgttagacaaaacctactgacagccagctctgctggcgcagttaacccatcattggcgtcatcttcatcaaaccagtcaggttatcatggtaactttccatcgatgtattctccgctttatggatctcgcaaagagccactacatgttgtcgtatctgaatcaacttttactgttgtatcgagatgggtaaagtggctgcttgttttcggtatcttaacctactctttttctgaaggttttaaatacatcacagaaaatacaacgctactaaagtcgtcagaagtagccgacaaatcagttgatgtagccaagacaaatgttaaatttgatgatgtctgcggttgtgatgaggcccgtgcggaattggaagaaattgttgatttcctgaaagaccaactaagtacgagtccttgggtggtaaactaccaaagggtgtactgttga

SEQ ID NO: 81555 - DNA, 1806 bp, Saccharomyces pastorianus
atgggcaattatcaaaacgcagcccaattttttactgcttatgttaagtacaattcttccctaggattgtatgaaacatataatttgacagatcccgacgagtttgctaatcacatcaataacggggctttcacgaatgctggtattaaaacacttctaaagtgggcaacagacattggcaatcatctcggcgaggtcgttgaccccaaatggagtgaaatttccaaagatatttatatccctagatcctcatctaacatcactttggaatactctggtatgaatagctcagtggagattaaacaggcggatgtgactttaatggtttacccacttggatatatcaatgatgaatccatattgaacaatgcaattaaagatctttattattattcagaaagacagtctgcgtctgggcctgcaatgacatatccagtttttgtggccgcagctgctggtctgctgaatcacggctcttcttctcaaagttacttatataaatcggttcttccatacttacgggctcctttcgctcaatttagtgagcaatcagacgacaactttttaacaaacggattaacccagccagcattcccctttttaacagctaacggtggatttctacagagcattctgtttgggttaacaggaatccgatattcttatgaggttgatccagatactaaaaaaattaaccgtttgttaaggttcaatccaatagaactaccgttgctccctggtggtatcgctattagaaacttcaaatatatgaaccaagttttagatataataattgacgaccacaatggtacgattgttcataaatcaggagatgttcctattcatataaagataccaaacagatctctaatacatgaccaggatatcaacttctataatggttccgaaaacgaaagaaagccaaatctagagcgtagagacgtcgaccgtgttggtgatccaatgaggatggataggtatggtacctattatcttttaaaaccgaaacaagagcttacagttcaactgttcaagcctggcttaaacgcaagaaacaacatagcggaaaataagcaaataacaaacttgacggccggcgttcccggtgacgttgcattctctgctctagatgggaataattacacgcattggcaacccttagacaaaattcatcgtgcgaagctattgattgatttaggtgaatacaacgagaaagagattaccaagggaatgattctttggggacagaggcccgcaaaaaacatttccatatctattttgcctcattctgaaaaagtcgaaaatttatttgcgaacgtgacagaaattatgcaaaattcgggaaatgatcaacttcttaatgaaaccattggtcaacttttagataatgccggaattcctgtcgagaacgttattgattttgatggcatagaacaagaggatgatgaatctttggatgatgtgcaagccttattgcactggaagaaggaagacttagccaagctaattgaacaaatacccagacttaactttctaaaaagaaaatttgtgaaaattctggataacgtgccagtgagcccaagtgagccatactacgaagcaagtcgcaaccagtcgttaatcgagatattacccagtaatagaacaactttcactattgattatgataaattgcaggtgggtgataaagggaacacagattggagaaaaacaagatacatagttgtggcagtacaaggagtgtatgatgattatgatgatgataacaaaggagctacaatcaaggaaattgttctcaatgattaa

SEQ ID NO: 81556 - DNA, 1794 bp, Saccharomyces pastorianus
  modified_base (1767)..(1768): a, c, g, t, unknown, or other
atgaaaagaataagatcgctttggttcaatgcggaggcttcttattcaaaccttaacaattctcctagtttgaggaacaaaaatagtaccgataataactctcgctctaaaaattatcgttctttctcaaggtttgacttgatcaactctatacttttactgatgatgctatttttattagctatcttcgtcactgcattatatttaacaaagagttccaggcttacatactcacatgcctcgagggctgccctatttaaccctctgggtgtgatatcgccgtcattgggaaatcatacgttgaactacgatccagaagcaagggaatcttctaaaaaactttatgaactcctttctgatttcaacacggcatattacgatgatgagaacatgattttgggaagtaacttgttctcaaagaatacatactcgagacaaccatatgttgctaacggttatataggtagtcgtattcccaatattgggttcggctatgccttagacaccctgaatttttacacagacgcaccaggcgctttgaataacggttggcccttaagaaatcatagatttgccggtgcgtttgtatcggacttttattgtctacaaccaaaactaaactcaacaaacttcccagaattggatgatgtaggatattccactgtcatttcatctattccacaatggaccaatctacagttctcattagtgaatgattctaagtggttcaatccacaaaatgttacgttggatgacgtaactaattatagtcaaaacttatcaatgaaggatggtatcgtaactacggagttagattggctaaacagtcaaatacatgttaaaagtgaaatctgggcacatcggcacattcatccactgggagtggtttctttggaaatttccctgaatacggaccatttaccttcggattttgattcattagatgttaatatatgggatatacttgatttcaacacatcacataggactgttctacatagcacgggaacagacgaaaaaaacaatgcggttttcatgattgtgcagccagataacgttccatcttctaattgcgctatttactcaacgtgtactgtaaagtatgaaaattccaccaatccaataaattctagtgaatcttttgaagaaaaagatgtttcttctaatatttataatgttattttgacagaggaccaacccaagataatcgttcataagtatgttggtattatgtctactgagttcaataagaacaaagaacaacaagacaatactaatattgatttggccaaaatgatagctctaaacagtaaaggcaattacgagaagcttctgtcaagtcacaaacgtgcgtggtatgacctttacaacgacgccttcattgaaattccttctgacagtcttttagaaatgacagcaagatcgtccctattccatttactagcaaatacaagagactacaatgtctcgagcgataggggtcttcccgtgggagtttctggtttgtcatcagattcctacggtggtatggtgttctgggacgcagatatatggatggaacctgccctattgcctttcttcccaaatgtggctcaaaatatgaataattacagaaatgctacacattcgcaggcaaagttaaatgcagagaaatatggataccccggagcaatatacccctggacatctggtaagtacgctaattgtacttctacgggaccttgtgtcgattacgaataccacattaacgttagaatagtcgctatnnggcctccttatatccatatatcttga

SEQ ID NO: 81557 - DNA, 273 bp, Saccharomyces pastorianus
atggggaatgaaaataacgcctatagcaatatggacggtttgctttcgcaggatatctttgaacaggagaccgcggccacgctatttaaaagagacattgtcacaatgaactttaacaataatatattcacaccacggtatagtccgcgcacttttaccaataccgactacaattataatgataatgataataatgataatgatacagaggggcctggtccaataattcatccgggtcctgaaccaccaagatatgacgagatttcatcataa

SEQ ID NO: 81558 - DNA, 3024 bp, Saccharomyces pastorianus
atgcaatctactgtcccaatagcaattgcgagcaacggcaacaagagagatgtcgtccagaacgtttctgcaggcgacgagggtgatatattgcaaaggctagcccgtaacagagagatgatttctacctccctctcgccacaaaaatcgtcaggatttagtggtagaaggaggtcatctagtgttagggacgccctttcttctttttttggaactggtaatagtccaacatctagtatggacgattattccaatttgatgaaccgtaactattctaccgcatcaactgccatgtgtaggggaaacagttttccttcagatgttggcactaaggcttacaatattacgggatcttaccaaccggataggcacaggaattctgttccgtataccaccatagaccagttacacacaaggcaagacaccgggttgaggagagagtcagatccagtcgcggccaaaaaaatatctagtaataatgatattgttaggtcattcataacacatcatgctagtaatagcactatgtttattaatagggtgctatcggactatttagcggatcgtggtttcatcaagcaaacaccgttatataataagaaaagtgtgctggaaatttccattgcaacaagtgcagaatcagttttcttgccaactacagaaagtgatgaaacagagtatctatcactgattcatggttctttaaatcaggcgcgaacacagcctgtcgggtccactaacactgcagaaagtgatttcctcccttcatgtcctacgatggacactttgaatgaaaacaatgatttatcactatttccgttacatacacagcgaaccagcccctctaatacagcaaggacaggtaatgctatggatacaagcaattctgatcgtgcttctccggcctcgaacaataacacaacagatgcggattcctttgttgcgagtggcaataacaaccctatgaataataacaattctcccgcgagaaacagacatcctaattctcactcgcgttctcttcctaatgcttggaatagccaaatgccttcattcagctttgcattgatattttccctaaataaatcaactaccctttctgatattaaagtagaactcacttctaacgtgagagtggtgtggttcaatggtctcccccctacgaagaatgttaacgaggaatgctataatataggttctttggactggaccttaaatgcagacaactttaatcttttcattccgcaaggcgcaaagtctcctcttgatatcgttgaaaatcattccaataacaggaaattgaaagtgctccagaaattatcgatgaggaaacgccgttctttctcgaataaagcagttcttagggaaaatatattaaacaatttaaatgcctcgaattctacgaacaagttaaatgctggtgtttatgtctttattatccccatagtgcttgccagtcgtattcctgaatcgctttactacccatcagcgagggtatcctacagcttaagattagcgacaaaattgaaggatgaacatacacagttggttgcatcacggccacgttcttcttctatctcttctcctcaaaaactgcgttcatattcctgttctgattcttatgaatattctcaaattgatgacaccatagaaggagaaacctacaataacgacaaaaattctactggaaaaatcgcatttccctcctcatggttaaaaagtgcgaaggggcgcttaaaaaggaataattctaacggaagctcagataataatggcgcatcttctagtggtttagcgatgcaacatgattctgaagacactataaatttacagtacccgcttcatttggtgagaactccgccagaaatctctgtcactacagcaaataagccactttacattaacaaggtttgggagaattgtctttcttatgaaatttcattcgcccaaaagtatgtgcccttgaatggtgaaattccaatcacaattaaagtggcacctctagtaaaaagtcttagtgtcaagagaattcgtgttagttgtagagaaaaaatctcctacaggagtaaagactatcaatatgattttgaccagttggatccattggcttcagatccttgcaatccctatcatatgagatatttagtgagaaaaaagaaggacagaagcttgcctctatttgaggtggcctctaaatttactagtgggccttctattatagaggaagttgtcaccaatacagttgatgataacttattagcctacacttcatcaaaagaaaacaacaaagatatcccattttctgagtcctttactgttaaaacgaagttaaaatttccaaaatattgtgaagtggacgctaccaaagctgcaagtctaccaccatatggtatcgatcttttcgacccaataaaagatccaactcagagtgagaacacctctaataacggcaatgtattgggctttctagtgggtcgccctaacagggcttccaagacagttcataaaataccgcaagacaagaatcataatgaggtcaatgatacaaatggaaactcgaatacatctttgcaaactagctcgaatgttcccattcagcactacacacggttgaataaaccaagacgcggtttatatttggacagtatgcattttaagaatatccaatgttctcataaattagaaatcgtcttgagggttagcaaaactgatagtggtagctcaaaaatcataaggcattatgaagtaattgttgatacaccaatttatttgatttctgacctttgtaacacttcaaatatagacttaccgacttatgacatggccaccactgaatcttctaaagtcctgccaccaacttttgaagaggcaacatcagtttcagcatcaccaagatcttctgtatcttattatcccgatgacatttccatgcaacagttgaatttgtctagggtcgacttccctcgcaaatggttacctgtcaaccttacatccaaaaacaaccgctgtttcggattcgtctaa

SEQ ID NO: 81559 - DNA, 72 bp, Saccharomyces pastorianus
atgggagaaacaatgaacgaggctgttgagcagactggaaaagatgtaatgaaaggtgcccttggtttttaa

SEQ ID NO: 81560 - DNA, 1062 bp, Saccharomyces pastorianus
atgttcggtagcaaacgtctgaaaaatgttaaggaagcatttaagtccctaaaaggccaaaattcagagacacccattgagaactcaaaggcgtcttttaaatccaaaaattcaaagacatctactatttccaaagatgcgaaatcttcctcttctttgaagattcctataagttcaaataacaaaaataaaattttttcactagcagaaaccaacaaatatgggatgagcagtaaaccgatcgcagccgctttcgatttcacccaaaatttattggcaattgctacagtcacaggggaagtccatatttatggccagcaacaagtggaagtggttataaaactggaggatagatctgctataaaagaaatgagatttgtgaaaggtatctatttggtggtcattaacgcaaaagatactgtgtatgttttatcgttatattctcaaaaagtacttacaacagtgtttgttccggggaaaataacatcaattgacacagatgcatccttagactggatgctaatcggccttcaaaatggttcaatgatagtttacgacatagatagggatcaactttcttccttcaaattagacaacctacaaaaaagctcattttttccggctgcaagactatcacctatagtatccattcagtggaaccctagagatattggaactgttttaatatcatatgagtatgtaactctaacatactcattggttgagaacgaaatcaaacaatccttcatatacgaattaccaccttttgctccaggaggcgacttctcagaaaaaaccaatgaaaagagaactcccaaagttattcagtccttatatcaccctaattcactgcacattatcactattcatgaagacaattccttggttttctgggatgctaattcaggccatatgatcatggcaaggacagtgtttgagacagaaatcaatgttccacaacctgattacatacgcgattctagtactaatgctgccaaaatttcgaaagtgtattggatgtgtgaacaatccagaatatacttcactactcatctctcataa

SEQ ID NO: 81561 - DNA, 1785 bp, Saccharomyces pastorianus
atgttccacaacctgattacatacgcgattctagtactaatgctgccaaaatttcgaaagtgtattggatgtgtgaacaatccagaatatacttcactactcatctctcataagtcaatcagcagaggagataatcaaagtctcactatgatcgacctcggttacacacctagatattcaataacctcttatgaaggtatgaagaactactatgcaaatccgaaacaaatgaagatatttcccttaccaaccaatgtgccaatagtgaatatactaccaattccaagacagtccccgtattttgcaggatgtcataatccggggttaattttgttaatcctaggtaacggtgagatagaaacaatgctatatccttctggaatatttacagataaagcctctttattccctcaaaatctttcctggctgagaccattagccacgacttcaatggccgcttctgtaccaaacaaattatggcttggtgcgctttctgcagctcaaaacaaggattatttgttgaagggaggggttagaacaaaaaggcaaaaacttcccgctgagtacggtacagcattcattaccggccattctaatggctcagttaggatatacgatgcttcccatggggatatacaagataatgctagctttgaagtgaatctatcaagaacgttgaacaaggccaaagaactagcagttgataagatatcttttgccgcagagactctcgagttggcggtgtcaattgaaacaggagacgttgttttattcaaatatgaagtaaaccagttttacagtgctgagaacagaccagaaagcggtgacctggagatgaatttcaggcggttttctttgaataatacgaatggtgttctcgtcgatgtgagagacagggcacctaccggtgttaggcagggatttatgccatcaactgccgtgcatgccaacaaagggaaaacatctgcaatcaacaacagtaatattggatttgttggaatcgcatatgctgccggaagccttatgttgatcgatagaagaggtcctgcaatcatttacatggaaaacattagagaaatctcgggagctcaaagcgcatgtgttacctgcatcgaattcgtaattatggagtatggagacgatggttactctagtatattgatggtctgtggtactgatatgggcgaggtaatcacatacaaaattcttcctgcatcaggtggaaagttcgatgtgcaactaatggatattactaatgttaccagtaagggtccgatacacaaaattgatgcattttcaaaggaaacaaaatctagctgcttggcaactattccaaaaatgcagaatttaagtaaaggcctttgcattcctggtattgtattaataactggattcgatgatatcagattaataacactgggcaaatctaaaagtacacataaaggtttcaaatacccgcttgccgcgacaggtttatcttacatctcaaccgttgagaaaaataatgataggaagaacctaaccgtaataattacattagaaatcaatggccatctaagagtttttactattccagatttcaaagaacaaatgtctgaacatattccatttccaattgccgcaaaatacattacagaatcatctgttttaagaaatggtgatatagcgattcgagtgagtgaatttcaggcgtcactattttctactgtcaaggaacaggatacgctagcgccagtttctgacacactgtacatcaatggaatcaggattccctataggccacaa

SEQ ID NO: 81562 - DNA, 1224 bp, Saccharomyces pastorianus
atgaacaatattcagagtatcaagaggtatcacattgcaaaagtctacagaagagaccaaccagccatgactaagggtcgtatgagagaattttaccagtgtgattttgacgttgcaggcacattcgaatctatggttcctgattccgaatgtttgtccattttagtggaaggtttgaccagtttgggaatcaaagatttcaaaatcaaattgaatcacaggaagattcttgatgggatcttccaaatcgctggtgttaaagatgaggatgtgaggaaaatctcttctgctgtcgataagttggacaaatctccatgggaagcagtcaagaaggaaatgaccgaagaaaaaggtcaatccgaagaaactgctgataaaatcggtgagtatgttaaattaaatggttctttgaaggaaattcacgctgttctatccgcagatgccaacattacttcaaacgaaaaggctaaacaaggtttggatgatattgctactttgatgaagtataccgaagcatttgacattgactcattcatctcttttgatctttctcttgcaagaggtttggattactatacaggtttgatctatgaagttgttacttctgcatctgctccaccagagaatgcttcagaattgaagaagaaggccaaatctgcagaagacgcgtcagaattcgttggtgtcggctctattgcagccggtggtcgatatgataatttggtcaacatgttctctgaagcttccggcaaaaaatctactcaaattccatgtgttggtatttcatttggtgttgaaagaatattttctttgatcaaacaaaggattaattcctctacaactataaagccaacggctacacaggtgttcgttatggcttttggtggtggtaaggactggactggttatttacccgaaagaatgaaggttactaagcaattatgggatgctggcattgaagctgaatatgtctataaggccaaggctaatcctaggaagcaattcgatgctgctgaaaaagcgggttgtcacattgccgtaatcctcggtaaggaggagtacttagaaggtaaattacgtgtcaaaagattgggccaagaatttgccgatgatgatggtgaattggttagtgcggctgacattgttcctattgttcaagaaaagttatcacaaattcatgaagatggtctaaatgaggtcactcgtttaattaaaggattataa

SEQ ID NO: 81563 - DNA, 387 bp, Saccharomyces pastorianus
atgccattgatgggcgatgacaaggtgaagaaggaagtgggcagggcgtcgtggaagtacttccataccctgctggcccgttttccggacgagcctactcctgaagaaagagagaaactgcacacgtttattgggttgtatgcagaactctatccatgcggggaatgttcatatcactttgtaaagttgattgagaagtatcccgtacagacatctagcaggacggctgccgcaatgtggggatgccacattcacaacaaggtgaacgaatacctaaagaaagacatatatgactgtgctaccatcctggaggactacgattgtggatgtagtgacagcgacggtaaacgcgtgtctctcgagaaggaggctaaacagcacggttga

SEQ ID NO: 81564 - DNA, 111 bp, Saccharomyces pastorianus
atgaaacagatagtcaaaagaagccatgccatcagaatagttgcagcattaggaatcataggcctgtgggtgtttttctcgtctaatgacactatccatcgctacgccggg

SEQ ID NO: 81565 - DNA, 216 bp, Saccharomyces pastorianus
atgattcctaatgctgcaactattctgatggcatggcttcttttgactatctgtttcatcccgtcgtaccttgcacaatctgtccagactgtcctctttacgaatcaccagccttcccgtcttcttgtcttcatcacccacgtttattgtttaatgataaagccttttgtcctttatttttggttccttttcccgcttcgtttacccggtggttaa

SEQ ID NO: 81566 - DNA, 150 bp, Saccharomyces pastorianus
atggtttgcttctcgatctctttcaaccgagcgtcgttcttctcagcagccgccccttgcacttcatctataccagacttcgccttgattaggcccggcgtagcgatggatagttcattagacgagaaaaacacccaggggatcctctag

SEQ ID NO: 81567 - DNA, 135 bp, Saccharomyces pastorianus
atgagatttggtaccaaatcatccaagaaatttgtacctaaggaggtatccaaaaaggttcgtagggctgctaagccattcattacgtggttagaaaccgctgaaagtgacgatgatgaagaagacgacgaatag

SEQ ID NO: 81568 - DNA, 408 bp, Saccharomyces pastorianus
atgtctgaagaagccattagagctcgtgccaaggaactagaagtgaactctgagctcactcaactggatgaatatggtgaatggattttggagcaggctggtgaagataaggagaacttaccatcagatgtggagctttataagaaggctgcagaactagacgtcttgaatgatccaaaaattggttgtgtcttggcgcaatgtctattcgatgaggatatcgtaaacgaaatcgctgaacataatgcatttttcactaaaattttagtcactccagaatacgaaaagaactttatgggtggtattgaaagatttttaggtttagaacataaggatctaatcccactattaccaaaattttggtacaactatacaataatgatatcatctcggaagaagaaatcatga

SEQ ID NO: 81569 - DNA, 522 bp, Saccharomyces pastorianus
  modified_base (379)..(383): a, c, g, t, unknown, or other
atgtctattaatatttgtagagataatcatgatccattttaccgttacaaaatgcctcccatccaagccaaggtggaaggtagaggtaacggtatcaagactgccgttttgaacgtcgctgacatctctcacgcgctaaatagacctgctccatatattgtcaagtattttggtttcgaattaggtgctcaaacttccatctctgttgacaaagatcgttatttagttaatggtgttcacgaacctgccaaattgcaagacgtattggatggctttattaacaagtttgttctctgtggaagctgtaaaaatccagaaacggagatcatcataccgacctgcaggcatgcaagcttgcactgccgtcgtttcatcggcnnnnncttcattaagttatataagttagaaacatattatttaatccgaattatacaatcaatcttaatgtatttgaaaacatctattagtaactttaaaaaaaaaaaaactcctttctttttttctttccgtgccctccctccc

SEQ ID NO: 81570 - DNA, 3081 bp, Saccharomyces pastorianus
  modified_base (2942)..(3042): a, c, g, t, unknown, or other
atgaatacaaatgctcgttctgtgagagtctctgacaagagaggtcgttctagctccacttccccacagaaaattggctcctatcgtactcgtacgggcaggttttcagatactctaaccaatctactcccttcgattagcgctaagctacaccattcaaagaagagtacccctgtagttgttgtgcctcctacgagcagtactccagacagtttaaattccacgacatacgctcccagagtgtctagcgattcttttacggtggctactccgctgtcattacagtctactacgaccagaacaagaacaagaaataacacagtatcttctcagatcactgcaagttcttctttgactactgatgtgggcaatgccacgagtgcaaatatttggagtgctaatgcagaaagtaatacttcttccagtcctttgtttgattatcctctcgccacttcttattttgagccattgactagattcaagtccactgataattatacgctgcctcaaacagctcaactaaacagttttctggagaaaaatgggaatccaaacatatggtcgagtgcaggaaatagtaacactgaccaccttaatactccgatagttaacaggcagcgctctcaatctcaatctaccacaaacagggtttataccgacgcgccctactatcaacagcctgcacagaattaccaggttcaagtgcctcctagagttccaaaaagtacttcaatatcccctgttatccttgatgacgtcgatccagcctcgataaattggattacagcaaaccaaaaagtaccactagtcaatcaaatatcggcgcttttgcccactaacacaatatctatttcaaacgtgtttccattacagcctactcaacaacatcaacaaaacgctgtaaatttgacgagtacttccttagcgactttatgttcacagtatggtaaagtgctttctgcgaggacactaagaggcctgaatatggcattagtagagttttccacagttgaaagtgcaatatgtgctttggaagctctacaaggtaaggaactgtctaaagtaggggcaccaagtacggtatcttttgcgcgagtcttacccatgtatgaacaacctcttaacgtttatggcttcaacaacactcccaagcaaccgctgttgcaagaacagttgaatcacggggtgctcaattatcagctgcaacaatcgctacaacagccggagctacaacaacaaccaacttcatttaatcaaccaaatcttacatattgtaatcccactcagaatttgagccatctgcaattatcttcaaacgaaaatgaaccttaccctttcccgttgcctccaccatcattatcggatagtaaaaaggatatattacacactataagttcttttaagttagaatatgatcatctagagttgaatcatctcttgcagaatgccttgaaaaataaaggagtgtctgatacaaattattttggtcccctgcctgagcacaactccaaagttccaaagagaaaggatacgttcgatgcaccaaaattgcgggaactgagaaagcagtttgactcgaactcattatctactatagaaatggagcaattggcaatcgtcatgctggaccaattaccagaattaagttcagactatttgggtaataccgttattcaaaaattgtttgaaaactcgtcaaatatcatcagggatattatgttgaggaagtgtaataaatatctcacatctatgggtgttcacaaaaacggtacttgggtttgtcagaagatcatcaaaatggcaaacacgccaaggcagataaatcttgtaacttcaggtgtaagcgattactgtactccactcttcaacgaccagtttggaaattatgttattcaaggtattttaaagtttggttttccctggaatagtttcatttttgaaagcgttttatctcatttttggacaatagttcaaaacaggtatggatctcgtgctgtaagggcttgtctagaagcagattccattattacccaatgccaattgctgactatcacttcactgataattgtgctttctccttatctagctacggatacgaatggcactttactgatcacttggctattggatacttgcactttacctaacaagaacttgattttatgtgataaactggtaaataaaaatctggttaaactatgttgtcataaattaggctctcttactgtcttaaagattctcaatttaagaggtggtgaagaagaggcactgtcgaagaataaaattatccatgcaatatttgatggtccaatttctagtgattctatcttgttccagatactagatgagggtaattatggtccaacatttatttataaggttttaacctcgagaattcttgacaatagcgttagagatgaagctataacaaagattcgtcaactgattttaaattccaatatcaatttacaaagtcgccagttactggaggaagttgggctatcatcagcaggaatatcacccaaacaatcctccaagaatcatcgtaaacagcatcctcaggggtttcattctcctggtcgcgccagaggcgtttctgtttccagtgtgagaagttcaaattcaaggcataatagcgttatacaaatgaacaatgcaggtccaacgccagcattgaactttaacccagccccgatgagtgaaataaattcctacttcaacaatcaacaagtggtgtactccggaaatcaaaatcaaaatcagaacggtaattctaacggattagatgaattgaattcacaatttgattcatttagaattgctaatgtaacaaatttatccctacctatagttaacttaccaaatgtaagtaataataataacaattataataattctggttattcgagtcaaatgaatcctctaagccgctcagtgagtcnnnnnnnnnnnnnnnnnnnnnnnnnnnnnnnnnnnnnnnnnnnnnnnnnnnnnnnnnnnnnnnnnnnnnnnnnnnnnnnnnnnnnnnnnnnnnnnnnnnnngatacaagtttgtaccgctacaggtcatacggatattag

SEQ ID NO: 81571 - DNA, 120 bp, Saccharomyces pastorianus
atgtgctacaggatcaactatcaatcaatggacagaaatttgacaaacgccgaagttaacactttgcaagacatggtgtgttctaaattggtaaaagaatacagcgtagaactcagatag

SEQ ID NO: 81572 - DNA, 897 bp, Saccharomyces pastorianus
atgtgtacagaagagatgaaattgacaaactcacttaatccggtattccaccaaatggaaggagccacaatttggaaacgaacgaaggctgatgtgggcgtaaaggagccaatgtatatcgagaaaatccgtgaagatatcagacaggtagagaaccttttaaataaagaaaatgtaaagattacggttgacgatgatactatacctttgaaagaaaataatcctaaacaagagtatatgtccgatctggaggttgatttgtgctctcaacatttgaagaggtccattgaactgatagtttctgaagtttttaacaaaaaaatatctagcatgatcaagaacaaagcgaataatacacccaaagagctaaaagtccgttggattaacgcttacttcccctggaccgcgccctcatgggaaatagaggtttggtggcagggcgaatggctcgaactctgcggatgcggattgattcgtcaagatgtgctactaagagccggatataaaccttctgaaacaattgggtgggcttttggcttgggtttggaccgcattgctatgcttctttttgaaattccagatattagactgctttggagtcgtgatgaaagattttcaagacaattctccaagggattaattacttccttcaaaccttattcaaaacacccgggatcatttagggatgttgcgttttggttaccagaagataaaccagatattcatcaagttcatgaaaatgatttgatggaaattatcagaaatatagctggcgatttggtagagagtgtcaagctagtcgatagctttacgcatccgaaaaactgggagaaaatctatgtgctacaggatcaactatcaatcaatggacagaaatttgacaaacgccgaagttaa

SEQ ID NO: 81573 - DNA, 507 bp, Saccharomyces pastorianus
atggaggtaacttcaatgtttctcaatagaatgatgaagaccaggactggtctttatcgcttatattcaacccttaaagttccacatgtagaaatcaatggcataaaatacaagaccgacccacagactaccaatgttacagattcaataataaagcttaccgacagatcattacatttgaaagaatcacatccagtaggcattcttcgcgatctaattgaaaagaaattaaactcagtcgacaacacatttaagatctttaataatttcaagcccgtggtaaccacaatggaaaacttcgattctttagggtttcctaaggatcatcctggaagatcaaaatctgacacatattatataaatgagacgcacctactgagaacacatacttcagcccacgaattagagtgctttcaaaaaataagaaacgattcagataatattaaaagtggatttttaatatctgcagatgtgtacagaagagatgaaattgacaaactcacttaa

SEQ ID NO: 81574 - DNA, 1101 bp, Saccharomyces pastorianus
atggatcaagaacaaaaaattctgaatggggatgagacactctttcatgaagaatccatagagttatttaaggaaatacctcatttctatcaagcgggtaaaggtttgagcaaatctgatttattcaataacttgacattggacacaattctgcagttttcggcaagcgtgttatggatattaaactggctgccaggcttaaaaaaggctatcaatattgatgaagtaagccaagaacccatgttagatgctgatagattaaggagcagctggacattttctgaatcaatggatttaaactattcgaaccctagttccagcccaaattcattaggaaatctaaaaattttattggatgataaagcctccaaaaaatttgatgagactatcgacggattcaaaaccttgaaattcaaactaatcactatactgaggttcaacattagggccttgtgtatatacgacatcgggtctttttttcaaaacaccaaaatttggaatatggatgtgggtagtattgaattagatcaaaatatagcttctctaatttccgaattaagaaggactgaaagcaaattgaaacaacagttaccagaaaaggaaaaaaactccatatttattggtcttgatatagtcaacaactacgccttgattaagggtgccaaatccataaaagttttgaaccataacgggataaagaaaatgttgagaaatgtaaatgtcttacaacatgcctatagaaatctttcttctgaaccatcaaaaattaatatgaacgtcacaatgaatttttactctttatgcggctccagtgaagctgaactatttgaatatataaaagacaatgaattaccgcattgttctgtcgaagatttgaaaaccatattgaggctgcagtttagcgaggaaatgcatcgtcaattgaagagacaaagcactagctcaactaagggttccataaaaccttccaataagaggtacactgaagctttggagaaactaagtaacctcgaaaaagagcagtcgaaagaaggagcccgcaccaagattggaaaacttaaaagcaaattgaatgctgtccatactgcaaacgaaaaatga

SEQ ID NO: 81575 - DNA, 762 bp, Saccharomyces pastorianus
atgtacgaaatatgggtaaggtggtttaactctgtgaaggcgacggtgttgactaatgcctacgagtttaccggttatgaggacgaaacactggatcttttattgcttttcttaaagaattatctcgaagatatgcccagcaaatgtactacagttgaaaaaattataagtgtcctaaatcagcattcctttcctgagaaggcagaagagaaggaagaaaatcttcagattgatgaggaatgggcgaagaatattttggtacggctggaaaaaaccaagattgacagtgttgaggatgtaaaaaaagtaatcactgaaggagataaacatgaactagttggatacaaccagtggttccaataccttataaacaatgaaccgcagcatactacttttcatgaaaagattacctctaagcaactttgggttctgatcaagtatatgtcgaatacatggataaaagaaatacacaagaaaggaaggcattatcgtcggctgcaagattggctattctacatactggtacatacacccgaaagagtcacggcagaatatacaagcatcttgagagatcttggaaagaaatgccttgaactgattcaaaagaagccagttgaagcacatgagaataaaataacactcccgaaggagatggcggaattgaatgttgagataccagccgcggtggagaatatgacgataactgagctgacagtgtctgttatagcagtgaactatggtcaaaaagacttgatagaataa

SEQ ID NO: 81576 - DNA, 294 bp, Saccharomyces pastorianus
atgaaaagaggagaaagccaggcgcctgatgccatctttggtcaatctcgtgcatttgcactatctgattcttcagtgaatcctgatgtcattgaatatcttaaaagtgttaggcaagaagcactaagaaccaacgccatatcgattaagaatcatatgaatctgcaaaagaggacgcgtcacaaatcaagcatgtacgatgatgaggatgagggggcccttaaaaggcacgccatctcgccatccttgattaggcttcaaaggaatgtacgaaatatgggtaaggtggtttaa

SEQ ID NO: 81577 - DNA, 309 bp, Saccharomyces pastorianus
atgaacaaaagacgtggactagagagaaaggacattcctgcatggaaactttgtatttttggagcattgtctggcactgccttatggttgatggtatatccattagatgtcatcaagtctgtcatgcaaacggataatttacaaaagcctaaatttggtaattctatttccagtgtagccaagactttatatgccaatggagggataggcgcttttttcaaagggtttggtcctaccatgctaagagctgctcccgccaatggtgccacttttgctacttttgaattagcgatgaggttattgggttga

SEQ ID NO: 81578 - DNA, 189 bp, Saccharomyces pastorianus
atgtctgaagaatttccatctcctcaactaatcgatgatttggaagaacatccacagcatgataatgctcgagtcgtgaaagatttgcttgcaggtacagcgggtggtattgcgcaagtgctagtggccagccctttgatacgacaaaagttaggttacaaacattcgagcaccccaacaacagccatg

SEQ ID NO: 81579 - DNA, 321 bp, Saccharomyces pastorianus
atgaaaaacgaaagaattcaagaaaacatcaacccatggaccgttattggcataatttgtggcctagctatatgcatcgaagggactgcgttgttagccaaaatccaggagtctctgagcaaggccgaatttactcatgacgaaagtggattacatttgattcagtcatacacgaattatggtcttgatactgacaaattttccagattgaggcggttcttatggtttagaacttggggactttacaagtcgaaagaggatttagatagagaagccaagatcaatgaagaaatgatacgcaaactgaaagcagctaaatga

SEQ ID NO: 81580 - DNA, 264 bp, Saccharomyces pastorianus
atgctacaccataagttcgtatacccatttttattcaagtggcacttatcatgtgtagaaaagtgtcccccacaaatcacttttatagctaagtatgttacagcgaacgataaaaatggcaatagaaaacttacgataagggatgaacaatggcctgagttggcagatccaactccctatgatatttttggcattccaaaggccggatctggaaatcctaaactggacaagaagtcgttaaaaaaaaatatcatcgttatgtaa

SEQ ID NO: 81581 - DNA, 99 bp, Saccharomyces pastorianus
  modified_base (79)..(79): a, c, g, t, unknown, or other
  modified_base (91)..(91): a, c, g, t, unknown, or other
atgaaaaacgaaagaattcaagaaaacatcaacccatggaccgttattggcataatttgtggcctagctatatgcatcngaagggactgcngttgttag

SEQ ID NO: 81582 - DNA, 309 bp, Saccharomyces pastorianus
atgcctatggccgctattttcttgaggaacaagttcattgcctggttctccctgattcagagtgtacactactacctgaacaccgacgaagacatcatcgttgcctataaggaaaataaggcaccatctccaatggaccagcctcctgcaatcaagctattcatgagtttaatcgggttatgcgtgtgttacatgaacttagttttccctcaacaaatagctcaaccatcgtctagcggctctaaagataatactgaaacgacaattgagacaactaccgaagtagagacggaaacagctaagcagtag

SEQ ID NO: 81583 - DNA, 1185 bp, Saccharomyces pastorianus
atgatggcacaagatgtaaataatcccatggtagagtccaaatggagtgagttgagtgaattggccgataattggaacgaaaaaatcgactacaatccatcgcaagatcttcagagattcaccactagagagaatctctataattattatctgaatcactcacaagcgctcgaaaataatatggactgtattaataacagtgaggtgcccaccaatgataaaccaacagatacttatattttaaattctgaaacaaaacagtataatttagagggagattgcccgattttttcataccttcctatgtactgtcaagttattacaggtgcgactttaaacttgttggatcatctatcgcctacagaacgtcttatcggtataaattgggatggtggaagacatcatgcctttaaacagagggcaagcggattctgctatataaatgacgtggtactgttaatacagagattgcgcaaagcaaagctaaataaaatcacgtacgttgacttcgacttgcatcatggtgacggtgtagaaaaggctttccaatattctaaacaaatacagacaatttcagtacatctctacgagcctggtttttttcctggaactggttctttaagtgattcaagaaaggataagaacgtggttaatattcctttaaagcatggttgtgatgacaactacttggaattgatcgcatccaaaatcgtcaatcctctaatagaaagacacgaacctgaggccttaataattgaatgtggtggtgatgggcttctgggtgatagattcaatgaatggcagctaacaatacgagggctttctcgaatcatcataaatatcatgaaaagttatcctcgagcgcacatattcctacttggagggggtgggtacaacgatttactaatgagtagattttatacgtacttgacttggtgtgttacaaagcagttttccaacttaagatgtggtgacaataattcgttccaaatcgatccatttgatgtctgtgatggtgatgattctgaacaatttatacgtgaacatgatcttgttgaaatgtataatgaagagaactatcagtattggatatatgagatggaaggaagttctcgaatgaaaatgttaaggaatgacaataaggatagagatatggtcgaacttatgaagttttacgaactgtaa

SEQ ID NO: 81584 - DNA, 270 bp, Saccharomyces pastorianus
atgtggattcacttgccaatcattaaggacttaaagaaagcctgttctgaagttttcccagttgcagaatactctttcgttactattccaacttacccaactggtacgattggttttatggtttgctccaaagataaaacttgcaatgtcaagaagccactacgtgaaatctctgatgagaaggaggctgaattatacagatactataacaagaaaattcacgaagcttcctttgttctaccaacctgggcagccaaggaattaaattag

SEQ ID NO: 81585 - DNA, 531 bp, Saccharomyces pastorianus
atggcacaagaaatcactcacccaactattgtagacggctggttcagagaaatttctgataccatgtggccaggccaggccatgactttaaaagtggagaaagttttacaccatgagaagtcaaaatatcaagacgttttgatcttcaaatccactacatatggtaatgttctagttttagataatgtaattcaagccaccgaaagggatgaatttgcctaccaagaaatgattgcccatcttgccttgaattcccatccaaatcctaagaaggttcttgttattggtgggggtgatggtggtgttttgagagaggttgtcaagcatgattccgttgaggaagcctggttatgtgacattgatgaagctgttattagactatcaaaggagtacctaccagaaatggctgcctcttattctcacccaaaggttaagacccatattggtgatggtttccaatttttaagagattaccaaaacacatttgacgtaatcattactgactcttctgaccccagaaggtccagctga

SEQ ID NO: 81586 - DNA, 936 bp, Saccharomyces pastorianus
atggaaatagtagcaaacgctaaggaaagtaactatacagacttaatttggtttcctgaggatttcatatcaccggaacttattatagataaagttacatgttcatcaaactcatcttcttcgccacctataattgatttattttcgaacaataactacaatagtagaatacaactgattaacgattttacaacaaaattaatcaatattaaaaaatttgacataagtaatgacaatctagatctaatctctgagatactaaaatgggttcaatggtcgaggatagtacttcaaaatgtttttaaactggtctccacacctagttcaaattcaaattcatcggaacttgaacctgactatcaagctccattctccacctcgactaaagacaaaaattcttcaacatctaacactgagccaattccaagaagtaacagacatggaagtgtagtagaggcctctagaagaaggcgttcttcaactaataaaagcaaacgtcccagtataactgaagcaatgatgcttaaagaagagggtttacagcaatttaatttgcacgaaattttatctgaacccgcaatagaggaggaaaatggagacagcatcaaagagcactccacaactatggatggtgccaatgacctcggattcaccgcctctgtttcgaatcaagaaaatgcaggaactgatattgtgatggaagatcatggtgtactgcaaggcactagtcaaaattatggtactgcaacagcggatgacgcagacatagaaatgaaagacgtcagttctaagcctagtaaacctgaatcgtcggtcttacaactaattgtaagtgaagatcatatcattctcgacactatttcagaatgtaacttgtatgatgatgtaaaatgctggagtaaatttattgaaaaatttcaggatatcgttagctaa

SEQ ID NO: 81587 - DNA, 315 bp, Saccharomyces pastorianus
atggtagaaggagactcttatgtggagactttagactccatgattgaattattcaaggattacaaacctggttccataactttggagaatataacacgactttgtcaaactttgggtctcgagtccttcacagaagaattgagtaatgaactttcaagattatcgacggcatctaaaattatcgtgatagatgttgactacaataagaagcaagacagaattcaagacgttaaactcgtactagcatctaattttgataattttgactactttaaccaacgagatggagagtatgaaaaagcaacattcttctaa

SEQ ID NO: 81588 - DNA, 783 bp, Saccharomyces pastorianus
atgggtgccataatgaacggtatttcagctttcggtgccaactacaaaccatacggtggtactttcttgaacttcgtttcttatgctgctggtgccgttagattgtccgctttgtctggccacccagttatttgggttgctacacatgactctatcggtgtcggtgaagatggtccaacacatcaacctattgaaactttagcacacttcagatccctaccaaacattcaagtttggagaccagctgatggtaacgaagtttctgccgcctacaagaactctttagaatccaagcatactccaagtatcattgctttgtctagacaaaacttgccacaattggaaggtagctctattgaaagcgcttctaagggtggttacgtactacaagatgttgctaacccagatattattttagtggctactggttccgaagtgtctttgagtgttgaagctgctaagactttggccgcaaagaacatcaaggctcgtgttgtttctctaccagatttcttcacttttgacaaacaacccctagaatacagactatcagtcttaccagacaacgttccaatcatgtctgttgaagttttggctaccacatgttggggcaaatacgctcatcaatccttcggtattgacagatttggtgcctccggtaaggcaccagaagtcttcaagttcttcggtttcaccccagaaggtgttgctgaaagagctcaaaagaccattgcattctataagggtgacaagctaatttctcctttgaaaaaagctttctaa

SEQ ID NO: 81589 - DNA, 1059 bp, Saccharomyces pastorianus
atgactcaattcactgacattgataagctagccgtctccaccataagaattttggctgtggacaccgtatccaaggccaactcaggtcacccaggtgctccattgggtatggcaccagctgcacacgttctatggagtcaaatgcgcatgaacccaaccaacccagactggatcaacagagatagatttgtcttgtctaacggtcacgcggtcgctttgttgtattctatgctacatttgactggttacgatctgtctattgaagacttgaaacagttcagacagttgggttccagaacaccaggtcatcctgaatttgagttgccaggtgttgaagttactaccggtccattaggtcaaggtatctccaacgctgttggtatggccatggctcaagctaaccttgctgccacttacaacaagccaggctttaccttgtctgacaactacacctatgttttcttgggtgacggttgtttgcaagaaggtatttcttcagaagcttcctccttggctggtcatttgaaattgggtaacttgattgccatctacgatgacaacaagatcactatcgatggtgctaccagtatctcattcgatgaagatgttgctaagagatacgaagcctacggttgggaagttttgtacgtagaaaatggtaacgaagatctagccggtattgccaaggctattgctcaagctaagttatccaaggacaaaccaactttgatcaaaatgaccacaaccattggttacggttccttgcatgccggctctcactctgtgcacggtgccccattgaaagcagatgatgttaaacaactaaagagcaaattcggtttcaacccagacaagtcctttgttgttccacaagaagtttacgaccactaccaaaagacaattttaaagccaggtgtcgaagccaacaacaagtggaacaagttgttcagcgaataccaaaagaaattcccagaattaggtgctgaattggctagaagattgagcggccaactacccgcaaattggggacctgcaggcatgaagctgcactgccgtcgt

SEQ ID NO: 81590 - DNA, 222 bp, Saccharomyces pastorianus
atgaatcaagaagtcacgatcaagtatgtaggtaaaagatcaggggggagtatgtacataaccaaaaagattgggaaagagtttatatatgaatcatgcctacgatcgtaccttcttggctttcccaagaaaatttttcatctctcgaacttctcgagagattgcgaacggaacggcaaacgccgccggcatttctcggaaagaagactagaaaataaatga

SEQ ID NO: 81591 - DNA, 636 bp, Saccharomyces pastorianus
atggaacagggcaagacaccatattttagtgatattgatgattttatgaatggattgaatattatatcacccttaacacctgacgattttgaaaatgacgatacattagttaaaattgatgaaacctgccaaattcactccgcttctgaacctgagaagacctccataagtcccacatttgggaaaaatatcaaaaaggagctagtaactgatgatacggaaagcattattagcgggcctcctttgcaagagaataaaaagactcttttgaaataccgatatgtcaggacttctcttgatatgctcggctctgaaaagagtagttctaaaaataacagcggtggtatgttccgtattttccataagagtgctaattttggcgacaaaaatcaagaaaacgtgccacgagtgtgggacacacttagaaataatttgggaagggaaatttatcttttgcaaggaagattcaaaaaatggactacaaagcatcaaaatcttaagaagggccaaccttgtaaagatgaagacgccgttaccgttcccttaccatcatctgatccgggaaaggaaacacagttggaaactaaactctgttttgtgcccgaaccaggtgatcagcctttggtacaagcataa

SEQ ID NO: 81592 - DNA, 591 bp, Saccharomyces pastorianus
atgaacacagataccgataaagtcagcgatggtggatttgaactattaaaagtgattagaaactgcatactagatgcttggactgaatttcgaaattatgaaaaaagatgggaggaaggcaaagaggatgatatttactcattggtttacagcctgagacatctatggagtaaaaatagcaaagagaaaagcgccaaaatagagcaattgagatcctataataccaaactaaaatccatcgagttagacccctcatctcccgattcaccaccaccatgcattatcgtctgttctcacgttaatcatgaactcgcaagcccaatgttgattgaaatgggaagacaactagcaacaaaatggaaatatggatttgttggaatagacagcatggatgatttaaatgtcgatgtggcggttagcttactaataaaggaaatatcagaaaagatgaagctactggtttctaattccaatggaagtagtagtagtggtaattcaagttcaatttacaactctcatttaatgaatgacaagaagaaaaacaacaatgccggcttaaacaaaaatatgttgaagaaaattataaaataa

SEQ ID NO: 81593 - DNA, 189 bp, Saccharomyces pastorianus
gtcagagaaggttcgaagagagacctcactgcgatcgccgttctggggggcacttctaccggaaagaccgtcccggtatctaggctactgtctaatatcgtccacgagggtcagtatcccataaggtaccaatctaactggctcctcggctttgttccgtcatccgatcctggtccagagctatattag

SEQ ID NO: 81594 - DNA, 1002 bp, Saccharomyces pastorianus
atgcctgcaggtcatgcttttcgcaccgaacctataatggattttgaaattgagcccattgtcagttcaagtaaattatcatacaacgtcgttactaacgctataaagagtaagtttgccgaagccgtgaaggagtccctagttgtaccgtttatggatgatattgttttttatccaacaccgaatgaagtatacagaggtggtatttgggaggaacaggatcctgaggcagcggcgagggctcgcactgctgcggcagcctcagatatgaataataccagtgctaaggaacacttagaagcacttcaagagggcggaatgaaaacccagagtcgaatcaaaaaagccttaaggccagagagaaagaaagaaaacctaaaagatcttgttgacgcatctggagtagcaacgaaaactacaacccagacaacagtcacaaccgctactaatgatgatgtttccagttctgaaaattctaccaagtcaaggaagtacttcaagaattcaatcaagaaaatcggtagatggtacaaggataatgttggtaattcgagtgacaccgaagatatggatgaaatagatgttcaagataagaaaaatgatgattcagcagatgagagagaatcagataatcctatccttacatccaatccaaaaatgatttctaataggagaccagtaccaagaaggccttcacaaccgttaaatacactatctccaaaactagaaggcaggaaggaaaaagacactgagaattttccagttccaccgtcggcttcaaatatgaatgcttcaaagatgtttgcgaacaaagaaaatagaaagttttctgtatcctcaaatgattctcagaattcgctcaaaaatggtgatccccatgtgaaagcttcaaaacttgaaagctctcaagcttttgttaagaagacctctcagaatcgttttaatgacggctttttcaagcaagatttagaatttgaagaacagcgagagcccaaactgtga

SEQ ID NO: 81595 - DNA, 1413 bp, Saccharomyces pastorianus
atggctagcttgaaggtatttctcgcagtttacttgcttggcggtatcacatttttgcctttggtccttttcaccctctataaaatccatttattgtacagtaaccttaaatcggcatcgaagaaggagctagatcatgatacagcagacgaaattgatgagaaaaccagacttctggctcgtgatatagacccaaagtttaaagcaggcaagctagaagagcaattaggtgtcaaagtttttagcaagggttggatcaccgtcactaagcaatattattatcattcttcagaagtggctgtaattttgaagaattctaataataataaagattcagacactgcacttcaagagcaaatcttgcaaagaacagacttgaagaaaaaacaaaggttttttgcagtattaagacatggaaatttgtttttgtataaagacgattctcaaaatgcaaatttggtccatgctatatctttacaaaacagatttatcaccatttggccccgtttcgatgaactgggtaaggaagaattgccagatgcctcgcttttcactaagagaacttgtattgctattttcaagaatgacctcgtttctatagactctaaaaaccataatgttatcctgccacacttcgacccacttaccagtgctgaatcgaataacggtgacatctctaccaatgacactacacatgaatatcaatcacaattccatagctcaaatcagttcttcttgtatttcgataataacatggacaaagaagattggtattatcagttgatcaatgcctctaaaaacagtaattccctctcaactggtttattggatcctaatgtttcagctaacgcagctcatttgaagactaaggatatgttacaattgattcaggatatcaactctactgaaaatcggttaactactaagtggctgaatgctcttcttgggagattatttctttctctgcaacaaactgatacgttgaataagttcattcatgagaaaatctgcaagaaattgaataaaataaaaaccccagggttcttggatgatttggttgttgaaaaggtcgacgtgggtgatagtgctccattattcacctctcctgagttattagaattgtctcctgagggttcgactaagattgctatcgacgttcaatataggggaaacttgacaattattattgcgacaaaggcgagtattaacttgggatcacatttcaaacaaagggaggtttctttgcagttgtccataaaaattaaagaattttccggtccacttttatttttaatcaaaccacctccatctaacagaatttggtatgcttttcgcaccgaacctataatggattttgaaatgagcccattgtcgcaagtaaattatcatactacgtcgggggatcctctagag

SEQ ID NO: 81596 - DNA, 531 bp, Saccharomyces pastorianus
atggataccattaagataattcagtgcagcatatgcggagacacagatgtttctcgattaagcctgtattgccaagactgcgaagcaatatatcacgaaacatgtctacgcgggctagcttgtgaggtgggcgatcgcaatacgtggcaggagtgcacagattgtagatcaaatgcattgctcgagctgcgcatgggtgctatcagtagccaacttgctagttacgattccaggaattccatgatttttgctggtgagttacgggacaagcacagcgtcaagacacagcagatgtatgaacagatacggaatgccaagcacaaaatccagatgcacgtgcgacgagcactggaccggtacccactgcctctgctgcgcttcaaggatgcctacaagcacgtcaacaagcaagtatcccgcaagttgtaccgtctctctgacaacaagtacctgcctgaccagtacgattacgactctttagcccgaactggagtgcacacagaactcctaatttactgtcatgatgagtag

SEQ ID NO: 81597 - DNA, 999 bp, Saccharomyces pastorianus
atgatgaaggacccaaaatcaggaactacaaactatataattgattttaaatcaggattttcttttgttccgggaagtacgattgacgtgtataacggtttatttgctgatagggagcgagattcacttgggaaatctcatttcgcaagtttggtacttgcgtatacagagcatcattctactgggagtcatacaagcaacacaactgcagcaagtagctccgccaaacacaatgaaggagtcttcgagccatcttcagatgaagaggatagcataacgaattctactgatggtacgagcagtgtgagtaacggcgagagtgacaacgatagtgtttctagttcagataatcaactcagttcaaatgacagtaatgaagattatcattccattaaggacgagtatccgattttcgaagacgaaaatgccgattgtctattatacttacatacatgtcatcgaaattttatctggaaatgtgctaataagtatgaaagggacaactggatcgattctatcaatctattttcagcatatgacggatgctatgtggaaattggtagtatagcaaacactatttgtaataagagaaagcttaccattttgcagaggatggaaagacttaggtctataaaatcagccaaatgggagaaattgaaaaaatttgaaagcactctgatgcttatgggaaaatgtgttcctattagcacaaagactaagacagatatgataaaccgcataagacagctggctgtcagaatggactggttaatctacgaaattaagagaagcgagctgtttgtaagtatcataaaagaagtgactcgcaagcaggctgaaaagaatatcttagagcatggtaaaggagaagaggaggggcaaggcaataacgacgatagtgatggtatagatgatatagaggaaagcttcttattcaacgaggacagtttgcaagtgtgcgtgagcgacagtagttacgacgaatgtagtaacgaataa

SEQ ID NO: 81598 - DNA, 2589 bp, Saccharomyces pastorianus
atgaatcagtctatttcttcgttgattaagcttaaattccttcaatcacacagtaacgataaaaatggcaacaaaaagggcggaagcaatgtttcaacaggcatagataaattaagagagtcggaaagttatagaagtccttttcttcaactcgcagaaatacaggaacacactaataatgacgacgataaacttgatgtaaaagaatgcgagcccacaaaaaaacacagcaaactaagcaggatacggcgtaagatgggtaggttagacttgaatttcaggtcagccaatgaaaagggttctgaagatgatgaaatcttggttgcacaacacctccgtaatggacaagatcctgaagaaatgcctttcaaatcagaaaacaacatagattcgatagagaaagttcccaagcccgatggtgagagagtcacacttactagctccgggtctgataacgtaaagagaaattcaaaacacgccccattcattcctgtgaaacctgctctagaaaaatttccttcttctaatagattgtcaagagattacagaaaatcacaagagcctaccctgtttaacggtgatagattagttcctacccttcctactgtgagtaggatatcgacatcttcttccgtcggttcctctacagcggcttcaagatatttcaatccgtccaaaagagctgttgttgcatcatcatcatcatcgtcgtcgtcaataaaattcaattcgctgcacgcaataccacttgatgcaactcctcaaattgaattggcaaaacaacaagatgagatctccaaaaggaggttcggaagaaggcgcagtagaactgttgacgtatttgactatattaacaaaaacaatacagcaaagaacaaaccgccactctctccatcttcttttattaggactattgacgagaaaaatacaaattctcttatgcaagaccccatgggatcccgcggacctcttttgcccgatgatgccaatattataagcaatgatacagatggagcggaagcaagtcacccagaccatcaggttttatcaaggtctcgatctcaaagtacgtcttttgttcaaggcaagggcggcaagagaaaatcaattgaagatgaaggctaccataacaaattgggcctacctcatggatcaggccctacttcagtttacaacaataaaagcaatgccaattcaactattactggaatgtcaagaagaagtagctcaattgtgaatgctttaagtagttttgttaaccttcgctcctccagtttatcatcctctaggcaacagcaccttcaacaacaacagcagctacaacaaaaactggatgtctcgctggaagatctaccaccggttcccgcgcctgaatttagtgattcttgtaaggacttcttgattaaattagcgccctacgggaagttcattggaatcattttaacggaaaaggatgatgagttcaaaaaaaattgtttaaactacctattaacgaattgcttcgaatttaaaaatgaccctttagatattgccctgaggaaattgttgatgtttttagagcttccgaaggagacgcagcaaattgatagattgataatggcttttagctttgcatactataaggcccaaaagagctattctaaaaaaaaaggaattgagtgcccctggtctaatgcagaccaggtgtattttattgcattttccttactaatgttgcacactgattactttaaccccaacaataaaagcaaaatgacaaagcatgatttcgtggatttagtccataatgacaaatactcaggaggtaatgagatccctatggccgttttgacatatttttatgagaatgtgacagccaaagagtcgcccaaatttaattactttttgatgtcaccaatggcgttggacgatagcatccttgataaagatgcatttgacacaaattttgctatcacattatcttcgaattcgatgtattctcccatagacatgataaaaagggggagtataatacccaaggaagcttccctttccccaatcttttatccgctaacgaattcaattagtgcatctggtatagccccatctacggcggcttcttgcccaccaagtacgtcgggtactataaacggggccaacctcggaacggctaacagtaatagcaatagaccggcttctaactcaatatcgtcttatttttcatataatccaagctctagttctagcggaaatgctacgttagttcaagatgacattaacgtttattcgcacattataaatgatacattaaatgaagtaaatttatttccagaagtctcaaaatattggaataagaatgctctgaaggcaaatttgttgagaaatgaagaacataaatacgaaaaatattatagtattatgaatgatactaaaggtgggtatttacgctttcacaacagtcaattgaataaactgaatttacctaattttgaaatattgaatgataatagccggtctggatgcaagaactccgattataagtattgcaaaatccttcaaatgggaggaataatgaatttggggatgcccagtagaattttctattgttaa

SEQ ID NO: 81599 - DNA, 816 bp, Saccharomyces pastorianus
atgagacagctatggcaagatcctgagttaacccaaatgctaaaggcaattgtcactatgatttacgaacctatggtcaagatcttcaaagttgcaaggatggatgttgctttgaaaaattttgagaagttcatgagtgatttgatcaggcttgttgatgatgttatcaatggtcagttgggcgtttccacacagttcgatgtcgtggaagaaatccataacttagtaaccaaacatcaagatgccttttttgagtttattcatgatgtatatttgaacgattcagagggcatttttgaaggttttattacttggattactacgatagtgaaatttttgcaaaagagtaaattcggaggaccgagtgaaaggattgacttcaataagttaatttgtagagatgatatcgatattgatgtcagacttttgaaagttcaagttaataatgttcttaacaaaaagattggtgcgagaaaaatctataagaagttgttagatttgaaggttaaacaaggtactaaacaaaatagcaagcacgctgctggcatacttcaaaagaattggagtgacataaactcattggttatgccatccagctctggatcttttggacttggagatggtgatttggtggatttggatctcgatacaggtgattacgattttttacataaagagaatgaagttgaattagaaaagcaatacaaagatttattgaatcttgttgttgatgaaagtgaaattgataaattgagatctcaagttttcgcacaggaattaaaaaattatttagaagctcaaattgctaaaaagtag

SEQ ID NO: 81600 - DNA, 135 bp, Saccharomyces pastorianus
atgccgtacacagtaatgggacagatcatgaaatttactaatccaatagcaatcatgaggggtatgattgaattatttatggcacaacccttcggtggtcattcgctccttcaaacaatgttttctacgatataa

SEQ ID NO: 81601 - DNA, 1824 bp, Saccharomyces pastorianus
atgattactcaagacactcctgctttaaatccaacggaagaacactacctgaagagggaactgcttcgatgtcaattggattatgaaattggaaagcttaacgatcagtttgctttgagaaagttcggttatcctttttcaccaaacgatccgacagctccacagcctatctccaataacgattcatcaccagtgctcggtggcaaaggccattttagcgttaattatcccatgctgagttatgttttgcaagaatttatatccacatttcctttactttcaacaaacttgctagttgatgaaaaattctggcagagtaaggttcaagtgttctttgaacatttcatgagtcttgggtttagtgaaagttatgacagggaggaagcttcaaaaaggaagaaagtttccaaaaagctatcaaaggttctcttgttgctctttaactccggtgttggctcttttcaagagcaagcgtattataatgaggataaattcgttttacagtcaggccaagcgagaaaacgctctaatattgagaaatttgcaatgccaactagagaaaatttagagaatttgctcactaacgaatccgtttttattaacggttgggacgtcaatattatatccgtgttcaataagaattcacggaaatgtactgaaagtgtggataatgacaagtctattaaatctactccaacttcgagtcccaaaagccatgctataaaatcatttgcttccacttctaaatggatgaagaatgccttcaacaacactattaacagtaccataaatagtatgcccgaatcctcagcatctttattttcgaaattatcccttggcgtgccttcaactaagagcaagcaatctagaaaacatcattatttcttgattaagattaagaagcaagatgacgacgaccaagataacagcaatgaagagaatagtaatcttgatcaccatgctgattatttctatgtgacaagaacatacagcgacttcaaaaaactatctcatgatttaaaatcagaatttccggggaagaaatgtccgcgcttacctcatagaaataaaaaagtgacgtctatggtaactaaaaccgaagtgttacacaatgggcaaactaaatcagcagccagggaaaaaatcgtcaacacttttgacactgatttacaatctgcatcagagtctgataattcttcatttttacagacaacgaatgaattatctgctacagaaacagtacttacagaaaaagaaactgaaacgttgagaaaaaatattctaaatgagatcaaggaagaagataatattgatgaggacgagtatgaggaagaaggtgaaggtgaagaaagtgattttgatgaatataaagatgcatccgattcaaaaatcaatactttggtgggtgaaaaaatgagaacttcattaagacaatatttaaggactttgtgtaaagatgcagaggtttctcaaagctcatctattcgtcgcttcttcctaagtgggcctaatttagatattaaggacataaatccgaaaatagcagatgacattagaaacagggctctgatagatgtaagtaatttggagaaccaaatacgtttccaacagatggcgttagaaaagtctttaaagctgcaagactcaatgaaagatttcaaaacatccctgttaaaagatgaaaaatacttgatgagtctactaggagaaatcaaggacaatacgaaagttgaagacctgtcaccacttttacaagactttgtggaattgtgtaagatttatatttcctcaatgatttatcaaatgtttctgcgtaaacgataa

SEQ ID NO: 81602 - DNA, 153 bp, Saccharomyces pastorianus
atggatttctatgtcgtcatgaacagaccaggtgctagagtcactagaagaaagagatgtaagggtaccgttggtaactcccacaagacaactaaggaagacaccgtctcttggttcaagcaaaagtacgatgctgatgttttggacaaataa

SEQ ID NO: 81603 - DNA, 177 bp, Saccharomyces pastorianus
atgtctgccaaagctcaaaaccctatgcgtgatttgaagatcgaaaagttggtcttaaacatttctgttggtgaatctggtgacagattgaccagagcctccaaggttctagagcaattatctggtcaaactcggggatcctctagagtcacctgcagcatgcagctgcactgccgt

SEQ ID NO: 81604 - DNA, 1224 bp, Saccharomyces pastorianus
atgttaatgggtcttgatgaagaatatattgcagagagggaacgacagaaaaagaaacaaagtgagatagctgtggcaaaggcacaagctgcacaattaaaacttgaacagcaacagcacaaacttcagcaagtgccgcagaggggcaaaaaagatattgtttcgcagagatctaacgttaatgcgagaaaacaaaacatctcacaaactcttgcagcaaacagagccgcctcgaacaggaaaaatacagcaagtgataatcaaaggacaatgaaatatctgcaggaacagcttgtcattttaacacgagatagaaagggtttatcgaagcaggtcatcgctgcaattttgacgcaggctctagctatgacaataaatcaggttacacaagcggcaaaaaacaaggggattactggtaatccacttacagccttgatggacaagaatcctcagcatttgaatctaattttagcagctgctgtaaacgcggcaactgcaaaagtcacaaaaggtgaggtaaagcaattagtgaaccctgaaactacagcggcgggggctttagcagctaaggcacagcattccaaaccgatacgccaaccaatagtccagacgccgcatgtaccagataggcctccatctcagttatctgcgtcggcatcatcccatcccaataattacttgcatgataaacaaccgggttcgtttgatccttcgtccttgtctcgattttttcaaccgagacaaaatgccagggctacatcctctgtggcagctacgtcagttccggcggctgcttctcaaaatgttgatgcacaacccaaacctaagcctgcacaggacaacgacttagaaagtgaaagcggcactagtagtagtagcagttccagtagtgagagcggaagcgagagcgatagtggtagcgatgacggtagtgctagtggaagcggcgataatagcagcactagtagtgaaagcgaaagcgaaagtgatagtggaagcgaagtagatgaaaagaacaacaaaaacgaaaagatcgatagtgaaagtattaaaaacaacgaatctaaagatgatattccatctaaagacgagaatagtagcaatgataatcgcgagatttcaaaaaccgacgaagaaggtcatgattctaaaaggcggaaggtcagcgaggatatcaacgagggtatcactgaagtaaatgtatcccttgaggaaaaactttaa

SEQ ID NO: 81605 - DNA, 1038 bp, Saccharomyces pastorianus
  modified_base (531)..(579): a, c, g, t, unknown, or other
atgttccgtctttctaatacagtttcttccctagaatttctggatgagtttttgatgggcatattacttgctccagagatggattttttgtcaaatccaagttattctcttccgtctaacaaattagtgggacagggaagttattcatatgtgtaccctatatcatcaagtgcttcgtcaagatgtaacaacgattcaggggttgttttaaagtttgccaaatcacagcataaaagcaaggtgattttacaggaagctttgacgctagcatatctccagtacatgagtccttcaaccaatgaaagtcatattattccattctatgggttgacatacataactaaatcccattttagaagactgaggtccaacgaatgtgttcctggccttattcttccgaaatgcgaaatgagtttatatcacttcaatacagcagtgtcacataagctttcgttgataacaaaaagaaaaatatggtggagacttatgaagcaaatgatagacgcattaaaatctttgaaaacaaatggnnnnnnnnnnnnnnnnnnnnnnnnnnnnnnnnnnnnnnnnnnnnnnnnncatgttcttaatggaggccattgtaaggattttgacttctaccttgctgactttacgtcggcatttcacattaaccaaacaccaacagatctgaataccacggtagaatactgtgcaccagaactaattgatagctcctccgatcatgttcctacatttgaatcagatttgtatgccgtggggctttgtcttttatcatttatatcgcagcatgagccttacaacgaacttcaggcgttagtgtcgcatggatcctctccaggtattggcagttcatctatacagcagtcccaatggctgataaatgctcttttgaaaaaagatcctataaatctaaacatgttaagaaacgatttattccaggattggaagtcagaactagcattattgtccagaattctggttgacagactgcctctagaaaatctcataactatactcgatagtaactatatatga

SEQ ID NO: 81606 - DNA, 147 bp, Saccharomyces pastorianus
atgaacagtacacctcctacgtcacccgttaccagggtttctgatggttcctttccatccataagtaacaatagtaaggattttgcttatcgccaaccgcaaaaacataaaagtaacttcgcatatcacatctggtatctcctgtag

SEQ ID NO: 81607 - DNA, 732 bp, Saccharomyces pastorianus
atgagttacacaattagaaccccttgcaaatcgccttattcaccttatactggggaaggtatgctttacaaccggtcagcagataacttaatggcatcctcttcgcgaaaagcatcggctcccggagaggtacctcaaatagctgttagtaatcatggggatgaagccattattccggcaagcgcgtattcagatagtagtcataaatcgtctcgtgcctccagtgttgcatccattcacaaccaacgggttgatttttatccttcgccattaatgaacttaccaggtgtttcacccagttgtctagcattggatggtaatgcaaacggatattttggaataccattgaatttcaattcggaagcaagacgagggtcagatctttcaccttttgagatggagtctccattgttcgaggaaaacagaactcaaaactgcagtggctctcgcaaaagttcagcttgtcatattccccatcaacgtggtccaaggaaagaaggtaatgactcacgattgatctacggcaatgagaagggcgcctcacaatcacgtctaacgttgaaggaaccgcttacatctaaaggtgttgaagctccttacagcagtttgaaaaagacatatagtgcggaaaacgtcccactaacatctactgtatcgaatgataagtctcttcactcgcgcaaggagggaagtactaatactgtacctgctacatccgcatcaagtaagtga
